United States Patent Application Publication US 2023/0272434 A1 - sequence listing, part 15

SEQ ID NO: 24907 - protein, 1341 aa, Emmelina monodactyla
MSYNNKKYNLRSRHKASAASSESTTFISTLSRNSPEITRNGNNISEPSSPNSSTSSLYQTPNSSFHSFSVPSSPSSSPSSTQSVVVTQEAEALVPVPTTATKRARRKWSQDMNMFIWRTYLILTNLENDTKSYLEPLYRMFNDKFPHMQASKQGIGCQRRAIINNKLLPQNILDEIKSEVAIHLQTTDTPSSSAVAISQSSSRMRWSIEVNIAIMKIFFEVTKMETDLTSYRKKLHDKFIQEFPNLSHVTEQRLADQRRTIIHNKLLTQQIIDRIKEDVSTKITQTNTLDTTQPLPDEHSLQNNVSQDIENRHTISESTADARENVSSNTTGRITHLPVEEENFIKEKFIEVLDTFKNTEPTSRPALPKLKTSKKLAIIVNFINDTLIPDTLSADDSFSSIQTILYSAAYTAAIQCGAKINFNPMSNSRPKRIPAWQKRLQNRINKLRVHIGKLTQYIRGNHSYRLTKHIESIKKKYIIHSLHENNNTDLAHFLDTLKQKLNALARRLRRYKQTTLRKTENTLFKINEKRFYRNLTQSPNGTDSNVPDIPTPDSMVEFWSNIWANPVQHDQGQWISDYKQKTMGLASMHFDEVTLDLLQAVIAKTHNWKATGSDRIHNYWYKKFTNLHNSLLKQINNFIKDPNLMPKYITEGITYMLPKQSPSTSDPGKYRPITCLQTIYKIMTSCIAELITKHTTANHILAEEQKGCRKASQGCKEQLTIDQILSKQAFKNKRDICTMYIDYKKAYDSVPHSWLLEIINIYKIHPTIVNFLTNTMQSWKTKLKLYATDSAIETDFIRIRRGIFQGDALSPLWFCLALNPLSDLLNSSSRGFQLKYDGQQLTLNHLMYMDDLKLFADCTENIHKLADITQSFSEDIKMEFGIDKCKLQTVIRGKIEEQSYSLPDMQQIEPVDQVEGYKYLGYQQTQQIHHTKTKHTLIQKFKSRLHKILNSQLNARNTIKAINTFAVPILTFSFGVIPWSQSELTRLQRSINVNMTQYRKHHPRSCIQRLTLPRLEGGRGIIDLQNLHNKIINSLRTYFLYKTTQSQLHNAVAKADDKLTPLNLSEHSVQLKITSDRRKIDLWSQKSLHGRHRADLINPNVDKSASNAWLKRGELFPETEGFMVSIQDQVLDTKNYRKYIIGDRSQSDHCRRCHCSSETIQHITGACRTLAQTDYKHRHDQVAAIIHQHLAHKHKFINEKTAYYKYKPQTVLDSSEVKLYWDRTIITDKTISCNRPDITLHNKNNKTVYLIDIAIPNTHNLQTTYTEKISKYTDLAIELKKQWKVDHVKTVPIVISSTGVIPKSLHNSLKLLDMHALSYTLLQKATILNTCRIVRKFLSLN

SEQ ID NO: 24908 - protein, 1341 aa, Emmelina monodactyla
MSYNNKKYNLRSRHKASAASSESTTFISTLSGNSPKITRNGNNISEPISPNSSTSSLYQTPNSSLHSFSVPSSPSSSPSSTQSVVVSQEAEALESVPTTATKRARRKWSQDMNMFIWRTYLILTNLENDTKSYLEPLYRMFNDKFPHMQASKQGVGCQRRAIINNKLLPQNILDEIKLEVALQLQTTDTPSSSAVVISQFSSRMRWSNEVNIAIMKIYFEVTKMESDLTSYRKKLHDKFIQEFPNLSHVTKQRLADQRRTIIHNKLLTQQIIDRIKEDVSTKITQTNTLDTTQPPPDENSLQNNVSHDIENRHTISESTADALENVSSNTIRRISHLPVEEENFIKDKFIEVLDTFKNTEPTSRPALPKLKTSKKLAIIVNFINDTLIPDMLSADDSFSTIQTILYSAAYTAAIQCGAKINFNPMSNSRPKRIPAWQKRLQNRINKLRVHIGKLTQYIRGNHSYRLTKHIESIKKKYIIHSLHENNNTDLAHFLDTLKQKLNALARRLRRYKQTTLRKTENTLFQINEKRFYRNLTQNPNGTDSNVPDIPTSDSMVEFWSNIWANPVQHDQGQWISEYKQKTTGLASMHFDEVTLDLLQAVIAKTHNWKATGSDCIHNYWYKKFTNLHHSLLKQINNFIKDPNLMPKYITEGITYMLPKQSPTTSDPGKYRPITCLQTIYKIMTSCIAELITKHTTANHILAEEQKGCRKASQGCKEQLTIDQVLSKQALKNKRDICTMYIDYKKAYDSVPHSWLLEILNIYKIHPTIVNFLTNTMQSWRTKLKLYATDSAIETDFIRIRRGIFQGDALSPLWFCLALNPLSDLLNSSSRGFQLKYDGQQLTLNHLMYMDDIKLFADCTENIHKLADITQSFSEDIKMEFGIDKCKLQTVIRGKIEEQSYSLPDMQQIEPVDQVEGYKYLGYQQTQQIHHTKTKQTLIQKFKSRLHKILNSQLNARNTIKAINTFAVPILTFSFGVIPWSQSELTRLQRSINVNMTQYRKHHPRSCIQRLTLPRLEGGRGIIDLQNLHNKIINSLRTYFLYKTTQSQLHNAVAKADDKLNPLNLSDHSVQLKITSDRSKIDLWSQKSLHGRHRADLINPNVDKSASNAWLKRGELFPETEGFMISIQDQVLDTKKYRKYIIGDRSQSDHCRRCHCSSETIQHITGACRTLAQTDYKHRHDQVAAIIHQHLAHKHKFINEKTAYYKYKPQTVLDSSEVKLYWDRTIITDKTISCNRPDITLHNKNNKTVYLIDIAIPNTHNLQTTYTEKISKYTDLAIELKKQWKVDHVKTVPIVISSTGVIPKSLHNSLKLLDMHALSYTLLQKATILNTCRIVRKFLSLN

SEQ ID NO: 24909 - protein, 1338 aa, Emmelina monodactyla
MSYNNKKYNLRSRHKASAASSESTTFISTLSGNSPEITRNGNNISEPSSPNSSTSSLYQTPNSSFHSFSVPSSPSSSPSSTQSVVVTQEAEALEPVPTTATKRARRKWSQDMNMFIWRTYLILTNLENDTKSYLEPLYRMFNDKFPHMQASKQGIGCQRRAIINNKLLPQNILDEIKSEVAIHLQTTDTPSSSAVAISQSSSRMRWSNEVNIAIMKIFFEVTKMETDLTSYRKKLHDKFIQEFPHVTEQRLADQRRTIIHNKLLTQQIIDRIKEDVSTKITQTNTLDTTQPLPDEHSLQNNVSQDIENRHTISESTADARENVSSNTTGRITHLPVEEENFIKEKFVEVLDTFKNTEPTSRPALPKLKTSKKLAIIVNFINDTLIPDTLSADDSFSSIQTILYSAAYTAAIQCGAKINFNPMSNSRPKRIPAWQKRLQNRINKLRVHIGKLTQYIRGNHSYRLTKHIESIKKKYIIHSLHENNNTDLAHFLDTLKQKLNALARRLRRYKQTTLRKTENTLFKINEKRFYRNLTQSPNGTDSNVPDIPTPDSMVEFWSNIWANPVQHDQGQWISDYKQKTMGLASMHFDEVTLDLLQAVIAKTHNWKATGSDRIHNYWYKKFTNLHNSLLKQINNFIKDPNLMPKYITEGITYMLPKQSPSTSDPGKYRPITCLQTIYKIMTSCIAELITKHTTANHILAEEQKGCRKASQGCKEQLTIDQILSKQAFKNKRDICTMYIDYKKAYDSVPHSWLLEILNIYKIHPTIVNFLTNTMQSWKTKLKLYATDSAIETDFIRIRRGIFQGDALSPLWFCLALNPLSDLLNSSSRGFQLKYDGQQLTLNHLMYMDDIKLFADCTENIHKLADITQSFSEDIKMEFGIDKCKLQTVIRGKIEEQSYSLPDMQQIEPVDQVEGYKYLGYQQTQQIHHTKTKHTLIQKFKSRLHKILNSQLNARNTIKAINTFAVPILTFSFGVIPWSQSELTRLQRSINVNMTQYRKHHPRSCIQRLTLPRLEGGRGIIDLQNLHNKIINSLRTYFLYKTTQSQLHNAVAKADDKLTPLNLSDHSVQLKITSDRRKIDLWSQKSLHGRHRADLINPNVDKSASNAWLKRGELFPETEGFMVSIQDQVLDTKNYRKYIIGDRSQSDHCRRCHCSSETIQHITGACRTLAQTDYKHRHDQVAAIIHQHLAHKHKFINEKTAYYKYKPQTVLDSSEVKLYWDRTIITDKTISCNRPDITLHNKNNKTVYLIDIAIPNTHNLQTTYTEKISKYTDLAIELKKQWKVDHVKTVPIVISSTGVIPKSLHNSLKLLDMHALSYTLLQKATILNTCRIVRKFLSLN

SEQ ID NO: 24910 - protein, 754 aa, Emmelina monodactyla
MEFKEVTLELLQTVIAKTHNWKATGSDQLHNFWYKKFTSIHNSLLKHINNFIKDPSSLPSYITEGTTFMLPKQPTATSDPGKYRPITCLQTIYKIITSCLSELISTHSNFCNVLAEEQKGCRKFSQGCKEQLTIDQVISKQAFKNKQNICTMYIDYKKAYDSVPHSWLLEILNIYKIHPIIINFLKNTMQSWKTKLKLYHSSSTIETDFINIKRGIFQGDALSPLWFCLALNPLSSRLNQSDQGFTLKHDTDFFQLNHLMYMDDIKLYADSPENIHVLADITQAFSEDIRMEFGIDKCKIQTVIRGKIIEQDYILPDMQRIEPVDQQEGYKYLGYQQSQQIHHTKTKQTLKQKFKSRLHKILNTQLNGRNTIKAINNFAVPILSYSFGVIPWSISELKQLQRFINVTMTQYRKHHPRACTQRMTLPRHEGGRGLIDLHNLHNKIVKSLRSFFHYRATQSQLHDAIVKADFKFTPLNLNNKTAEFKETSIRTKIELWSQKTLHGRHRADLINPNVDKLASNTWLKRGELFPETEGFMISIQDQVVDTKNYRKYIIKDRMQSDHCRRCHCSSETIQHITGACRSLAQTDYKHRHDQVAAIIHQYLAHKHNFVTEKIAYYKYTPQTVLDSADIKLYWDRTIITDKTIACNRPDITLHNKNNKTVYLIDIAIPNTHNLQTTFTEKISKYTDLAIEIKKQWKADDVITIPIVISSTGVIPKSLHKSLKLLDMHPQSYTLLQKATILNTCRIVRKFLAMN

SEQ ID NO: 24911 - protein, 1143 aa, Emmelina monodactyla
MRWSDNINKAIMKIYYEVTKIETDMTIYRKKLHEKFISEFPHLSHLTEQRLADQRRTIVNNRLLTQETINKIKEDVSALLLGLSITHSLYSLSPPIVTLGQSTPNTPLLDSVNEEITPEPIQDGLSNIQSDVTHINSHLSVEVEEQIKQKFNEVFLKFSNTEPTSRPAIPKLRASKKLAQIVDYINSSIIPDMISDNDDYSLIQTILYTSAYTVAAQCGAKIKPHQTTRLNTVRIPAWQKRLQKRIDDLRVHIGKLTQYIRGNRSQKLKKHIDIIKKKYAIHSQHENNNTDLSHFLDTLKQKLNALASRLRRYKQTTLRKHQNSVFKTNEKHFYRNLSKDSVDTETNSSNVPTADSLIEFWSNIWSIPVEHNEKQWIFDYKQKNAHLPGMEFKEVTLELLQTVIAKTHNWKATGSDQLHNFWYKKFTSIHNLLLKHINNFIKDPSSLPSYITEGTTFMLPKQPTATSDPGKYRPITCLQTIYKIITSCLSELISTHSNFCNVLAEEQKGCRKFSQGCKEQLTIDQVISKQAFKNKQNICTMYIDYKKAYDSVPHSWLLEILNIYKIHPIIINFLKNTMQSWKTKLKLYHSSSTIETDFINIKRGIFQGDALSPLWFCLALNPLSSRLNQSDQGFTLKHDTDYFKLNHLMYMDDIKLYADSPENIHVLADITQAFSEDIRMEFGIDKCKIQTVIRGKIIEQDYILPDMQRIEPVDQQEGYKYLGYQQSQQIHHTKTKQTLKQKFKSRLHKILNTQLNGRNTIKAINNFAVPILSYSFGVIPWSISELKQLQRFINVTMTQYRKHHPRACTQRMTLPRHEGGRGLIDLHNLHNKIVKSLRSFFHYRATQSQLHDAIVKADFKFTPLNLNNKTAEFKETSIRTKIELWSQKILHGRHRADLINPNVDKLASNAWLKRGELFPETEGFMISIQDQVVDTKNYRKYIIKDRMQSDHCRRCHCSSETIQHITGACRSLAQTDYKHRHDQVAAIIHQYLAHKHNFVTEKIAYYKYTPQTVLDSADIKLYWDRTIITDKTIACNRPDITLHNKNNKTVYLIDIAIPNTHNLQTTFTEKISKYTDLAIEIKKQWKADDVITIPIVISSTGVIPKSLHKSLKLLDMHPQSYTLLQKATILNTCRIVRKFLAMN

SEQ ID NO: 24912 - protein, 1344 aa, Junonia neildi
MENKFNKVYNLRSRQKVIKTSSESKLPSTENVSEVTETVIPNQSSRSSSPTSLFQSPNSSRHSYSLHSSPISSPQTVDVAQEANAFGPVSTTVPRRARKKWSQDMNKFIWRTYLIVTNLESNTKTYLEPLYQMFNEKFPHMQATKQRIGCQRRAIVNNKLLTQDILDEIRSEVTTYLQSQPTSSTDTNTRLPIAPINKSNTRMRWSDEINTEIIKIYYEVTKAETDMTIYRKKLHEHFIQKFPNLSHISEQRLADQRRVIINNRLLPQEQINQIKRKVELAIEHQSSQSQIIESNAILNTAQLVTTASNDENVTKEPVQSDQVNIDNNNANITSQLTLDVQNQIWKTFKEAQLIFQDMHPTLRPSIPKLKTSKKLAQIINFINFNIIPKTLTQNNNDFNKTQLVLYSSAYTAAIQIGVKINTNDSLTKTQSNYIPTWQKRLQRRIDDLRAHIGKLTQYIGGNHCNKLTKHVELMKQKYTVHSRHENNNSELTQILDTLKQKLNALTSRLRRYKQTTLRKTQNRSFQNNEKGFYRNITKSTQITQSNNIIAPTKDSLQQFWSNIWGNSVDHEQKGWMLDYQNKLSDLPNMDFDEVSLDLLKTVIAKTHNWKATGSDKLHNFWYKRFTNIHNSLLLHINNFIKNPHTLPQYITEGITYMLPKQASHTADPSNYRPITCLQTIYKIMTSCLCELINRHIHTNHILAEEQKGCRKSSQGCKEQLTVDAVVSKQAFKYKRNIHTMYIDYKKAFDSVPHSWLLQILKIYKIHPILVNFLKNIMQTWKTKLKLHTIHSTIETEFIDIKRGIFQGDALSPLWFCLALNPLSYLLNSSNKGYTVKYDTGTFTLSHLMYMDDIKLFASNSSDIHLLTDMTHSFSEDIKMSFGIDKCKIQSVIRGKVQESNYTLPNQQIIDPVNLEEGYKYLGYQQSQQIHHSKIRNALKQKFKTRLHKILNTQLNSRNTIKAINTFAIPILTYSFGIIHWCPSDLKQLQRIINVTMTQYRKHHPRACTQRMTLPRTEGGRGLIDIVNLHNKQIKTLRTFFYNRSNHSELHKSIVEADNKLTPLNLRDRSIQIKENTISDKIDAWNQKSLHGRHRSDLINPNVDKDASNEWLKRGELFPETEGFMISIQDQVIDTKNYCKYVIRDHRMQSDLCRRCHSSPETIQHITGSCRVLAQTDYKHRHDQVTAIIHQHLAHKCKFITEKIAYYKYIPQTVLDSSEFKLYWDRTIITDKTISCNRPDITLQDKRNKTVYLIDIAIPNTHNLQTTFTEKITKYTDLAIEIKKQWKAETVKTIPVVISSTGVVPKYLHKSLKQLDMHPLSYTLLQKATILNTCRIVRKFLTPEE

SEQ ID NO: 24913 - protein, 1347 aa, Junonia coenia
MENKYNKRYNLRSRHQATMTSSESKQLSTENPSEVTTIQPSSNSLNHNPSSRSSSPHSLFISPNSSRHSYSLPSSPISSSSIQTVDVAQEANAFVTVSTAAPKRARKKWSQDMNKFIWRTYLIVTNLEKDTKTYLEPLYQMFNEKFPYMQATKQRIGCQRRAIINNKLLTQDVLDEIRSEVTTYLQTQPISNTSPLTTSHNIKCNSRMRWSNEINIEIIKIYFEVTKAETDMTIYRKKLHEHFIQKFPTLSHLSEQRLADQRRVIIKNRLLPQEQIDEIKRNVEQTIGQQHSESQTIDTREFLNLSQLDTVSSNDEYVTFDHTQTGHEIIHDTENITTQLTPEVQDQIWKTFNEAQSIFQDIPPTLRPSIPKLKTSKKLAQVVHFINCNIIPKALAQNTNEFNTTQLILYSSAYTAAIQIGAKINISDSPVKTKSNFTPAWQKRLQKRIDDLRVHIGKLTQYIGGNHSSKLTEHVELIKQKYTIHSRHENNNSDLTHILDTLKQKLNALANRLRRYKQTTLRKTQNRLFKNNEKGFYRSLTKNTQTTQSPNLLSPTKDSLKQFWSNVWGNSVDYESKGWMQDYQNKFSDLPDMDFDEVSLDLLKTVIDKTHNWKATGSDKLHNFWYKKFTNIHNSLLNHINSFIKNPHTLPQYITEGITYMLPKQSSHTSDPANYRPITCLQTIYKIITSCLCELISRHTHTNNILAEEQKGCRKSSKGCKEQLTIDAIVSKQAFKNKRNIYTMYIDYKKAFDSVPHSWLLQVLKIYKIHPVLISFLENIMQTWKTKLKLHSLNNTIETEFIDIKRGIFQGDALSPLWFCLALNPLSDRLNSGNKGVTVKYDTKTFTLNHLMYMDDIKLFAGNLNDIHVLTDITHSFSEDIKMSFGIDKCKIQSVVRGKVQANSYTLPDQQQIDPVDEEEGYKYLGYQQSQQIHYSKIRNILKQKFKSRLHKILNTQLNARNTIKAINTFAIPILTYSFGIINWCPSDLKQLQRIINVTMTQYRKHHPRACSQRMTLPRNEGGRGLIDIINLHNKQIKTLRNFFHNRSNQSQLHEAMVEADNRLTPLNLKDRSIKFKENTVKDKIDTWNQKSLHGRHRSDLTNPNVDKFASNAWLKRGELFPETEGFMIAIQDQVIDTKNYCKHIIRDHRMQSDLCRRCHSSPETIQHITGACRSLAQTDYKHRHDQVTAIIHQHLAHKCNFIKDKIAYYKYNPQTVLDSTEYKLYWDRTIITDKTISCNRPDITLQDKKNKIVYLIDIAIPNTHNLQTTFTDKISKYIDLAIEIKKQWKVETVKTIPIVISSTGVVPKNLHNSLKLLDMHPLTYTLLQKATILNTCRIVRKFLTLE

SEQ ID NO: 24914 - protein, 1347 aa, Junonia evarete
MENKYNKRYNLRSRHQATMTSSESKQLSTENPSEVTTIQPSSNSLNHNSSSRSSSPHSLFISPNSSRHSYSLPSSPISSSSIQTVDVAQEANAFVTVPTAAPKRARKKWSQDMNKFIWRTYLIVTNLEKDTKTYLEPLYQMFNEKFPYMQATKQRIGCQRRAIINNKLLTQDVLDEIRSEVTTYLQTQPISNTSPLTTSHNIKCNSRMRWSNEINIEIIKIYFEVTKAETDMTIYRKKLHEHFIQKFPTLSHLSEQRLADQRRVIIKNRLLPQEQIDEIKRNVEQTIGQQHSESQTIDTREFLNLSQLDTVSSNDEYVTFDHTQTGHEIIHDTENITTQLTPEVQDQIWKTFNEAQSIFQDIPPTLRPSIPKLKTSKKLAQVVHFINCNIIPKALAQNTNEFNTTQLILYSSAYTAAIQIGAKINISDSPVKTKSNFTPAWQKRLQKRIDDLRVHVGKLTQYIGGNHSSKLTEHVELIKQKYTIHSRHENNNSDLTHILDTLKQKLNALANRLRRYKQTTLRKTQNRLFKNNEKGFYRSLTKNTQTTQSPNLLSPTKDSLKQFWSNVWGNSVDYESKGWMQDYQNKFSDLPDMDFDEVSLDLLKTVIDKTHNWKATGSDKLHNFWYKKFTNIHNSLLNHINSFIKNPHTLPQYITEGITYMLPKQSSHTSDPANYRPITCLQTIYKIMTSCLCELISRHTHANNILAEEQKGCRKSSKGCKEQLTIDAIVSKQAFKNKRNIYTMYIDYKKAFDSVPHSWLLQVLKIYKIHPVLISFLENIMQTWKTKLKLHSLNNTIETEFIDIKRGIFQGDALSPLWFCLALNPLSDRLNSGNKGVTVKYDTKTFTLNHLMYMDDIKLFAGNLNDIHVLTDITHSFSEDIKMSFGIDKCKIQSVVRGKVQANSYTLPDQQQIDPVDEEEGYKYLGYQQSQQIHYSKIRNILKQKFKSRLHKILNTQLNARNTIKAINTFAIPILTYSFGIINWCPSDLKQLQRIINVTMTQYRKHHPRACSQRMTLPRTEGGRGLIDIINLHNKQIKTLRDFFHNRSNQSQLHEAMVEADNRLTPLNLKDRSIQFKENTVKDKIDTWNQKSLHGRHRSDLTNPNVDKFASNAWLKRGELFPETEGFMIAIQDQVIDTKNYCKHIIRDHRMQSDLCRRCHSSPETIQHITGACRSLAQTDYKHRHDQVTAIIHQHLAHKCNFIKDKIAYYKYNPQTVLDSTEYKLYWDRTIITDKTISCNRPDITLQDKKNKIVYLIDIAIPNTHNLQTTFTDKISKYIDLAIEIKKQWKVETVKTIPIVISSTGVVPKNLHNSLKLLDMHPLTYTLLQKATILNTCRIVRKFLTLE

SEQ ID NO: 24915 - protein, 1235 aa, Junonia zonalis
MNKFIWRTYLIVTNLEKDTKTYLEPLYQMFNEKFPYMQATKQRIGCQRRAIINNKLLTQDVLDEIRSEVTTYLQTQPISNTSPLTTSHNIKCNSRMRWSNEINIEIIKIYFEVTKAETDMTIYRKKLHEHFIQKFPTLSHLSEQRLADQRRVIIKNRLLPQEQIDEIKRNVERTIGQQHSESQTIDTREFLNLSQLDTVSSNDEYVTFDHTQTGHEIIHDTENITTQLTPEVQDQIWKTFNEAQSIFQDIPPTLRPSIPKLKTSKKLAQVVHFINCNIIPKALAQNTNEFNTTQLILYSSAYTAAIQIGAKINISDSPVKTTSNFTPAWQKRLQKRIDDLRVHVGKLTQYIGGNHSSKLTEHVELIKQKYTIHSRHENNNSDLTHILDTLKQKLNALANRLRRYKQTTLRKTQNRLFKNNEKGFYRSLTKNTQTTQSPNLLSPTKDSLKQFWSNVWGNSVDYESKGWMQDYQNKFSDLPDMDFDEVSLDLLKTVIDKTHNWKATGSDKLHNFWYKKFTNIHNSLLNHINSFIKNPHTLPQYITEGITYMLPKQSSHTSDPANYRPITCLQTIYKIMTSCLCELISRHTHANNILAEEQKGCRKSSKGCKEQLTIDAIVSKQAFKNKRNIYTMYIDYKKAFDSVPHSWLLQVLKIYKIHPVLISFLENIMQTWKTKLKLHSLNNTIETEFIDIKRGIFQGDALSPLWFCLALNPLSDRLNSGNKGITVKYDTKTFTLNHLMYMDDIKLFAGNLNDIHVLTDITHSFSEDIKMSFGIDKCKIQSVVRGKVQASSYTLPDQQQIDPVDEEEGYKYLGYQQSQQIHYSKIRNTLKQKFKSRLHKILNTQLNARNTIKAINTFAIPILTYSFGIINWCPSDLKQLQRIINVTMTQYRKHHPRACSQRMTLPRTEGGRGLIDIINLHNKQIKTLRDFFHNRSNQSQLHEAMVEADNRLTPLNLKDRSIQFKENTVKDKIDTWNQKSLHGRHRSDLTNPNVDKFASNAWLKRGELFPETEGFMIAIQDQVIDTKNYCKHIIRDHRMQSDLCRRCHSSPETIQHITGACRSLAQTDYKHRHDQVTAIIHQHLAHKCNFIKDKIAYYKYNPQTVLDSTEYKLYWDRTIITDKTISCNRPDITLQDKKNKIVYLIDIAIPNTHNLQTTFTDKISKYIDLAIEIKKQWKVETVKTIPIVISSTGVVPKNLHNSLKLLDMHPLTYTLLQKATILNTCRIVRKFLTLE

SEQ ID NO: 24916 - protein, 1347 aa, Junonia neildi
MENKYNKRYNLRSRHQATMTSSESKQLSTENPSEVTTIQPSSNSLNHNSSSRSSSPHSLFISPNSSRHSYSLPSSPISSSSIQTVDVAQEANAFVTVPTAAPKRARKKWSQDMNKFIWRTYLIVTNLEKDTKTYLEPLYQMFNEKFPYMQATKQRIGCQRRAIINNKLLTQDVLDEIRSEVTTYLQTQPISNTSPLTTSHNIKCNSRMRWSNEINIEIIKIYFEVTKAETDMTIYRKKLHEHFIQKFPTLSHLSEQRLADQRRVIIKNRLLPQEQIDEIKRNVEQTIGQQQSESQTIDTREFLNLSQLDTVSSNDEYVTFDHTQTGHEIIHDTENITTQLTPEVQDQIWKTFNEAQSIFQDIPPTLRPSIPKLKTSKKLAQVVHFINCNIIPKALAQNTNEFNTTQLILYSSAYTAAIQIGAKINISDSPVKTKSNFTPAWQKRLQKRIDDLRVHVGKLTQYIGGNHSSKLTEHVELIKQKYTIHSRHENNNSDLTHILDTLKQKLNALANRLRRYKQTTLRKTQNRLFKNNEKGFYRSLTKNTQTTQSPNLLSPTKDSLKQFWSNVWGNSVDYESKGWMQDYQNKFSDLPDMDFDEVSLDLLKTVIDKTHNWKATGSDKLHNFWYKKFTNIHNSLLNHINSFIKNPHTLPQYITEGITYMLPKQSSHTSDPANYRPITCLQTIYKIMTSCLCELISRHTHANNILAEEQKGCRKSSKGCKEQLTIDAIVSKQAFKNKRNIYTMYIDYKKAFDSVPHSWLLQVLKIYKIHPVLISFLENIMQTWKTKLKLHSLNNTIETEFIDIKRGIFQGDALSPLWFCLALNPLSDRLNSGNKGVTVKYDTKTFTLNHLMYMDDIKLFAGNLNDIHVLTDITHSFSEDIKMSFGIDKCKIQSVVRGKVQANSYTLPDQQQIDPVDEEEGYKYLGYQQSQQIHYSKIRNTLKQKFKSRLHKILNTQLNARNTIKAINTFAIPILTYSFGIINWCPSDLKQLQRIINVTMTQYRKHHPRACSQRMTLPRTEGGRGLIDMINLHNKQIKTLRDFFHNRSNQSQLHEAMVEADNRLTPLNLKDRSIQFKENTVKDKIDTWNQKSLHGRHRSDLTNPNVDKFASNAWLKRGELFPETEGFMIAIQDQVIDTKNYCKHIIRDHRMQSDLCRRCHSSPETIQHITGACRSLAQTDYKHRHDQVTAIIHQHLAHKCNFIKDKIAYYKYNPQTVLDSTEYKLYWDRTIITDKTISCNRPDITLQDKKNKIVYLIDIAIPNTHNLQTTFTDKISKYIDLAIEIKKQWKVETVKTIPIVISSTGVVPKNLHNSLKLLDMHPLTYTLLQKATILNTCRIVRKFLTLE

SEQ ID NO: 24917 - protein, 1347 aa, Junonia neildi
MENKYNKRYNLRSRHQATMTSSESKQLSTENPSEVTTIQPSSNSLNHNSSSRSSSPHSLFISPNSSRHSYSLPSSPISSSSIQTVDVAQEANAFVTVPTAAPKRARKKWSQDMNKFIWRTYLIVTNLEKDTKTYLEPLYQMFNEKFPYMQATKQRIGCQRRAIINNKLLTQDVLDEIRSEVTTYLQTQPISNTSPLTTSHNIKCNSRMRWSNEINIEIIKIYFEVTKAETDMTIYRKKLHEHFIQKFPTLSHLSEQRLADQRRVIIKNRLLPQEQIDEIKRNVEQTIGQQQSESQTIDTREFLNLSQLDTVSSNDEYVTFDHTQTGHEIIHDTENITTQLTPEVQDQIWKTFNEAQSIFQDIPPTLRPSIPKLKTSKKLAQVVHFINCNIIPKALAQNTNEFNTTQLILYSSAYTAAIQIGAKINISDSPVKTKSNFTPAWQKRLQKRIDDLRVHVGKLTQYIGGNHSSKLTEHVELIKQKYTIHSRHENNNSDLTHILDTLKQKLNALANRLRRYKQTTLRKTQNRLFKNNEKGFYRSLTKNTQTTQSPNLLSPTKDSLKQFWSNVWGNSVDYESKGWMQDYQNKFSDLPDMDFDEVSLDLLKTVIDKTHNWKATGSDKLHNFWYKKFTNIHNSLLNHINSFIKNPHTLPQYITEGITYMLPKQSSHTSDPANYRPITCLQTIYKIMTSCLCELISRHTHANNILAEEQKGCRKSSKGCKEQLTIDAIVSKQAFKNKRNIYTMYIDYKKAFDSVPHSWLLQVLKIYKIHPVLISFLGNIMQTWKTKLKLHSLNNSIETEFIDIKRGIFQGDALSPLWFCLALNPLSDRLNSGNKGVTVKYDTKTFTLNHLMYMDDIKLFAGNLNDIHVLTDITHSFSEDIKMSFGIDKCKIQSVVRGKVQASSYTLPDQQQIDPVDEEEGYKYLGYQQSQQIHYSKIRNTLKQKFKSRLHKILNTQLNARNTIKAINTFAIPILTYSFGIINWCPSDLKQLQRIINVTMTQYRKHHPRACSQRMTLPRTEGGRGLIDMINLHNKQIKTLRDFFHNRSNQSQLHEAMVEADNRLTPLNLKDRSIQFKENTVKDKIDTWNQKSLHGRHRSDLTNPNVDKFASNAWLKRGELFPETEGFMIAIQDQVIDTKNYCKHIIRDHRMQSDLCRRCHSSPETIQHITGACRSLAQTDYKHRHDQVTAIIHQHLAHKCNFIKDKIAYYKYNPQTVLDSTEYKLYWDRTIITDKTISCNRPDITLQDKKNKIVYLIDIAIPNTHNLQTTFTDKISKYIDLAIEIKKQWKVETVKTIPIVISSTGVVPKNLHNSLKLLDMHPLTYTLLQKATILNTCRIVRKFLTLE

SEQ ID NO: 24918 - protein, 1344 aa, Junonia vestina
MENKFNKVYNLRSRQKAIKTSSESKLPSTENVSEVTETVIPNQSSRSSSPASLFQSPNSSRHSYSLHSSPISSPQTVDVAQEANAFGPVSTTVPKRARKKWSQDMNKFIWRTYLIVTNLESNTKTYLEPLYQMFNEKFPHMQATKQRIGCQRRAIVNNKLLTQDILDEIRSEVTTYLQSQPTSSTDTDTRLPIAPINKSNTRMRWSDEINTEIIKIYYEVTKAETDMTIYRKKLHEHFIQKLPNLSHLSEQRLADQRRAIINNRLLPQEQINQIKRKVELAIEHQSSQSQIIESNAILNTAQLITTASNDKIVTKEPVQSEQVNIDNNNANITSQLTLDVQNQIWKTFKEAQLIFRDMHPTLRPSIPKLKTSKKLAQIINFINFNIIPKTLTQNNNDFNKTQLVLYSSAYTAAIQIGVKINTNDSLTKTQSNYIPTWQKRLQRRIDDLRAHIGKLTQYIGGNHCNKLTKHVELMKQKYTVHSRHENNNSELTQILDTLKQKLNALTSRLRRYKQTTLRKTQNRSFQNNEKGFYRNITKSTQITQSNNIIAPTKDSLQQFWSNIWGNSVDHEQKGWMLDYQNKLSDLPNMDFDEVSLDLLKTVIAKTHNWKATGSDKLHNFWYKRFTNIHNSLLLHINNFIKNPHTLPQYITEGITYMLPKQASHTADPSNYRPITCLQTIYKIMTSCLCELINTHTHTNHILAEEQKGCRKSSQGCKEQLTVDAVVSKQAFKNKRNIHTMYIDYKKAFDSVPHSWLLQILKIYKIHPILVNFLKNIMQTWKTKLKLHTIHSTIETEFIDIKRGIFQGDALSPLWFCLALNPLSYLLNSSNKGYTVKYDTGTFTLSHLMYMDDIKLFASNSSDIHLLTDMTHSFSEDIKMSFGIDKCKIQSVIRGKVQESNYTLPNQQIIDPVNLEEGYKYLGYQQSQQIHHSKIRNALKQKFKTRLHKILNTQLNSRNTIKAINTFAIPILTYSFGIIHWCPSDLKQLQRIINVTMTQYRKHHPRACTQRMTLPRTEGGRGLIDIVNLHNKQIKTLRTFFYNRSNHSELHKSIVEADNKLTPLNLRDRSIQIKENTISDKIDAWNQKSLHGRHRSDLINPNVDKDASNEWLKRGELFPETEGFMVSIQDQVIDTKNYCKYVIRDHRMQSDLCRRCHSSPETIQHITGSCRALAQTDYKHRHDQVTAIIHQHLAHKCKFITEKIAYYKYIPQTVLDSSEFKLYWDRTIITDKTISCNRPDITLQDKRNKTVYLIDIAIPNTHNLQTTFTEKITKYTDLAIEIKKQWKAETVKTIPVVISSTGVVPKYLHKSLKQLDMHPLSYTLLQKATILNTCRIVRKFLTPEE

SEQ ID NO: 24919 - protein, 1347 aa, Junonia evarete
MENKYNKRYNLRSRHQATMTSSESKQLSTENPSEVTTIQPSSNSLNHNSSSRSSSPHSLFISPNSSRHSYSLPSSPISSSSIQTVDVAQEANAFVTVPTAAPKRARKKWSQDMNKFIWRTYLIVTNLEKDTKTYLEPLYQMFNEKFPYMQATKQRIGCQRRAIINNKLLTQDVLDEIRSEVTTYLQTQPISNTSPLTTSHNIKCNSRMRWSNEINIEIIKIYFEVTKAETDMTIYRKKLHEHFIQKFPTLSHLSEQRLADQRRVIIKNRLLPQEQIDEIKRNVEQTIGQQHSESQTIDTREFLNLSQLDTVSSNDEYVTFDHTQTGHEIIHDTENITTQLTPEVQDQIWKTFNEAQSIFQDIPPTLRPSIPKLKTSKKLAQVVHFINCNIIPKALAQNTNEFNTTQLILYSSAYTAAIQIGAKINISDSPVKTKSNFTPAWQKRLQKRIDDLRVHVGKLTQYIGGNHSSKLTEHVELIKQKYTIHSRHENNNSDLTHILDTLKQKLNALANRLRRYKQTTLRKTQNRLFKNNEKGFYRSLTKNTQTTQSPNLLSPTKDSLKQFWSNVWGNSVDYESKGWMQDYQNKFSDLPDMDFDEVSLDLLKTVIDKTHNWKATGSDKLHNFWYKKFTNIHNSLLNHINSFIKNPHTLPQYITEGITYMLPKQSSHTSDPANYRPITCLQTIYKIMTSCLCELISRHTHANNILAEEQKGCRKSSKGCKEQLTIDAIVSKQAFKNKRNIYTMYIDYKKAFDSVPHSWLLQVLKIYKIHPVLISFLENIMQTWKTKLKLHSLNNTIETEFIDIKRGIFQGDALSPLWFCLALNPLSDRLNSGNKGVTVKYDTKTFTLNHLMYMDDIKLFAGNLNDIHILTDITHSFSEDIKMSFGIDKCKIQSVVRGKVQANSYTLPDQQQIDPVDEEEGYKYLGYQQSQQIHYSKIRNILKQKFKSRLHKILNTQLNARNTIKAINTFAIPILTYSFGIINWCPSDLKQLQRIINVTMTQYRKHHPRACSQRMTLPRTEGGRGLIDIINLHNKQIKTLRDFFHNRSNQSQLHEAMVEADNRLTPLNLKDRSIQFKENTVKDKIDTWNQKSLHGRHRSDLTNPNVDKFASNAWLKRGELFPETEGFMIAIQDQVIDTKNYCKHIIRDHRMQSDLCRRCHSSPETIQHITGACRSLAQTDYKHRHDQVTAIIHQHLAHKCNFIKDKIAYYKYNPQTVLDSTEYKLYWDRTIITDKTISCNRPDITLQDKKNKIVYLIDIAIPNTHNLQTTFTDKISKYIDLAIEIKKQWKVETVKTIPIVISSTGVVPKNLHNSLKLLDMHPLTYTLLQKATILNTCRIVRKFLTLE

SEQ ID NO: 24920 - protein, 1347 aa, Junonia litoralis
MENKYNKRYNLRSRHQATMTSSESNQLSTENPSEVTTIQPSSNSLNHNSSSRSSSPHSLFISPNSSRHSYSLPSSPISSSSIQTVDVAQEANAFVTVPTAAPKRARKKWSQDMNKFIWRTYLIVTNLEKDTKTYLEPLYQMFNEKFPYMQATKQRIGCQRRAIINNKLLTQDVLDEIRSEVTTYLQTQPISNTSPLTTSHNIKCNSRMRWSNEINIEIIKIYFEVTKAETDMTIYRKKLHEHFIQKFPTLSHLSEQRLADQRRVIIKNRLLPQEQIDEIKRNVEQTIGQQHSESQTIDTREFLNLSQLDTVSSNDEYVTFDHTQTEHEIIHDTENITTQLTPEVQDQIWKTFNEAQSIFQDIPPTLRPSIPKLKTSKKLAQVVHFINCNIIPKALAQNTNEFNTTQLILYSSAYTAAIQIGAKINISDSPVKTKSNFTPAWQKRLQKRIDDLRVHVGKLTQYIGGNHSSKLTEHVELIKQKYTIHSRHENNNSDLTHILDTLKQKLNALANRLRRYKQTTLRKTQNRLFKNNEKGFYRSLTKNTQTTQSPNLLSPTKDSLKQFWSNVWGNSVDYESKGWMQDYQNKFSDLPDMDFDEVSLDLLKTVIDKTHNWKATGSDKLHNFWYKKFTNIHNSLLNHINSFIKNPHTLPQYITEGITYMLPKQSSHTSDPANYRPITCLQTIYKIMTSCLCELISRHTHANNILAEEQKGCRKSSKGCKEQLTIDAIVSKQAFKNKRNIYTMYIDYKKAFDSVPHSWLLQVLKIYKIHPVLISFLENIMQTWKTKLKLNSLNNTIETEFIDIKRGIFQGDALSPLWFCLALNPLSDRLNSGNKGVTVKYDTKTFTLNHLMYMDDIKLFAGNLNDIHVLTDITHSFSEDIKMSFGIDKCKIQSVVRGKVQASSYTLPDQQQIDPVDEEEGYKYLGYQQSQQIHYSKIRNTLKQKFKSRLHKILNTQLNARNTIKAINTFAIPILTYSFGIINWCPSDLKQLQRIINVTMTQYRKHHPRACSQRMTLPRTEGGRGLIDIINLHNKQIKTLRDFFHNRSNQSQLHEAMVEADNRLTPLNLKDRSIQFKENTVKDKIDTWNQKSLHGRHRSDLTNPNVDKFASNAWLKRGELFPETEGFMIAIQDQVIDTKNYCKHIIRDHRMQSDLCRRCHSSPETIQHITGACRSLAQTDYKHRHDQVTAIIHQHLAHKCNFIKDKIAYYKYNPQTVLDSTEYKLYWDRTIITDKTISCNRPDITLQDKKNKIVYLIDIAIPNTHNLQTTFTDKISKYIDLAIEIKKQWKVETVKTIPIVISSTGVVPKNLHNSLKLLDMHPLTYTLLQKATILNTCRIVRKFLTLE

SEQ ID NO: 24921 - protein, 1344 aa, Junonia pacoma
MENKFNKVYNLRSRQKVIKTSSESKLPSTENVSEVTETVIPNQSSRSSSPTSLFQSPNSSRHSYSLHSSPISSPQTVDVAQEANAFGPVSTTVPRRARKKWSQDMNKFIWRTYLIVTNLESNTKTYLEPLYQMFNEKFPHMQATKQRIGCQRRAIVNNKLLAQDILDEIRSEVTTYLQSQPTSSTDTNTRLPIAPINKSNTRMRWSDEINTEIIKIYYEVTKAETDMTIYRKKLHEHFIQKFPNLSHISEQRLADQRRVIINNRLLPQEQINQIKRKVELAIEHQSSQSQIIESNAILNTAQLVTTASNDENVTKEPVQSDQVNIDNNNANITSQLTLDVQNQIWKTFKEAQLIFQDMHPTLRPSIPKLKTSKKLAQIINFINFNIIPKTLTQNNNDFNKTQLVLYSSAYTAAIQIGVKINTNDSLTKTQSNYIPTWQKRLQRRIDDLRAHIGKLTQYIGGNHCNKLTKHVELMKQKYTVHSRHENNNSELTQILDTLKQKLNALTSRLRRYKQTTLRKTQNRSFQNNEKGFYRNITKSTQITQSNNIIAPTKDSLQQFWSNIWGNSVDHEQKGWMLDYQNKLSDLPNMDFDEVSLDLLKTVIAKTHNWKATGSDKLHNFWYKRFTNIHNSLLLHINNFIKNPHTLPQYITEGITYMLPKQASHTADPSNYRPITCLQTIYKIMTSCLCELINTHTHTNHILAEEQKGCRKLSQGCKEQLTVDAVVCKQAFKYKRNIHTMYIDYKKAFDSVPHSWLLQILKIYKIHPILVNFLKNIMQTWKTKLKLHTIHSTIETEFIDIKRGIFQGDALSPLWFCLALNPLSYLLNSSNKGYTVKYDTGTFTLSHLMYMDDIKLFASNSSDIHLLTDMTHSFSEDIKMSFGIDKCKIQSVIRGKVQESNYTLPNQQIIDPVNLEEGYKYLGYQQSQQIHHSKIRNALKQKFKTRLHKILNTQLNSRNTIKAINTFAIPILTYSFGIIHWCPSDLKQLQRIINVTMTQYRKHHPRACTQRMTLPRTEGGRGLIDIVNLHNKQIKTLRTFFYNRSNHSELHKSIVEADNKLTPLNLRDRSIQIKENTISDKIDAWNQKSLHGRHRSDLINPNVDKDASNEWLKRGELFPETEGFMISIQDQVIDTKNYCKYVIRDHRMQSDLCRRCHSSPETIQHITGSCRVLAQTDYKHRHDQVTAIIHQHLAHKCKFITEKIAYYKYIPQTVLDSSEFKLYWDRTIITDKTISCNRPDITLQDKRNKTVYLIDIAIPNTHNLQTTFTEKITKYTDLAIEIKKQWKAETVKTIPVVISSTGVVPKYLHKSLKQLDMHPLSYTLLQKATILNTCRIVRKFLTPEE

SEQ ID NO: 24922 - protein, 1347 aa, Junonia genoveva
MENKYNKRYNLRSRHQATMTSSESNQLSTENPSEVTTIQPSSNSLNHNSSSRSSSPHSLFISPNSSRHSYSLPSSPISSSSIQTVDVAQEANAFVTVPTAAPKRARKKWSQDMNKFIWRTYLIVTNLEKDTKTYLEPLYQMFNEKFPYMQATKQRIGCQRRAIINNKLLTQDVLDEIRSEVTTYLQTQPISNTSPLTTSHNIKCNSRMRWSNEINIEIIKIYFEVTKAETDMTIYRKKLHEHFIQKFPTLSHLSEQRLADQRRVIIKNRLLPQEQIDEIKRNVEQTIGQQHSESQTIDTREFLNLSQLDTVSSNDEYVIFDHTQTGHEIIHDTENITTQLTPEVQDQIWKTFNEAQSIFQDIPPTLRPSIPKLKTSKKLAQVVHFINCNIIPKALAQNTNEFNTTQLILYSSAYTAAIQIGAKINISDSPVKTKSNFTPAWQKRLQKRIDDLRVHVGKLTQYIGGNHSSKLTEHVELIKQKYTIHSRHENNNSDLTHILDTLKQKLNALANRLRRYKQTTLRKTQNRLFKNNEKGFYRSLTKNTQTTQSPNLLSPTKDSLKQFWSNVWGNSVDYESKGWMQDYQNKFSDLPDMDFDEVSLDLLKTVIDKTHNWKATGSDKLHNFWYKKFTNIHNSLLNHINSFIKNPHTLPQYITEGITYMLPKQSSHTSDPANYRPITCLQTIYKIMTSCLCELISRHTHANNILAEEQKGCRKSSKGCKEQLTIDAIVSKQAFKNKRNIYTMYIDYKKAFDSVPHSWLLQVLKIYKIHPVLISFLENIMQTWKTKLKLHSLNNTIETEFIDIKRGIFQGDALSPLWFCLALNPLSDRLNSGNKGVTVKYDTKTFTLNHLMYMDDIKLFAGNLNDIHVLTDITHSFSEDIKMSFGIDKCKIQSVVRGKVQASSYTLPDQQQIDPVDEEEGYKYLGYQQSQQIHYSKIRNTLKQKFKSRLHKILNTQLNARNTIKAINTFAIPILTYSFGIINWCPSDLKQLQRIINVTMTQYRKHHPRACSQRMTLPRTEGGRGLIDIINLHNKQIKTLRDFFHNRSNQSQLHEAMVEADNRLTPLNLKDRSIQFKENTVKDKIDTWNQKSLHGRHRSDLTNPNVDKFASNAWLKRGELFPETEGFMIAIQDQVIDTKNYCKHIIRDHRMQSDLCRRCHSSPETIQHITGACRSLAQTDYKHRHDQVTAIIHQHLAHKCNFIKDKIAYYKYNPQTVLDSTEYKLYWDRTIITDKTISCNRPDITLQDKKNKIVYLIDIAIPNTHNLQTTFTDKISKYIDLAIEIKKQWKVETVKTIPIVISSTGVVPKNLHNSLKLLDMHPLTYTLLQKATILNTCRIVRKFLTLE

SEQ ID NO: 24923 - protein, 1236 aa, Junonia pacoma
MNKFIWRTYLIVTNLEKDTKTYLEPLYQMFNEKFPYMQATKQRVGCQRRAIINNKLLTQDVLDEIRSEVTTYLQNQPTSNTNTLTTSHNIKSNSRMRWPDEINVEIIKIYFEVTKAETDMTIYRKKLHEHFIQKFPHLSHLSEQRLADQRRVIIKNKLLPQEQINEIKRNVEQTIGQQHNESQTIQPNEFLNPPQVDKMLSNEENITFGHTQREHEIMHEIENITTQLTEEVQNQIWKTFNEAQRIFKDIPPTLRPSIPKLKTSKKLAKIIHFINCNVIPKALTQNTNDFNTTQLIIYSSAYTVAIQIGAKINNNDSPVKTQSNFTPAWQKRLQKRIDDLRVHIGKLTQYIGGNHSSKLTKHVELIKQKYTIHSQHENNNSDLTHILDTLKQKLNALTNRLQRYKQTTLRKRQNRLFQNNEKGFYRNLIKNAQTTQSPNMISPTKDSLKQFWSHVWGNSIDYEPKEWMQDYQNKFAELPNMDFDEVSLDLLKTVINKTHNWKATGSDKLHNFWYKKFTNIHNALLNHINSFIKNPHTLPQYVTEGITYMLPKQSSHTSDPANYRPITCLQTVYKIITSCLCELISRHTHVNHILAEEQKGCRKSSQGCKEQLTIDAIVSKQAFKNKRNIYTMYIDYKKAFDSVPHTWLLQVLKIYKIHPVLISFLQNIMQTWKTKLKLHTPNNTIETEFVDIKRGIFQGDALSPLWFCLALNPLSDRLNSSNKGITVKYATKTLTLNHLMYMDDIKLFASNSNDIHVLTDITHSFSEDIKMSFGIDKCKIQSVVRGKVQANSYTLPDRQQIDPVDVEEGYKYLGYQQSQQIHYSKIRNILKQKFKSRLHKILNTQLNARNTVKAINTFAIPILTYSFGIINWCPSDLKQLQRIINVTMTQYRKHHPRACSQRMTLPRNEGGRGLIDIINLYNKQIKTLRAFFHNHSNQSKLHEAMVEADNRLTPLNLKDRSLQLKEITVKDKIDAWNQKSLHGRHRSDLTNPNVDKDASNSWLKRGELFPETEGFMIAIQDQVVDTKNYCKYIIKDRRMQSDLCRRCHASPETIQHITGACRSLAQTDYKHRHDQVTAIIHQHLAYKCNFIKEKIAYYKYNPHAVLDSTEYKLYWDRTIITDKTISCNRPDITLQDKKNKIVYLIDIAIPNTHNLQTTFTEKISKYTDLAIEIKKQWKVETVKTIPIVISSTGVVPKNLHNSLKLLDMHPLTYTLLQKATILNTCRIVRKFLTFEQ

SEQ ID NO: 24924 - protein, 1344 aa, Junonia vestina
MKNKFNKVYNLRSRQQAIKTSSESKLLSTENVSEVTETVIPNQFSRSSSSTSLFQSPDSSRHSYSLHSSPISSPQTVDVAQEANAFGPVSTTVPRRARKKWSQDMNKFIWRTYLIVTNLESNTKTYLEPLYQMFNEKFPHMQATKQRIGCQRRAIVNNKLLTQDILDEIRSEVTTYLQSQPTSSTDTNTRLPIAPINKSNTRMRWSDEINTEIIKIYYEVTKAETDMTIYRKKLHEHFIQKFPNLSHISEQRLADQRRVIINNRLLPQEQINQIKRKVELAIEYQSSQSQIIESNAILNTAQLVTTASNDENVTKEPVQSDQVNIDNNNANITSQLTLDVQNQIWKTFKEAQLIFQDMHPTLRPSIPKLKTSKKLAQIINFINFNIIPKTLTQNNNDFNKTQLVLYSSAYTAAIQIGVKINTNDSLTKTQSNYIPTWQKRLQRRIDDLRAHIGKLTQYIGGNHCNKLTKHVELMKQKYTVHSRHENNNSELTQILDTLKQKLNALTSRLRRYKQTTLRKTQNRSFQNNEKGFYRNITKSTQITQSNNIIAPTKDSLQQFWSNIWGNSVDHEQKGWMLDYQNKLSDLPNMDFDEVSLDLLKTVIAKTHNWKATGSDKLHNFWYKRFTNIHNSLLLHINNFIKNPHTLPQYITEGITYMLPKQASHTADPSNYRPITCLQTIYKIMTSCLCELINTHTHTNHILAEEQKGCRKSSQGCKEQLTVDAVVSKQAFKYKRNIHTMYIDYKKAFDSVPHSWLLQILKIYKIHPILVNFLKNIMQTWKTKLKLHTIHSTIETEFIDIKRGIFQGDALSPLWFCLALNPLSYLLNSSNKGYTVKYDTGTFTLSHLMYMDDIKLFASNSSDIHLLTDMTHSFSEDIKMSFGIDKCKIQSVIRGKVQESNYTLPNQQIIDPVNLEEGYKYLGYQQSQQIHHSKIRNALKQKFKTRLHKILNTQLNSRNTIKAINTFAIPILTYSFGIIHWCPSDLKQLQRIINVTMTQYRKHHPRACTQRMTLPRTEGGRGLIDIVNLHNKQIKTLRTFFYNRSNHSELHKSIVEADNKLTPLNLRDRSIQIKENTISDKIDAWNQKSLHGRHRSDLINPNVDKDASNEWLKRGELFPETEGFMISIQDQVIDTKNYCKYVIRDHRMQSDLCRRCHSSPETIQHITGSCRVLAQTDYKHRHDQVTAIIHQHLAHKCKFITEKIAYYKYIPQTVLDSSEFKLYWDRTIITDKTISCNRPDITLQDKRNKTVYLIDIAIPNTHNLQTTFTEKITKYTDLAIEIKKQWKAETVKTIPVVISSTGVVPKYLHKSLKQLDMHPLSYTLLQKATILNTCRIVRKFLTPEE

SEQ ID NO: 24925 - protein, 1235 aa, Junonia vestina
MNKFIWRTYLIVTNLEKDTKTYLEPLYQMFNEKFPYMQATKQRIGCQRRAIINNKLLTQDVLDEIRSEVTTYLQTQPISNTNPLTTSHNIKCNSRMRWSNEINIEIIKIYFEVTKAETDMTIYRKKLHEHFIQKFPTLSHLSEQRLADQRRVIIKNRLLPQEQIDEIKRNVEQTIGQQHSESQTIDTREFLNLSQLVTVSSNDENVTFDHTQTGHEIIHDTENITTQLTPEVQDQIWKTFNEAQSIFQDIPPTLRPSIPKLKASKKLAQVVHFINCNIIPKALAQNTNEFNTTQLILYSSAYTAAIQIGAKINISDSPVKTKSNFTPAWQKRLQKRIDDLRVHIGKLTQYIGGNHSSKLTEHVELIKQKYTIHSRHENNNSDLTHILDTLKQKLNALANRLRRYKQTTLRKTQNRLFKNNEKGFYRSLTKNTQTTQSPNLLSPTKDSLKQFWSNVWGNSVDYESKGWMQDYQNKFSDLPDMDFDEVSLDLLKTVIDKTHNWKATGSDKLHNFWYKKFTNIHNSLLNHINSFIKNPHTLPQYITEGITYMLPKQSSHTSDPANYRPITCLQTIYKIMTSCLCELISRHTHANNILAEEQKGCRKSSKGCKEQLTIDAIVSKQAFKNKRNIYTMYIDYKKAFDSVPHSWLLQVLKIYKIHPVLISFLENIMQTWKTKLKLHSLNNTIETEFIDIKRGIFQGDALSPLWFCLALNPLSDRLNSGNKGVTVKYDTKTFTLNHLMYMDDIKLFAGNLNDIHVLTDITHSFSEDIKMSFGIDKCKIQSVVRGKVQANSYTLPDQQQIDPVDEEEGYKYLGYQQSQQIHYSKIRNILKQKFKSRLHKILNTQLNARNTIKAINTFAIPILTYSFGIINWCPSDLKQLQRIINVTMTQYRKHHPRACSQRMTLPRTEGGRGLIDIINLHNKQIKTLRDFFHNRSNQSQLHEAMVEADNRLTPLNLKDRSIQFKENTVKDKIDTWNQKSLHGRHRSDLTNPNVDKFASNAWLKRGELFPETEGFMIAIQDQVIDTKNYCKHIIRDHRMQSDLCRRCHSSPETIQHITGACRSLAQTDYKHRHDQVTAIIHQHLAHKCNFIKDKIAYYKYNPQTVLDSTEYKLYWDRTIITDKTISCNRPDITLQDKKNKIVYLIDIAIPNTHNLQTTFTDKISKYIDLAIEIKKQWKVETVKTIPIVISSTGVVPKNLHNSLKLLDMHPLTYTLLQKATILNTCRIVRKFLTLE

SEQ ID NO: 24926 - protein, 1116 aa, Junonia stemosa
MTIYRKKLHEHVIQKFPTLSHLSEQRLADQRRVIIKNRLLPQEQIDEIKRNVEQTIGQQHSESQTIDTREFLNLSQLDTVSSNDENVTFDHTQTGHEIIHDTENITTQLTPEVQDQIWKTFNEAQSIFQDIPPTLRPSIPKLKTSKKLAQVVHFINCNIIPKALAQNTNEFNTTQLILYSSAYTAAIQIGAKINISDSPVKTKSNFTPAWQKRLQKRIDDLRVHIGKLTQYIGGNHSSKLTEHVELIKQKYTIHSRHENNNSDLTHILDTLKQKLNALANRLRRYKQTTLRKTQNRLFKNNEKGFYRSLTKNTQTTQSANLLSPTKDSLKQFWSNVWGNSVDYESKGWMQDYQNKFSDLPDMDFDEVSLDLLKTVIDKTHNWKATGSDKLHNFWYKKFTNIHNSLLNHINSFIKNPHTLPQYITEGITYMLPKQSSHTSDPANYRPITCLQTIYKIITSCLCELISRHTHTNNILAEEQKGCRKSSKGCKEQLTIDAIVSKQAFKNKRNIYTMYIDYKKAFDSVPHSWLLQVLKIYKIHPVLISFLENIMQTWKTKLKLHSLNNTIETEFIDIKRGIFQGDALSPLWFCLALNPLSDRLNSGNKGVTVKYDTKTFTLNHLMYMDDIKLFAGNLNDIHVLTDITHSFSEDIKMSFGIDKCKIQSVVRGKVQANSYTLPDQQQIDPVDEEEGYKYLGYQQSQQIHYSKIRNILKQKFKSRLHKILNTQLNARNTIKAINTFAIPILTYSFGIINWCPSDLKQLQRIINVTMTQYRKHHPRACSQRMTLPRNEGGRGLIDIINLHNKQIKTLRNFFHNRSNQSQLHEAMVEADNRLTPLNLKDRSIKFKENTVKDKIDTWNQKSLHGRHRSDLTNPNVDKFASNAWLKRGELFPETEGFMIAIQDQVIDTKNYCKHIIRDHRMQSDLCRRCHSSPETIQHITGACRSLAQTDYKHRHDQVTAIIHQHLAHKCNFIKDKIAYYKYNPQTVLDSTEYKLYWDRTIITDKTISCNRPDITLQDKKNKIVYLIDIAIPNTHNLQTTFTDKISKYIDLAIEIKKQWKVETVKTIPIVISSTGVVPKNLHNSLKLLDMHPLTYTLLQKATILNTCRIVRKFLTLE

SEQ ID NO: 24927 - protein, 1347 aa, Junonia grisea
MENKYNKRYNLRSRHQATMTSSESKQLSTENPSEVTTIQPSSNSLNHNPSSRSSSPHSLFISPNSSRHSYSLPSSPISSSSIQTVDVAQEANAFVTVPTAAPKRARKKWSQDMNKFIWRTYLIVTNLEKDTKTYLEPLYQMFNEKFPYMQATKQRIGCQRRAIINNKLLTQDVLDEIRSEVTTYLQTQPISNTSPLTTSHNIKCNSRMRWSNEINIEIIKIYFEVTKAETDMTIYRKKLHEHFIQKFPTLSHLSEQRLADQRRVIIKNRLLPQEQIDEIKRNVEQTIGQQHSESQTIDTREFLNLSQLDTVSSNDEYVTFDHTQTGHEIIHDTENITTQLTPEVQDQIWKTFNEAQSIFQDIPPTLRPSIPKLKTSKKLAQVVHFINCNIIPKALAQNTNEFNTTQLILYSSAYTAAIQIGAKINISDSPVKTKSNFTPAWQKRLQKRIDDLRVHVGKLTQYIGGNHSSKLTEHVELIKQKYTIHSRHENNNSDLTHILDTLKQKLNALANRLRRYKQTTLRKTQNRLFKNNEKGFYRSLTKNTQTTQSANLLSPTKDGLKQFWSNVWGNSVDYESKGWMQDYQNKFSDLPDMDFDEVSLDLLKTVINKTHNWKATGSDKLHNFWYKKFTNIHNSLLNHINSFIKNPHTLPQYITEGITYMLPKQSSHTSDPANYRPITCLQTIYKIITSCLCELISRHTHTNNILAEEQKGCRKSSKGCKEQLTIDAIVSKQAFKNKRNIYTMYIDYKKAFDSVPHSWLLQVLKIYKIHPVLISFLENIMQTWKTKLKLHSLNNTIETEFIDIKRGIFQGDALSPLWFCLALNPLSDRLNSGNKGVTVKYDTKTFTLNHLMYMDDIKLFAGNLNDIHVLTDITHSFSEDIKMSFGIDKCKIQSVVRGKVQASSYTLPDQQQIDPVDEEEGYKYLGYQQSQQIHYSKIRNTLKQKFKSRLHKILNTQLNARNTIKAINTFAIPILTYSFGIINWCPSDLKQLQRIINVTMTQYRKHHPRACSQRMTLPRTEGGRGLIDIINLHNKQIKTLRDFFHNRSNQSQLHEAMVEADNRLTPLNLKDRSIQFKENTVKDKIDTWNQKSLHGRHRSDLTNPNVDKFASNAWLKRGELFPETEGFMIAIQDQVIDTKNYCKHIIRDHRMQSDLCRRCHSSPETIQHITGACRSLAQTDYKHRHDQVTAIIHQHLAHKCNFIKDKIAYYKYNPQTVLDSTEYKLYWDRTIITDKTISCNRPDITLQDKKNKIVYLIDIAIPNTHNLQTTFTDKISKYIDLAIEIKKQWKVETVKTIPIVISSTGVVPKNLHNSLKLLDMHPLTYTLLQKATILNTCRIVRKFLTLE

SEQ ID NO: 24928 - protein, 1344 aa, Junonia grisea
MENKFNKVYNLRSRQKVIKTSSESKLPSTENVSEVTETVIPNQSSRSSSPTSLFQSPNSSRHSYSLHSSPISSPQTVDVAQEANAFGPVSTTVPRRARKKWSQDMNKFIWRTYLIVTNLESNTKTYLEPLYQMFNEKFPHMQATKQRIGCQRRAIVNNKLLAQDILDEIRSEVTTYLQSQPTSSTDTNTRLPIAPINKSNTRMRWSDEINTEIIKIYYEVTKAETDMTIYRKKLHEHFIQKFPNLSHISEQRLADQRRVIINNRLLPQEQINQIKRKVELAIEHQSSQSQIIESNAILNTAQLVTTASNDENVTKEPVQSDQVNIDNNNANITSQLTLDVQNQIWKTFKEAQLIFQDMHPTLRPSIPKLKTSKKLAQIINFINFNIIPKTLTQNNNDFNKTQLVLYSSAYTAAIQIGVKINTNDSLTKTQSNYIPTWQKRLQRRIDDLRAHIGKLTQYIGGNHCNKLTKHVELMKQKYTVHSRHENNNSELTQILDTLKQKLNALTSRLRRYKQTTLRKTQNRSFQNNEKGFYRNITKSTQITQSNNIIAPTKDSLQQFWSNIWGNSVDHEQKGWMLDYQNKLSDLPNMDFDEVSLDLLKTVIAKTHNWKATGSDKLHNFWYKRFTNIHNSLLLHINNFIKNPHTLPQYITEGITYMLPKQASHTADPSNYRPITCLQTIYKIMTSCLCELINTHTHTNHILAEEQKGCRKLSQGCKEQLTVDAVVSKQAFKYKRNIHTMYIDYKKAFDSVPHSWLLQILKIYKIHPILVNFLKNIMQTWKTKLKLHTIHSTIETEFIDIKRGIFQGDALSPLWFCLALNPLSYLLNSSNKGYTVKYDTGTFTLSHLMYMDDIKLFASNSSDIHLLTDMTHSFSEDIKMSFGIDKCKIQSVIRGKVQESNYTLPNQQIIDPVNLEEGYKYLGYQQSQQIHHSKIRNALKQKFKTRLHKILNTQLNSRNTIKAINTFAIPILTYSFGIIHWCPSDLKQLQRIINVTMTQYRKHHPRACTQRMTLPRTEGGRGLIDIVNLHNKQIKTLRTFFYNRSNHSELHKSIVEADNKLTPLNLRDRSIQIKENTISDKIDAWNQKSLHGRHRSDLINPNVDKDASNEWLKRGELFPETEGFMISIQDQVIDTKNYCKYVIRDHRMQSDLCRRCHSSPETIQHITGSCRVLAQTDYKHRHDQVTAIIHQHLAHKCKFITEKIAYYKYIPQTVLDSSEFKLYWDRTIITDKTISCNRPDITLQDKRNKTVYLIDIAIPNTHNLQTTFTEKITKYTDLAIEIKKQWKAETVKTIPVVISSTGVVPKYLHKSLKQLDMHPLSYTLLQKATILNTCRIVRKFLTPEE

SEQ ID NO: 24929 - protein, 1347 aa, Junonia evarete
MENKYNKRYNLRSRHQATMTSSESKQLSTENPSEVTTIQPSSNSLNHNSSSRSSSPHSLFISPNSSRHSYSLPSSPISSSSIQTVDVAQEANAFVTVPTAAPKRARKKWSQDMNKFIWRTYLIVTNLEKDTKTYLEPLYQMFNEKFPYMQATKQRIGCQRRAIINNKLLTQDVLDEIRSEVTTYLQTQPISNTSPLTTSHNIKCNSRMRWSNEINIEIIKIYFEVTKAETDMTIYRKKLHEHFIQKFPTLSHLSEQRLADQRRVIIKNRLLPQEQIDEIKRNVEQTIGQQHSESQTIDTREFLNLSQLDTVSSNDEYVTFDHTQTEHEIIHDTENITTQLTPEVQDQIWKTFNEAQSIFQDIPPTLRPSIPKLKTSKKLAQVVHFINCNIIPKALAQNTNEFNTTQLILYSSAYTAAIQIGAKINISDSPVKTKSNFTPAWQKRLQKRIDDLRVHVGKLTQYIGGNHSSKLTEHVELIKQKYTIHSRHENNNSDLTHILDTLKQKLNALANRLRRYKQTTLRKTQNRLFKNNEKGFYRSLTKNTQTTQSPNLLSPTKDSLKQFWSNVWGNSVDYESKGWMQDYQNKFSDLPDMDFDEVSLDLLKTVIDKTHNWKATGSDKLHNFWYKKFTNIHNSLLNHINSFIKNPHTLPQYITEGITYMLPKQSSHTSDPANYRPITCLQTIYKIMTSCLCELISRHTHANNILAEEQKGCRKSSKGCKEQLTIDAIVSKQAFKNKRNIYTMYIDYKKAFDSVPHSWLLQVLKIYKIHPVLISFLENIMQTWKTKLKLHSLNNTIETEFIDIKRGIFQGDALSPLWFCLALNPLSDRLNSGNKGVTVKYDTKTFTLNHLMYMDDIKLFAGNLNDIHVLTDITHSFSEDIKMSFGIDKCKIQSVVRGKVQANSYTLPDQQQIDPVDEEEGYKYLGYQQSQQIHYSKIRNILKQKFKSRLHKILNTQLNARNTIKAINTFAIPILTYSFGIINWCPSDLKQLQRIINVTMTQYRKHHPRACSQRMTLPRTEGGRGLIDIINLHNKQIKTLRDFFHNRSNQSQLHEAMVEADNRLTPLNLKDRSIQFKENTVKDKIDTWNQKSLHGRHRSDLTNPNVDKFASNAWLKRGELFPETEGFMIAIQDQVIDTKNYCKHIIRDHRMQSDLCRRCHSSPETIQHITGACRSLAQTDYKHRHDQVTAIIHQHLAHKCNFIKDKIAYYKYNPQTVLDSTEYKLYWDRTIITDKTISCNRPDITLQDKKNKIVYLIDIAIPNTHNLQTTFTDKISKYIDLAIEIKKQWKVETVKTIPIVISSTGVVPKNLHNSLKLLDMHPLTYTLLQKATILNTCRIVRKFLTLE

SEQ ID NO: 24930 - protein, 1344 aa, Junonia stemosa
MENKFNKVYNLRSRQKVIKTSSESKLPSTENVSEVTETVIPNQSSRSSSPTSLFQSPNSSRHSYSLHSSPISSPQTVDVAQEANAFGPVSTTVPRRARKKWSQDMNKFIWRTYLIVTNLESNTKTYLEPLYQMFNEKFPHMQATKQRIGCQRRAIVNNKLLTQDILDEIRSEVTTYLQSQPTSSTDTNTRLPIAPINKSNTRMRWSDEINTEIIKIYYEVTKAETDMTIYRKKLHEHFIQKFPNLSHISEQRLADQRRVIINNRLLPQEQINQIKRKVELAIEHQSSQSQIIESNAILNTAQLVTTASNDENVIKEPVQSDQVNIDNNNANITSQLTLDVQNQIWKTFKEAQLIFQDMHPTLRPSIPKLKTSKKLAQIINFINFNIIPKTLTQNNNDFNKTQLVLYSSAYTAAIQIGVKINTNDSLTKTQSNYIPTWQKRLQRRIDDLRAHIGKLTQYIRGNHCNKLTNHVELMKQKYTVHSRHENNNSELTQILDTLKQKLNALTSRLRRYKQTTLRKTQNRSFQNNEKGFYRNITKSTQITQSNNIIAPTKDSLQQFWSNIWGNSVDHEQKGWMLDYQNKLSDLPNMDFDEVSLDLLKTVIAKTHNWKATGSDKLHNFWYKRFTNIHNSLLLHINNFIKNPHTLPQYITEGITYMLPKQASHTADPSNYRPITCLQTIYKIMTSCLCELINTHTHTNHILAEEQKGCRKSSQGCKEQLTVDAVVSKQAFKYKRNIHTMYIDYKKAFDSVPHSWLLQILKIYKIHPILVNFLKNIMQTWKTKLKLHTIHSTIETEFIDIKRGIFQGDALSPLWFCLALNPLSYLLNSSNKGYTVKYDTGTFTLSHLMYMDDIKLFASNSSDIHLLTDMTHSFSEDIKMSFGIDKCKIQSVIRGKVQESNYTLPNQQIIDPVNLEEGYKYLGYQQSQQIHHSKIRNALKQKFKTRLHKILNTQLNSRNTIKAINTFAIPILTYSFGIIHWCPSDLKQLQRIINVTMTQYRKHHPRACTQRMTLPRTEGGRGLIDIVNLHNKQIKTLRTFFYNRSNHSELHKSIVEADNKLTPLNLRDRSIQIKENTISDKIDAWNQKSLHGRHRSDLINPNVDKDASNEWLKRGELFPETEGFMISIQDQVIDTKNYCKYVIRDHRMQSDLCRRCHSSPETIQHITGSCRVLAQTDYKHRHDQVTAIIHQHLAHKCKFITEKIAYYKYIPQTVLDSSEFKLYWDRTIITDKTISCNRPDITLQDKRNKTVYLIDIAIPNTHNLQTTFTEKITKYTDLAIEIKKQWKAETVKTIPVVISSTGVVPKYLHKSLKQLDMHPLSYTLLQKATILNTCRIVRKFLTPEE

SEQ ID NO: 24931 - protein, 1348 aa, Junonia stemosa
MENKYNKRYNLRSRHQATMTSSESKQLSTENPSEVTTIQPSSNSLNHNPSSRSSSPHSLFISPNSSRHSYSLPSSPISSSSIQTVDVAQEANAFVTVPTAAPKRARKKWSQDMNKFIWRAYLIVTNLEKDTKTYLEPLYQMFNEKFPYMQATKQRVGCQRRAIINNKLLTQDVLDEIRSEGTTYLQTQPTSNTNTLTTSHNIKSNSRMRWPDEINVEIIKIYFEVTKAETDMTIYRKKLHEHFIQKFPHLSHLSEQRLADQRRVIIKNKLLPQEQINEIKRNVEQTIGQQHNESQTIQPNEFLNPPQVDKMLSNEENITFGHTQREHEIMHEIENITTQLTEEVQNQIWKTFNEAQRIFKDIPPTLRPSIPKLKTSKKLAKIIHFINCNVIPKALTQNTNDFNTTQLIIYSSAYTVAIQIGAKINNNDSPVKTQSNFTPAWQKRLQKRIDDLRVHIGKLTQYIGGNHSSKLTKHVELIKQKYTIHSQHENNNSDLTHILDTLKQKLNALTNRLQRYKQTTLRKRQNRLFQNNEKGFYRNLIKNAQTTQSPNLISPTKDSLKQFWSHVWGNSIDYEPKEWMQDYQNKFAELPNMDFDEVSLDLLKTVINKTHNWKATGSDKLHNFWYKKFTNIHNALLNHINSFIKNPHTLPQYVTEGITYMLPKQSSHTSDPANYRPITCLQTVYKIITSCLCELISRHTHVNHILAEEQKGCRKSSQGCKEQLTIDAIVSKQAFKNKRNIYTMYIDYKKAFDSVPHTWLLQVLKIYKIHPVLISFLQNIMQTWKTKLKLHTPNNTIETEFVDIKRGIFQGDALSPLWFCLALNPLSDRLNSSNKGITVKYATKTLTLNHLMYMDDIKLFASNSNDIHVLTDITHSFSEDIKMSFGIDKCKIQSVVRGKVQANSYTLPDRQQIDPVDVEEGYKYLGYQQSQQIHYSKIRNILKQKFKSRLHKILNTQLNARNTVKAINTFAIPILTYSFGIINWCPSDLKQLQRIINVTMTQYRKHHPRACSQRMTLPRNEGGRGLIDIINLYNKQIKTLRAFFHNHSNQSKLHEAMVEADNRLTPLNLKDRSLQLKEITVKDKIDAWNQKSLHGRHRSDLTNPNVDKDASNSWLKRGELFPETEGFMIAIQDQVVDTKNYCKYIIKDRRMQSDLCRRCHASPETIQHITGACRSLAQTDYKHRHDQVTAIIHQHLAYKCNFIKEKIAYYKYKPHAVLDSTEYKLYWDRTIITDKTISCNRPDITLQDKKNKIVYLIDIAIPNTHNLQTTFTEKISKYTDLAIEIKKQWKVETVKTIPIVISSTGVVPKNLHNSLKLLDMHPLTYTLLQKATILNTCRIVRKFLTFEQ

SEQ ID NO: 24932 - protein, 871 aa, Junonia villida
MKQKYTVHSRHENNNSELTQILDTLKQKLNALTSRLRRYKQTTLRKTQNRSFQNNEKGFYRSITKSTEITPSNNVIAPTKDSLQQFWSNIWGNSVDHEQKGWILDYQNKLSDLPNMDFDEVSLDLLKTVIAKTHNWKATGSDKLHNFWYKRFTNIHNSLLLHINNFIKNPYTLPQYITEGITYMLPKQASHTADPSNYRPITCLQTIYKIMTSCLCEQINRHTHNNHILAEEQKGCRKSSQGCKEQLTIDAIVSKQAFKNKRNIYTMYIDYKKAFDSVPHSWLLQILKIYKIHPILVNFLKNIMQTWKTKLKLHTIHSTIETEFIDIKRGIFQGDALSPLWFCLALNPLSYLLNSSNKGYTIKYDTGTFTLSHLMYMDDIKLFAGNSSDIRLLTDMTHSFSEDIKMSFGIDKCKIQSVNRGKIQESSYTLPNQQQIDPVNLEEGYKYLGYQQSQQIHHSKIRNALKQKFKTRLHKILNTQLNSRNTIKAINTFAIPILTYSFGIIHWCPSDLKQLQRIINVTMTQYRKHHPRACTQRMTLPRSEGGRGVIDIVNLHNKQIKTLRTFFYNRSYHSELHKSIVEADNKLTPLNLRDRSIQIKENTTSDKIDAWSQKSLHGRHRSDLVNPNVDKDASNEWLKRGELFPETEGFMISIQDQVIDTKNYCKYVIRDHRMQSDLCRRCHSSPETIQHITGACKALAQTDYKHRHDQVTAIIHQHLAHKCKFITEKIAYYKYIPQTVLDSSEFKLYWDRTIITDKTISCNRPDITLQDKRNKTVYLIDVAIPNTHNLQTTFTEKITKYTDLAIEIKKQWKAETVKTIPVVISSTGVVPKYLHKSLKQLDMHPLSYTLLQKATILNTCRIVRKFLTPEE

SEQ ID NO: 24933 - protein, 1209 aa, Chrysotoxum bicinctum
MENEISFNRVGISTQTSVEATAIRGGLALQRDESPVAQQESNQPATSVSQYNLGTTRAGRPRQRIQWTNDMNEYVLRCYFTTTGCENSQNMLIYRSEMFNMFIGRYSDLEGRVNENNLARRKDAILQNNYVEINRRQRIKAEVQAEIEAAAETSHQISSETPFRVNDALEPTIETSTSSTNPSLIQIQQTPLEILTYTTPEPSTITVQTTTDIETQRIRNIFGLSLVEFEGIDPSLRPKIPKVHEPKKLDAVLNIINSKILPQYLTDEPTMERINNLLFARAISALRALGKKPISTLKNPRQTARKIESFLPKWNKRLRNKIEKLRRDIGRLTSFRDGSNSSRLCRHIRRLIAPLSPSNISRDGIIEIIDRKAQKLSALAKRLKRYEKCSNRKSENALFSRDQKAFYRNFASSPITGSEDVYPPFCATEQFWSNIWSKPKHYNENVHWIADEIELFKDTTSMPYQPITREEVNNAILETSNWKAPGVDKLQNIWLKKLSACHEQLAKSFTDLLELKTMPPKFFISGVTFLIAKGKPCEDPSKYRPITCLCTTYKLFTKILANRIYDHCTINNVIPDTQKGCSRQTMGCKDQLTIDAVITGLALRKKRSISMAYIDYKKAFDSMPHDYLLKILEVYKIDPTIVNCLKIIMGGWNTRLSQNGLFSKPVPIRCGIFQGDALSPLWFCIGLNPISRILAKIKSGFVIKTETYDYSFNHLLYVDDLKLYAKNKQKLHRMIEVVKSFSTDIQMEFGMEKCKMVHLVRGKVEVNEEGFLIDQEQIIEDLQHEESYKYLGFLQLRGINHSLIKSSLTAQFKKRMCNILKSNLSGGNKCKGINTWAIPLLTYSFGVIKWSSTDLANLDMLIRTSFTRYNSQHPRSAIERMSLPRKIGGRGIVNITNLHYQQCLNIRQYLLSNSSTLIKTICLADDNFTPLNLSLANFPVPDNVKTKDELIMSWKEKPIHGSYPNELSQDHINQEASNLWLMQGQLFSETEGFVIGIQDRVIATRNYRKLILREAVDDRCRRCGENGETIEHITSSCSTLASQEYMNRHNNVAKLIHQQLALKSGLIQNQTPYYKYLPLPVLENSNFKLYWDRAITTDQHITANRPDIVLFHKADRRIDIFDVAVTLNRNLQTTYSTKVSKYASLAIELRSMYNMNRVDVTPIVISTTGLVPKNLSRNLKNHNIERLLAQIQKSVLLGTCNIVRKFLQL

SEQ ID NO: 24934 - protein, 1204 aa, Platycheirus albimanus
MENQNEVIRVGISAQTSAEATAAGAGSALQRDESPVASHENSQPATSASQDNLGTTRAGRPRQRIQWTNEMNEFVLRCYYTTTKCETPEYMVLYRRAMYNMFIRKYTHLEGKVNDNNLTRRKDVIISKNYVELNRRLRIKAEVQLETQENVEPRPSTSGQIPTASLRASGRQPTLSAPNHSETSPDQFQQPTTNVVATRSSDAQPTINSEKQRLRDIFSLSLAEFEGIDPTLRPKIPRVYELKKLETVLNTLNTEIMPQYLEQESSLERINDLIFVCAVSAIRAMGKELRPALAIPRQSVNREDREPKWKKRLKGQIEKLRRDVARLIAFKDGSSSRRLRRHIRPLIEPLRPGNICRDEVIEILDRKSQKLAAQAKRLRRYEECNKRKTENSLFSKNQRAFYRKFELPPGTEVEEEYPPLNVTEQFWRNIWSTPKQHNEDAQWIEEEARHFEHITPTPSQPITKEELFHAISETSNWKAPGVDKLQNIWLKKLTAVHEQLAKSFTDLLELKNMPPNFLTTGLTFLIPKGKPCRDPSKYRPITCLCTTYKLFTKILTNRIYAHCITNNVISDEQKGCSKRTMGCKDQLFIDSVVTGLALKKKRNLSMAFIDYKKAFDSMPHKYLVKVLEIYKIDPTILNCLRMIMGMWNTRLSQNGNLSETVAINSGIFQGDALSPLWFCLGLNPLSRILAKIKTGFAIKTETYDFSFNHLLYVDDLKLYCKDRAKLHRMIEVVKSFSLDIRMEFGMDKCKMIHLLRGKVDGGEEGFSIDQDRIIEDLHDGESYKYLGFLQLRGLSHGDIKSNLHTQFRARLNNILKSHLNGGNKCKAINTWAIPLLTYSFGIIKWSQTDVANLDMLVRTTYTKYNSHHPRSAVERMSLKRKIGGRGIVNITNLHHQQCLNIRQYLMTSISPLIRSACLVDDHLTPLNLKSANFPLPDNVKTTDELIVSWKEKSLHGSHPNELAQEHINQEASNLWLTQGKLFSETEGFVIGIQDKVIATRNYRKFILKEAVEDKCRRCGETGETIEHITSGCRVLAPHEYTCRHNNVAKLIHQQLALECGLIQHHRPYYKYQPLPVLENLNFKLYWDRIITTDQHITANKPDIILFHKAERKIDIFDIAVPLNRNLQTTYSEKISKYASLAIELKAMYDAEKVEVTPFVISATGLVPKKLCANLKSHNIEVLLSQIQKSVLLDTCHIVRKFLQQ

SEQ ID NO: 24935 - protein, 1209 aa, Chrysotoxum bicinctum
MENEISFNRVGISTQTSVEATAIGGGLALQRDESPVAQQESNQPATSVSQYNLGTTRAGRPRQRIQWTNDMNEYVLRCYFTTTRCENSQNMLIYRREMFNMFIGRYSDLEGRVNENNLARRKDAILQNNYVEINRRQRIKAEVQAEIEAAAETSHQISSETPFRVNDALEPTIESSTSSTNPSLIQIQQTPLEILTYTTPEPSTITVQTTTDIETQRIRDIFGLSLVEFEGIDPSLRPKIPKVHEPKKLDAVLNIINSKILPQYLTDEPRMERINDLLFVSAISALRALGKKPISTLKNPRQTARKIESFLPKWNKRLRNKIEKLRRDIGRLTSFRDGSNSSRLCRHIRRLIAPLSPSNISRDGIIEIIDRKAQKLSALAKRLKRYEKCSNRKSENALFSRDQKAFYRNFASSPITGSEDVYPPFSATEQFWSNIWSKPKHYNENAHWIADEIELFKDTTSMPYQPITREEVNNAILETSNWKAPGVDKLQNIWLKKLSACHEQLAKSFTDLLELKTMPPKFFISGVTFLIAKGKPCEDPSKYRPITCLCTTYKLFTKILANRIYDHCTINNVIPDTQKGCSRQTMGCKDQLTIDAVITGLALRKKRSISMAYIDYKKAFDSMPHDYLLKILEVYKIDPTIVNCLKIIMGGWNTRLSQNGLFSKPVPIRCGIFQGDALSPLWFCIGLNPISRILAKIKSGFVIKTETYDYSFNHLLYVDDLKLYAKNKQKLHRMIEVVKSFSTDIQMEFGMEKCKMVHLVRGKVEVNEEGFLIDQEQIIEDLQHEESYKYLGFLQLRGINHSLIKSSLTAQFKKRMCNILKSNLSGGNKCKGINTWAIPLLTYSFGVIKWSSTDLANLDMLIRTSFTRYNSQHPRSAIERMSLPRKIGGRGIVNITNLHHQQCLNIRQYLLSNSSTLIKTICLADDNFTPLNLSLANFPVPDNVKTKDELIMSWKVKPIHGSYPNELSQDHINQEASNLWLMQGQLFSETEGFVIGIQDRVIATRNYRKFILREAVDDRCRRCGENGETIEHITSSCSTLASQEYMNRHNNVAKLIHQQLALKSGLIQNQTPYYKYLPLPVLENSNFKLYWDRAITTDQHISANRPDIVLFHKADRRIDIFDVAVTLNRNLQTTYSTKISKYASLAIELRSMYNMNRVDVTPIVISTTGLVPKNLNRNLKNHNIEWLLAQIQKSVLLDTCNIVRKFLQL

SEQ ID NO: 24936 - protein, 1219 aa, Platycheirus albimanus
MEKTIMKMETNTNLNGVWICTQTSAEATAVGAGLALQRDESPVAQQQQQQQQQQHQQQQQESNQPATSVSQSNLGTTRAGCPRQRIKWTNDMNEYVLRCYFTTTKCENPENMLIYRKEMFNMFIGRYSNLEGRVNENNLARRKDVIFQNNYVETNRRQRIKEEVRAEIEATTAVISHQSPSVPNAPESFTELPTSLTLARQTSVETLTNTILEPLNTQTTTFTETQRIRDIFILSLVEFEGIDPSLRPTIPKIHEPKKLDTVLDIINSNILPQYLANESGLDRINDLLFVSAISALRALGKEPKTTLENPRQTVRKADSFLPKWNKRLRNKIEKLRRDIGRLTSFRDGSNSSRLCRHIRRLIPPLRPGNLCRDEIIEIIDRKAQKLSALAKRLKRYEKCSKRKSENALFSRNQKQFYRNASSTSTREPEVVYPPFSITEQFWSNIWSKPKHHNENALWIEEENEQFKDATSMPYQPISREEVNKAIAETGNWKAPGVDKLQNIWLKKLSASHEQLAKSFTDLLELKTMPPNFFTSGVTYLIPKGKPCNDPSKYRPITCLCTTYKLFTKILSNRIYDHCITNNVIPDTQKGCIRQTMGCKDQLIVDSVITGLALRKNRSISMAYIDYKKAFDSMPHNYLVRILEVYKIDPTIVNCLKVIMEGWNTRLSQNGVISKTVPIRCGIFQGDALSPLWFCIGLSPLSRILAKIKSGFVVKTETYDFALNHLVYVDDLKLYAKNREKLHRMIEVVQNFSTDIQMEFGIEKCKMVHLVKGKVDANEEGFPIDQEQVIEDLQHEESYKYLGFLQLKGINHSSIKGSLTAQFKTRMNTILRSNLSGGNKCKGINTWAIPLLTYSFGIIKWSSTDLANLDMLIRTSFTSYNSQHPRSAIERMSLPRKIGGRGIVNLTNLHHKQCLNIRQYLLSNSSLLIKTICLADNNYTPLNLSLSNFPVADGVKTKEELIMSWKVKPIHGSHPNELSQDFINLEASNSWLTQGHLFSETEGFVIGIQDRVIATRNYRKFILREVVEDRCRRCGENGETIEHITSGCSTLASHDYLNRHNNVAKLVHQQLALKSGLIQRHTPYYKYQPLPVLENCNFKLYWDRTMTTDQHVPANRPDIVLFNKVERRIDIFDVAVTLNRNLQTTYSTKISKYASLAVELRTMYKMERVDVTPIVISVTGLVPKNLIRNLKQHNMEWLSAQIQKSVLLDTCNIVRKFLQL

SEQ ID NO: 24937 - protein, 1108 aa, Platycheirus albimanus
MLIYRKEMFNMFIGRYSNLEGRVNENNLARRKDVIFQNNYVETNRRQRIKEEVRAEIEATTAVISHQSPSVPNAPESFTELPTSLTLARQTSVETLTTTILEPLNTQTTTFTETQRIRDIFILSLVEFEGIDPSLRPTIPKIHEPKKLDTVLDIINSNILPQYLANESGLDRINDLLFVSAISALRALGKEPKTTLENPRQTVRKADSFLPKWNKRLRNKIEKLRRDIGRLTSFRDGSNSSRLCRHIRRLIPPLRPGNLCRDEIIEIIDRKAQKLSALAKRLKRYEKCSKRKSENALFSRNQKQFYRNASSTSTREPEVVYPPFSITEQFWSNIWSKPKHHNENALWIEEENEQFKDATSMPYQPISREEVNKAIAETGNWKAPGVDKLQNIWLKKLSASHEQLAKSFTDLLELKTMPPNFFTSGVTYLIPKGKPCNDPSKYRPITCLCTTYKLFTKILSNRIYDHCITNNVIPDTQKGCIRQTMGCKDQLIVDSVITGLALRKNRSISMAYIDYKKAFDSMPHNYLVRILEVYKIDPTIVNCLKVIMEGWNTRLSQNGVISKTVPIRCGIFQGDALSPLWFCIGLSPLSRILAKIKSGFVVKTETYDFALNHLVYVDDLKLYAKNREKLHRMIEVVQNFSTDIQMEFGIEKCKMVHLVKGKVDANEEGFPIDQEQVIEDLQHEESYKYLGFLQLKGINHSSIKGSLTAQFKTRMNTILRSNLSGGNKCKGINTWAIPLLTYSFGIIKWSSTDLANLDMLIRTSFTSYNSQHPRSAIERMSLPRKIGGRGIVNLTNLHHKQCLNIRQYLLSNSSLLIKTICLADNNYTPLNLSLSNFPVADGVKTKEELIMSWKVKPIHGSHPNELSQDFINLEASNSWLTQGHLFSETEGFVIGIQDRVIATRNYRKFILREVVEDRCRRCGENGETIEHITSGCSTLASHDYLNRHNNVAKLVHQQLALKSGLIQRHTPYYKYQPLPVLENCNFKLYWDRTMTTDQHVPANRPDIVLFNKVERRIDIFDVAVTLNRNLQTTYSTKISKYASLAVELRTMYKMERVDVTPIVISVTGLVPKNLIRNLKQHNMEWLSAQIQKSVLLDTCNIVRKFLQL

SEQ ID NO: 24938 - protein, 949 aa, Pterostichus madidus
MSFVPCPNCQKLYNGERGIAIHQRRAKCTPSISPIDVENSVVHSFHEQLQARRRSLKITKRVPKSARALAADALSKCIKQCITKNDTESWRALLSFGVDTFSLPANKESRKLSLTAVIKSNINRSTQQSVTQIHQPVPIGTTFGGRDLLKKAIEGKLQEGSITGAIRLLSSDDRVAQPTPDIIDAMILKHPSAFHNMNFPDILPCAGSYTVVEPKEIYAAVSSFPSGSSGGIDGLYPQHLKDLLVSNNERSKSLALDLANLVTSMLNGLVPTDICPILYGASLIALTKNDGGLRPIAVGCTLRRLAGKIVSRRVMVEMGELLRPVQLGYGTRGGAEALVHTVRSFVSNHTNECCVLLKLDFRNAFNSIRRDKLLDAVKLYLPQYGSFIEQLYRQESHLFFGDTLLKSASGVQQGDPLGPLLFCLVIKPLVDHLSSKLNLWYLDDGTLAGQPDVVASDLASIIKRGKEIGLELNLAKCELYVFGGNQSTRAAAIETVKVVADSITVAKVDQLMLLGAPVTSNAVPIALDMKRKQIELLTSRLHILEPHHAFFLLKNCICIPKLLYILRCSPVWQFLNYLRSLDSMIIMALEEITNIRIQGDTYSQASLPVRFGGLGIRKTVELALPAYLASVHSVEHLITTVLPDFNLDEIVNLGILSWRQLSNSDPPTGICRNSQRHWDEPICKNVLNSLLSTQNNTTRARLLAASSQIAGSWIHAFPITSLGNLLDANTLRISIGLRLGAPICESHHCHCGAEVDSLGYHGLSCRQSKGRLSRHASLNSTIHRALSSAAVPSILEPPGLARDDGKRPDGMSLIPWASGKALVWDVTCVDTMANSYISGTSQRSGYAALQAEDRKIRKYSALQDLYHFIPFGVETFGSLGPAAELFLAKLGKLILSQTLEKRSSEYLRQRISIDLQRGNAASVMGTLPNQKALDEIFYILGRDHSSNLT

SEQ ID NO: 24939 - protein, 950 aa, Pterostichus madidus
MSFVPCPNCQKLYNGERGIAIHQRRAKCTPSISPIDVVENSVVHSFHEQLQARRRSLKITKRVPKSARALAADALSKCIKQCITKNDTESWRALLSFGVDTFSLPANKESRKLSLTAVIKSNINRSTQQSVTQIHQPVPIGTTFGGRDLLKKAIEGKLQEGSITGAIRLLSSDDRVAQPTPDIIDAMILKHPSAFHNMNFPDILPCAGNFTVVEPKEIYAAVSSFPNGSSGGIDGLYPQHLKDLLVSNNERSKSLALDLANLVTSMLNGLVPTEICPILYGASLIALTKNDGGLRPIAVGCTLRRLAGKIVSRRVMVEMGELLRPVQLGYGTRGGAEALVHTVRSFVSNHTNECCVLLKLDFRNAFNSIRRDKLLDAVKLYLPQYGSFIEQLYRQESHLFFGDTLLKSASGVQQGDPLGPLLFCLVIKPLVDHLSSKLNLWYLDDGTLAGQPDVVASDLASIIKRGKEIGLELNLAKCELYIFGGNQSTRAAAIETVKVVADSITVARIDQLILLGAPVTSNAVPIALDMKRKQIELLTSRLHILEPHHAFFLLKNCICIPKLLYILRCSPVWQFLNYLRSLDSMIIMALEEITNIRIQGDTYSQASLPVRFGGLGIRKTVELALPAYLASVHSVEHLITTVLPDFNLDEIVNLGILSWRQLSNFDPPTGICRNSQRHWDEPICKNVLNSLLSTQNNTTRARLLAASSQIAGSWIHAFPITSLGNLLDANTLRISIGLRLGAPICESHHCHCGAEVDSLGYHGLSCRQSKGRLSRHASLNSTIHRALSSAAVPSILEPPGLARDDGKRPDGMSLIPWASGKALVWDVTCVDTMANSYISGTSQRSGYAALQAEDRKIRKYSALQDLYHFIPFGVETFGSLGPAAELFLAKLGKLIHSQTLEKRSSEFLRQRISIDLQRGNAASVMGTLPNQKALDEIFYILGRDRSSNLT

SEQ ID NO: 24940 - protein, 949 aa, Pterostichus madidus
MSFVPCPNCQKLYNGERGIAIHQRRAKCTPSISPIDVENSVVHSFHEQLQARRRSLKITKRVPKSARALAADALSKCIKQCITKNDTESWRALLSFGVDTFSLPANKESRKLSLTAVIKSNINRSTQQSVTQIHQPVPIGTTFGGRDLLKKAIEGKLQEGSITGAIRLLSSDDRVAQPTPDIIDAMILKHPSAFHNMNFPDILPCAGSYTVVEPKEIYAAVSSFPNGSSGGIDGLYPQHLKDLLVSNNERSKSLALDLANLVTSMLNGLVPTDICPILYGASLIALTKNDGGLRPIAVGCTLRRLAGKIVSRRVMVEMGELLRPVQLGYGTRGGAEALVHTVRSFVSNHTNECCVLLKLDFRNAFNSIRRDKLLDAVKLYLPQYGSFIEQLYRQESHLFFGDTLLKSASGVQQGDPLGPLLFCLVIKPLVDHLSSKLNLWYLDDGTLAGQPDVVASDLASIIKRGKEIGLELNLAKCELYVFGGNQSTRAAAIETVKVVADSITVAKVDQLMLLGAPVTSNAVPIALDMKRKQIELLTSRLHILEPHHAFFLLKNCICIPKLLYILRCSPVWQFLNYLRSLDSMIIMALEEITNIRIQGDTYSQASLPVRFGGLGIRKTVELALPAYLASVHSVEHLITTVLPDFNLDEIVNLGILSWRQLSNSDPPTGICRNSQRHWDEPICKNVLNSLLSTQNNTTRARLLAASSQIAGSWIHAFPITSLGNLLDANTLRISIGLRLGAPICESHHCHCGAEVDSLGYHGLSCRQSKGRLSRHASLNSTIHRALSSAAVPSILEPPGLARDDGKRPDGMSLIPWASGKALVWDVTCVDTMANSYISGTSQRSGYAALQAEDRKIRKYSALQDLYHFIPFGVETFGSLGPAAELFLAKLGKLILSQTLEKRSSEYLRQRISIDLQRGNAASVMGTLPNQKALDEIFYILGRDHSSNLT

SEQ ID NO: 24941 - protein, 998 aa, Eurytoma brunniventris
MSSGGTCSHVCDICLRSFTTATGLGVHFNAVHREESNRRINVERSRARWTDEEIDRVVAMECSLAGRTNMNQLLAERFGGTRSVEAIKGLRKQERYKRRLSAAVEEAARLVEEIDGADDQEPELPNVDIKEMLREEIIKDRGKLKEQHQGHLTLLRLIDAVESREDPVAIIAEWIDAVFNAGPDNDEERNVGRSTVNAGHNGVGPQPCSRRSRKELRRREYERIQKLWKRNMGKAARIVLDGDNDAREHPELEEQVKFWKPIFETEDEEAGDASDNNDSAVPGERSSLWYPISYEEIKSHKPENGTAAGPDGVTTGDWNGIPNEVKRILFNTIMYAEDCPQSIADSRTVLIPKVPNSMDPSKYRPLSISSVILRHLHKILAARIVRLPIFHERQRAFIAADGCAENIFLLTAIIEDARKNLKPLHAAVVDVKKAFDSVSRNAIARALRKKKIPAPMRRYIMGQYRKATTKIEVDSRRSEQIKVTQGVRQGDPLSPAVFDMVMDDAIAAIPEAVGYTICGIKINCLVFADDIVLLASTKEGLQDAMNALVITLRTLGLELMPSKCAVMSMMPSGKEKKMKIIEESLITVGNIPIRQINTTDEFTYLGVTFTHTGPKEYLPDYQTPLDNITRAPLKPQQRLRILKTFLVPRWLHQMVLGRVTYGTLRRIDKEIRKRVRQWLRLPHDTPQAFFHAEVDEGGLGIPSIEAQIPMLLSKRLLNLAVHTTAAASIILMSEWVETKFAWCRMGKVNRDDWKHYLHASVDGYELREANNSAASTSWVKDDFLAIPANEWIKYLHVRINALPSRIRTTRGRVHEDTRCRAGCDRRETTAHIVQECHRTHGGRVLRHDKVAETIALELSKKGWRVERERIFRTTVGNRKPDIIAVRDNAIQILDVQIVSGYMSLGESHRRKVEYYDTWELKGCIRNHLRLHSAPITVSSVTISWRGIWAAQSDNLLRRMGISQRVLRGVTTRVLLGSYLNFATFNKATYRRPHRGRTS

SEQ ID NO: 24942 - protein, 982 aa, Eurytoma brunniventris
MDSHVCDICLRSFTTATGLGVHFRAAHGEQANRRITTERVKARWTDEEISRVAAIEYSLIGRQNINQLIVERLGGRRSLEAIKGLRKQERYKQRLREIAEAASLETREVMQDQEQPHREEDLTEKLREEIIRDKSNLTNLIPEHQLLQRLIEAVEAREQPLPILEEWIESVFGNVDSEAKEGTNRAANTATIGTSTMATSRRVRKELRRREYDRMQKLWRRNMSKAAHIALDGDNDAKQHPGLQEQLRFWKPIFETSDQQVEETLDDVVSSTTKEESSLWHPITMEEIRSCKPGNGTAAGPDGVSTSDWNNIPDIAKKVVFNVIMFVEDAPQSITVSRTVLIPKVPNSMDPSKYRPLSISSVILRHMHKILAARIVKKPLFHERQRAFLSADGCAENVFLLSAVIDDARKKRKPLHAAVLDVKKAFDSVSRRSIARSLKKKGVPEQMRRYIMRQYRKAVTRIEVDSQRSDEIKVTQGVRQGDPLSPATFNMVMDEAIEAIPTTVGYTINSLQLNCLVFADDIVLLASTEDGLQEALEVLTNALRNLGLELMAPKCAVLSLVPAGKDKKLKVVEESKFTVNGQVIRQLGMGDTFTYLGVQFTHKGPAEYVPEFETLLNNLTRAPLKPQQRMRVLKTFLVPRWLHQMVLGRVTYGTLRRIDKAVRKVVRQWLRLPHDTPQAFFHAEVMEGGLGIPALEAQIPQLLSKRLLNLGVHTTLAASAILNSEWVDERIAWCRMCKIQQQEWKHYLHVSVDGYELRETSKAASSYSWYNDDFASIPSSDWIRYVQVRINALPSRMRTTRGRRHQDVQCRAGCPRQETTAHIIQECPRTHGGRILRHDKIAETIALELVKKDWRVERERIFRTTAGMRKPDIIAVKDSRVKILDVQVVSGHGSLTTSHQRKCDYYSGWELKNAVRSYLRLPSAPVTVSSVTISWRGIWSGESERQLMEMGSSRGFMRGLTTRVLMGSYLNFATFNKATYRS

SEQ ID NO: 24943 - protein, 998 aa, Eurytoma adleriae
MSSGGTCSHVCDICLRSFTTATGLGVHFNAVHREESNRRINVERSRARWTDEEIDRVVAMECSLAGRTNMNQLLAERFGGTRSVEAIKGLRKQERYKRRLSAAVEEAARLVEEIDVADDQEPEHPNVDIKEMLREEIIKDRGKLKEQHQGHLTLLRLIDAVESREDPVAILAEWIDAVFNAGPDNDEERNVGRSTVNAGHNGVGLQPCSRRSRKELRRREYERIQKLWKRNMGKAARIVLDGDNDAREHPELEEQVKFWRPIFETEDEEAGDASDNNDSAVPGERSSLWHPISYEEIKSHKPENGTAAGPDGVTTGDWNGIPNEVKRILFNTIMYAEDCPQSIADSRTVLIPKVPNSMDPSKYRPLSISSVILRHLHKILAARIVRLPIFHERQRAFIAADGCAENIFLLAAIIEDARKNLKPLHAAVVDVKKAFDSVSRNAIARALRKKKIPAPMRRYIMGQYRKATTKIEVDSRRSEQIKVKQGVRQGDPLSPAVFDMVMDDAIAAIPEAVGYTICGIKINCLVFADDIVLLASTKEGLQDAMNALVITLRTLGLELMPSKCAVMSMMPSGKEKKMKIIEESLITVGHTPIRQINTTDEFTYLGVTFTHTGPKEYLPDYQTPLDNITRAPLKPQQRLRILKTFLVPRWLHQMVLGRVTYGTLRRIDKEIRKRVRQWLRLPHDTPQAFFHAEVDEGGLGIPSIEAQIPMLLSKRLLNLAVHTTAAASIILMSEWVETKFAWCRMGKVNRDDWKHYLHASVDGYELREANNSAASTSWVKDDFLAIPANEWIKYLHVRINALPSRIRTTRGRVHEDTRCRAGCDRRETTAHIVQECHRTHGGRVLRHDKVAETIALELSKKGWRVERERIFRTTVGNRKPDIIAVRDNVIQILDVQIVSGHMSLGESHRRKVDYYDTWELKGCIRNHLRLHSAPITVSSVTISWRGIWAAQSENLLRRMGISQRVLRGVTTRVLLGSYLNFAMFNKATYRRPHRGRTS

SEQ ID NO: 24944 - protein, 1236 aa, Ormyrus nitidulus
MPRPEDFVIREGGAFIVLLPQPEGTTMYCPLCRGRGVYRGKTRVENFNRHAKEHHPDLRVCYRCWSCGFMAPEEARYPRKVVTAHSGTCVPSVPSAPSGLVDAERRANIRTRLASGIREQHNTRLPTASEEGGHNIATPRRITRQNIQQTRPVIASRSSSSENDVFLSPIGVMATPRSNVRPRRARALRFPSSSPSPSPSPIQASREVALASHSPLPAQPTPVAEVAVTLDEPHLDSDNAVGGLSSDNIPEAQPNNTVAATHDSHLDGINPVGGIRGGPNAEGNVIRRRRGPTVDQRRLVAELEAATSPEELEAVATRVQEFLGRLAGPRVNRTAPRQGQQNRRRNRPPGQQHRPRQTQQQLEGNRIIEATRIQKLYRKNRKRAVQSILAGSNGPCGVDRNTVQRHFGALAAHREGGSEWPRVLEGTPPTTASNEALEKPFEREEVARRLKGRSNTAPGPDGLTYENLKRADPGAYVLTALYNAVLRCESVPSTWKESNTILIHKGGDRGDINNWRPIALGDTCPKFFASLLADRVKRWATTNSRFSPSQKGFLEYEGCFEHNFVLKEAIREAQRGGRELAVVWLDLASAFPSLPHSSIFRALEEHGLPPKILNTIRSLYNGLSTRFRTSQGLTDPVLLQSGVRQGCPLSPEVFNLTLEVLLREMEATEQGFSLGGRHIHALAYADDVAVLASSREAMEDLLMAAGRGARAVGLHFNQSKCASLHIGSRGEVLQTVFQVQGAPVTVLDEGGAYKHLGIPTGYQIKETPISSMAELVADVKKIDVSLLAPWQKIEAVATFLLPRLDFTMQGANIEKGYLTELDRFLKKKVKHWLGLPQRASPELVAVPPSQGGAGILPLGDLYDLLTVAHGYRLLTSPDPAVRDIAEHQLRGTVSQRLRRLVRGDDLANFLSGDSAIPRSSGRSSYWGAVRSAVRRLNIKIALRWSWFPEEEEVKLHLVTDGAAAAPLERANVIRALRHAVIQHYAESLLAKPDQSKAFEVFRRSGHSNHFLRNGRNTRFCDWRFIHRARLGVLPLNAIKRWQTGVDRRCRKCGSDLETIPHVLNHCGVHSAARQLRHNNVQDRLVRAASRCPGTISVNRRVQGVHGTAAALRPDIVVRDEEGRRITIVDVAIPFENRVEAMERARQEKRSKYQPLADQLVGAGYVVKVDAFVVGSLGSWDPHNERVLDLLKVSRFYAGMMRRFMVSDTIRWSRDIYVEHVSGSRQYRLSPTPHTSP

SEQ ID NO: 24945 - protein, 1066 aa, Androctonus mauritanicus
MPRMNIQNAAASPDVAAPVTQAANGLGHRCTVRDCDRAFGSSRGLSQHIRLMHPVEYDANVVASSARVKARWTSEEAAMLVREEAACLFRGVRPREINQEMYRLLPERTEESVKGQRRKQEHKEQVAAALEELRRRELGSDAEDLSDQGSEEGALVEIEDTLNLHPEQSHLSGSSESGSVDTEELPDDSDDILPGELELLERLKGCSRLDGVGFQAERLQSIIDDATPDNRADTFRRFSEYLIAVLPRGRGRTAGGRPSRQRVPPGSSRKVRRSHYALTQKEYVKAKSKCINRILDDSQDNAHMPNERVMLDHWRPVFTADSPEIPHEPERRVKPKLSLWRLITPSEVRRARPSLRVAPGPDGLVPRKLRAIPLPLLAAIFNLVLWCGEWPEFLRGARTVFLPKVRGANAPGDFRPLTISSVLVRCLNRVLAQRMDKTIKLDRRQRAFRSRIDGCRDNVFVLDSIIRKCYLRSKSAYVAVVDLAKAFPSVTHASLLKAAEAAGVPAAMRRYLRKLYGSSTTTICGDGWESEPIPVTRGVRQGDPLSSVMFNLVMDGYIRHLPDDIGIQHEGKRINVAAYADDLILFAETAVGLQRLLDLTSSYLARCGLYVNSGKSFTFSLFGDGKKKRTVVDSTRQFSVGGVGIRALTRSDEWTYLGVRFTPAGRKAERMAGQVQVMLDRITKAPLKPQQRLYVVKNHVLPRCQHQLSLGRTWLGDLSLIDRRVRACIRRWLALPDDAPVAYFHAPVRDGGLGVPSVRWNAPWSRLVRLRGMVPRGTRIVDLSDDHLRSEIRLCQRRLVDHHAMINRRDDIGKHFAKRLHGSVDGKALALSGLVPGQHQWIDRDNRFMNGRDYVHLHKVRINALPTASRRARGRSIDRACRAGCGMAETSNHVLQICHRTHGSRVERHNAVSTYVARHLRRKGFRVFEEPRLHTVEGLRKPDIVAALNDTAYVIDSTVVGEQQSLAAAFRRKQEYYHLNPDIGPAIRHLTGVRCVKHIPVVVSWRGVWSLDSWNQLSAVCGLTMWDTCVISTRVLMGGWIAFKKFERMTSRRRRGHRIRVRGPDR

SEQ ID NO: 24946 - protein, 1235 aa, Teleogryllus occipitalis
MFTRSKTKGPLPGERQGTSGAGAGRDSLQTSGGRSLNRRAPIGLPEKSTADTNGSTKDPPAPPTDSVLRESLPSTTKAGKVRQRLKWTTDVNIFIMRTYYKITKLETDLTMYRHELYQLFRMQYPELNVTEQRIADQRRTIVTNNLLPQTLLEEMKSEVAKSLSSDTQQTNLITADTTQNTVSEAISGYSEQMTGTTLRLGNSSLNITHQIPPNDTETSMQKSKLNEDTLETKVQDEFFAAITEFEGSDPTQRHSIPRQKTSRKLAQIVEILNKSVIPNYLIHHTSFTDVHTAIYCGAVAAARTNGSRTYERIPLGRKVHEKPKWQQRIDKKISNIRKDLGRLTQYKQGNRSKNVVRHAATIFNKIKTHTKHENHNQHIDEYIDTLQQKLSAYCQRLRRYKECAARKKHNNLFYTNEKKFYNSLRETERQITHNGIPTKDEIQTYWSSIWSTDLHHDNKATWIKEEETRYKQMTHMEFTDITVENISRTIKETHNWKATGVDNIHNYWYKKFTCTHVLLAKHLTNFVQMPETMPSYLTQGITYLKSKDSNTTNPSKYRPITCLSTIYKILTACLADNIYKHCEKNEIIAEQQKGCRQHSQGCKEQLLIDSVVMEQAYKDHRNIYTAYIDYSKAFDSVPHSWLLKILKIYKIHPSIITFLEHTMGNWKTAVTLVSQEKHITTDSIAIRRGIFQGDSLSPLWFCLALNPLSNRLNNSNYGFNIKSNKMVQFKLSHLLYMDDIKLYATTETQLSHLLKITESFSRDIAMKFGIDKCKIQKITKGTRECEGFQLQNGETIEAMSEETYKYLGFAQSRRIEHRIIRETLIRTYTNRLTKILKSQLNGRNKFKAINTFAIPVLTYSFGIIHWTKTDLANVERKTRTALNRHRIHHPNSSTERLTLPRREGGRGMIDITNLHNKLTNLLQEYFVTQKKESPLHKAIVLADNKHTPLNLHHYNRDTLSLATEPPDKYQSWKQKLLHGRHRHDLEQPHVDLEASNAWLSRGNLFAETEGFMTAIQDQVINTKNYRKYIIKDPALENDLCRRCHLSSETIQHITSGCKIITHTDYKHRHDQVAKIIHQRIALNWNLLEIKQPYYKYTPTTIMENSTCKLYWDRTIITDKTIAHNRPDITLIDKTNKITYLIDIAIPNTHNLQSSHMEKISKYTELAIEIKQLWKMEKVYTVPIIVSTNGVIPKTLYNSLQQLNLTKSLYIELQKATILNTCKIVRKFLDSSVTHA

SEQ ID NO: 24947 - protein, 1236 aa, Teleogryllus occipitalis
MFTRSKTKGPLPGERQGTSGAGAGRDSLQTSGGRSLNRRAPIGLPEKSTADTNGSTKDPPAPPTDSVLRESLPSTTKAGKVRQRLKWTTDVNIFIMRTYYKITKLETDLTMYRHELYQLFRMQYTELNVTEQRIADQRRTIVTNNLLPQTLLEEMKSEVAKPLSSDTQQTNLITADTTQNTVSDAISGYSEQMTGTTLRLGNSSLNITHQIPPNDTETSMQKSKSNEDTLETKVQDEFFASITEFEGSDPTQRHSIPRQKTSRKLAQIVEILNKSVIPNYLIHHTSFTDVHTAIYCGAVAAARTNGSRTYERIPLGRKVHEKPKWQQRIDKKISNIRKDLGRLTQYKQGNRSKNVVRHAATIFNKIKTHTKHENHNQHIDEYIDTLQQKLSAYCQRLRRYKECAARKKHNNLFYTNEKKFYNSLRETERQITHNGIPTKDEIQTYWSSIWSTDLHHDNKATWIKEEETRYKQMTHMEFTDITVENISRTIKETHNWKATGVDNIHNYWYKKFTCTHVLLAKHLTNFVQMPETMPSYLTQGITYLKSKDSNTTNPSKYRPITCLSTIYKILTACLADNIYKHCEKNEIIAEQQKGCRQHSQGCKEQLLMDSVVMEQAYKDHRNIYTAYIDYSKAFDSVPHSWLLKILKIYKIHPSIITFLEHTMGNWKTAVTLVSQEKHITTDSIAIRRGIFQGDSLSPLWFCLALNPLSNRLNNSNYGFNIKSNKMVQFKLSHLLYMDDIKLYATTEPQLSHLLKITESFYRDIAMKFGIDKCKIQKITKGTRECEGFQLQNGETIEAMSEEDTYKYLGFAQSRRIEHRIIRETLIRTYTNRLTKILKSQLNGRNKFKAINTFAIPVLTYSFGIIHWTKTDLANVERKTRTALNRHRIHHPNSSTERLTLPRREGGRGMIDITNLHNKLTNLLQEYFVTQKKESPLHKAIVLADNKHTPLNLHHYNRDTLSLATEPPDKYQSWKQKLLHGRHRHDLEQPHVDLEASNAWLSRGDLFAETEGFMTAIQDQVINTKNYRKYIIKDPALENDLCRRCHLSSETIQHITSGCKIITHTDYKHRHDKVAKILHQRIALNWNLLEIKQPYYKYTPTTIMENSTCKLYWDRTIITDKTIAHNRPDITLIDKTNKITYLMDIAIPNTHNLQSSHMEKISKYTELAIEIKQLWKMEKVYTVPIIVSTNGVIPKTLYNSLQQLNLTKSLYIELQKATILNTCKIVRKFLDSSVTHA

SEQ ID NO: 24948 - protein, 1236 aa, Teleogryllus occipitalis
MFTRSKTKGPLPGERQGTSGAGAGRDSLQTAGGRSLNRRAPIGLPEKSTADTNGSTKDPPAPPTDSVLRESLPSTTKAGKVRQRLKWTTDVNIFIMRTYYKITKLETDLTMYRHELYQLFRMQYPELNVTEQRIADQRRTIVTNNLLPQTLLEEMKSEVAKSLSSDTQQTNLITADTTQNTVSEAISGYSEQMTGTTLRLGNSSLNITHQIPPNDTETSMQKSKSNEDTLETKVQDEFFAAITEFEGSDPTQRHSIPRQKTSRKLAQIVEILNKSVIPNYLIHHTSFTDVHTAIYCGAVAAARTNGSRTYERIPLGRKVHEKPKWQQRIDKKISNIRKDLGRLTQYKQGNRSKNVVRHAATIFNKIKTHTKHENHNQHIDEYIDTLQQKLSAYCQRLRRYKECAARKKHNNLFYTNEKKIYNSLRETERQITHNGIPTKDEIQTYWSSIWSTDLHHDNEATWIKEEETRYKQMTHMEFTDITVENTSRTIKETHNWKATGVDNIHNYWYKKFTCTHVLLAKHLTNFVQMPETMPSYLTQGITYLKSKDSNTTNPSKYRPITCLSTIYKILTACLADNIYKHCEKNEIIAEQQKGCRQHSQGCKEQLLMDSVVMEQAYKDHRNIYTAYIDYSKAFDSVPHSWLLKILKIYKIHPSIITFLEHTMGNWKTAVTLVSQEKHITTDSIAIRRGIFQGDSLSPLWFCLALNPLSNRLNNSNYGFNIKSNKMVQFKLSHLLYMDDIKLYATTETQLSHLLKITESFSRDIAMKFGIDKCKIQKITKGTRECEGFQLQNGETIEAMSEEDTYKYLGFAQSRRIEHRIIRETLIRTYTNRLTKILKSQLNGRNKFKAINTFAIPVLTYSFGIIHWTKTDLANVERKTRTALNRHRIHHPNSSTERLTLPRREGGRGMIDITNLHNKLTNLLQEYFVTQKKESPLHKAIVLADNKHTPLNLHHYNRDTLSLATEPPDKYQSWKQKLLHGRHRHDLEQPHVDLEASNAWLSRGDLFAETEGFMTAIQDQVINTKNYRKYIIKDPALENDLCRRCHLSSETIQHITSGCKIITHTDYKHRHDQVAKILHQRIALNWNLLEIKQPYYKYTPTTIMENSTSKLYWDRTIITDKTIAHNRPDITLIDKTNKITYLIDIAIPNTHNLQSSHMEKISKYTELAIEIKQLWKMEKVYTVPIIVSTNGVIPKTLYNSLQQLNLTKSLYIELQKATILNTCKIVRKFLDSSVTHA

SEQ ID NO: 24949 - protein, 924 aa, Teleogryllus occipitalis
MVLNACTKKVKSIIIIIIIIIIIIANNIIIDKKISNIRKDLGRLTQYKQGNRSKNVVRHAATIFNKIKTHTKHENHNQHIDEYIDTLQQKLSAYCQRLRRYKECAARKKHNNLFYTNEKKFYNSLRETERQITHNGIPTKDEIQTYWSSIWSTDLHHDNKATWIKEEETRYKQMTHMEFTDITVENISRTIKETHNWKATGVDNIHNYWYKKFTCTHVLLAKHLTNFVQMPETMPSYLTQGITYLKSKDSNTTNPSKYRPITCLSTIYKILTACLADNIYKHCEKNEIIAEQQKGCRQHSQGCKEQLLMDSVVMEQAYKDHRNIYTAYIDYSKAFDSVPHSWLLKILKIYKIHPSIITFLEHTMGNWKTAVTLVSQEKHITTDSIAIRRGIFQGDSLSPLWFCLALNPLSNRLNNSNYGFNIKSNKMVQFKLSHLLYMDDIKLYATTETQLSHLLKITESFSIDIAMKFGIDKCKIQKITKGTRECEGFQLQNGETIEAMSEEDTYKYLGFVQSRRIEHRIIRETLIRTYTNRLIKILKSQLNGRNKFKAINTFAIPVLTYSFGIIHWTKTDLANVERKTRTALNRHRIHHPNSSTERLTLPRREGGRGMIDITNLHNKLTNLLQEYFVTQKKESPLHKAIVLADNKHTPLNLHHYNRDTLSLATEPPDKYQSWKQKLLHGRHRHNLEQPHVDLEASNAWLSRGDLFAETEGFMTAIQDQVINTKNYRKYIIKDPALENDLCRRCHLSSETIQHITSGCKIITHTDYKHRHDQVAKILHQRIALNWNLLEIKQPYYKYTPTTIMENSTCKLYWDRTIITDKTIAHNRPDITLIDKTNKITYLIDIAIPNTHNLQSSHMEKISKYTELAIEIKQLWKMEKVYTVPIIVSTNGVIPKTLYNSLQQLNLTKSLYIELQKLQSSTHAK

SEQ ID NO: 24950 - protein, 764 aa, Teleogryllus occipitalis
MTHMEFTDITVENISRTIKETHNWKATGVDNIHNYWYKKCTCTHVLLAKHLTNFVQMPETMPSYLTQGITYLKSKDSNTTNPSKYRPITCLSTIYKILTACLADNIYKHCEKNEIIAEQQKGCRQHSQGCKEQLLMDSVVMKQAYKDHRNIYTAYIDYSKAFDSVPHSWLLKILKIYKIHPSIITFLEHTMGNWKTAVTLVSQEKHITTDSIAIRIGIFQGDSLSPLWFCLALNPLSNRLNNSNYGFNIKSNKMVQFKLSHLLYMDDIKLYATTETQLSHLLKITESFSRDIAMKFGIDKCKIQKITKGTRECEGFQLQNGETIEAMSEEDTYKYLGVAQSRRIEHRIIRETLIRTYTNRLTKILKSQLNGRNKFKAINTFAIPVLTYSFGIIHWTKTDLANVERKTRTALNRHRIHHPNSSTERLTLPRRDGGRGMIDITNLHNKLTNLLQEYFVTQKKESPLHKAIVLADNKHTPLNLHHYNRDTLSLATEPPDKYQSWKQKLLHGRHRHDLEQPHVDLEASNAWLSRGDLFAETEGFMTAIQDQVINTKNYRKYIIKDPALENDLCRRCHLSSETIQHITSGCKIITNTDYKHRHDQVAKIIHKRIALNWNLLEIKQPYYKYTPTTIMENSTCKLYWDRTIITDKTIAHNRPDITLIDKTNKITYLIDIAIPNTHNLQSSHIEKISKYTELAIEIKQLWKMEKVYTVPIIVSTNGVIPKTLYNSLQQLNLTKSLYIELQKATILNTCKIVRKFLDSSVTHA

SEQ ID NO: 24951 - protein, 1165 aa, Teleogryllus occipitalis
MHYPFDMEQFVQNEASDVPGSRAVPGTGPQPDDDNVSDQNGNVYSNSSEKNASTSSGLRTKRNASRRNETSNRIKWSREMNKKVIRTYLLINECRDDPLPGWRHKLHSEFSKTYPEFNLTEQNLADRKNVIMKRKYLTQIEIDEIRREVGNELQAAVEDHQTGDNNDTTIETNASSINKETAEKFVGYFYLFRDTDPLGRPKIPKLIFTKQTNILIKQVDQVIPQVADQLNNLTDIHTALYAAAVAVIDLNGQHIQNNPPSKTKKARKPAWQFRLEQSIVKLRTEINIIHEFLSNNKSRRVKHKINRILHKMQININDSELRQKLTLYHDEARQKLKAKGARLRRYNECSKRKQQNMLFERNQKVFYRNLEHKADSQEKVDNYKFKSYWQEIWTNPSSYNRDASWLSELQEKMGNLPEMSEVHITTEDIEESLKKCQNWKSAGSDKIQNFWLKRFVSLHNLISNSFNEILQKPDQCPKFLTQGITYLLPKSVPKSDPKNYRPVTCLSVLYKLLTSVLHEKIYMHCNQNNIISMEQKGCIRGTFGCKEQLTVDSVIIKQAEVKSRNLSMCYIDYRKAFDSVPHEWLIHVLKIYKINTKVVNLLAALMKNWCTEINLENCTFKIDIRRGIFQGDSLSPLWFCLAINPLSQLLNKECLGYRLRLRDPTSRISHLLFMDDLKLFAESQNHLKALKNVTRVFSEDIAMSFGFDKCAEIHLKNGKLVEVPDETCDFRQLLYHDTYKYLGIQQNRRVNHTNMKSIFKERYKSRITKLMNKKLYSRNLISTINTYAVPVLTYSFGILKYSDTDLRELDTITRTTLTKFRIHHPKSAVERLYLPRNQGGRGLLNIFNLCRSQEKKMRMYFHASDSVLLKNVVAVDANYSALNLQKTETNTEIVSQICNMQTDWKNKTLHGKYPNLLNNPSVDKVSSLLWLKMGYLFPETEGFIIAIQDEVIKTRNYDKHILKSSIKDVCRMCNQPNETIDHVIAGCPVLANTAYLGRHNQEAKIIHRQLASNYRLIENPPPFYKYSPSPVIENSEIVLYWDRPIVTDKTVDYNRPDIVVINKIQKYATIIDVGCPLTKNLNKTESEKISKYQNLAAEIQHVWQLSKVEIVPINHLSHRSGDRPICFRSYKNRIIKRNLHNHPKSFNPTDLPYCAKIFKLNDGQR

SEQ ID NO: 24952 - protein, 848 aa, Teleogryllus occipitalis
MQININDSELRQKLTLYHDEARQKLKAKGARLRRYNECSKRKQQNMLFERNQKVFYRNLEHKADSQEKVDSYKFQSYWQEIWTNPSSYNHDASWLSELQEKMDNLPEMSEVHITTEDIEESLKKCQNWKSAGSDKIQNFWLKRFVSLHNLISNSFNEILQKPDQCPKFLTQGITYLLPKSVPKSDPKNYRPVTCLSVLYKLLTSVLHEKIYMHCNQNNIISMEQKGCIRGTFGCKEQLTVDSVIIKQAEVKSRNLSMCYIDYRKAFDSVPHEWLIHILKIYKINTKVVNLLAALMKNWCTEINLENCSFKIDIRRGIFQGDSLSPLWFCLAINPLSQLLNKECLGYRLRLRDPTSRISHLLFMDDLKLFAESQNHLKALKHVTRVFSEDIGMSFGFDKCAEIHLKNGKLVEVPDETCDFRQLLYHDTYKYLGIQQNRRVNQTNMKSIFKERYKSRITKLMNKKLYSRNLISAINTYAVPVLTYSFGILKYSDTDLRELDTITRTTLTKFRIHHPKGAVERLYLPRNQGGRGLLNIFNLCRSQEKKMRMYFHASDSVLLKNIVAVDANYSALNLQKTETNTEIVSQICNMQTDWKNKTLHGKYPNLLNNPSVDKVSSLLWLKMGYLFPETEGFIIAIQDGVIKTRNYDKHILKSSIKDVCRMCNQPNETIDHVIAGCPVLANTAYLGRHNQVAKIIHRQLASNYRLIENPPPFYKYSPSPVIENSEIVLYWDRPIVTDKTVDYNRPDIVVINKIQKYATIIDVGCPLTKNLNKTESEKISKYQNLAAEIQHVWQLSKVEIVPIIISATGVVTDRFASGLTKIGLSKGICITIQKALILQTCHIVRKFLN

SEQ ID NO: 24953 - protein, 1159 aa, Teleogryllus occipitalis
MHYPFDMEQFVQNEASDVPGSRAVPGTGPQPDDDNVSDQNGNVYSNSSEKNASTSSGLRTKRNASRRNETSNRIKWSREMNKKVIRTYLLINECRDDPLPGWRHKLHSEFSKTYPEFNLTEQNLADRKNVIMKRKYLTQIEIDEIRREVGNELQAAVEDHQTGDNNDTTIETNASSINKETAEKFVGYFYLFRDTDPLGRPKIPKLIFTKQTNILIKQVDQVIPQVADQLNNLTDIHTALYAAAVAVIDLNGQHIQNNPPSKTKKARKPAWQFRLEQSIVKLRTEINIIHEFLSNNKSRRVKHKINRILHKMQININDPELRQKLTLYHDEARQKLKAKGARLRRYNECSKRKQQNMLFERNQKVFYRNLEHKADSQEKVDNYKFKSYWQEIWTNPSSYNRDASWLSELQEKMGNLPEMSEVHITTEDIEESLKKCQNWKSAGSDKIQNFWLKRFVSLHNLISNSFNEILQKPDQCPKFLTQGITYLLPKSVPKSDPKNYRPVTCLSVLYKLLTSVLHEKIYMHCNQNNIISMEQKGCIRGTFGCKEQLTVDSVIIKQAEVKSRNLSMCYIDYRKAFDSVPHEWLIHVLKIYKINTKVVNLLAALMKNWCTEINLENCTFKIDIRRGIFQGDSLSPLWFCLAINPLSQLLNKECLGYRLRLRDPTSRISHLLFMDDLKLFAESQNHLKALKNVTRVFSEDIAMSFGFDKCAEIHLKNGKLVEVPDETCDFRQLLYHDAYKYLGIQQNKRVNHTNMKSMFKERYKSRITKLMNKKLYSRNLISAINTYAVPVLTYSFGILKYSDTDLRELDTITRTTLTKFRIHHPKSAVERLYLPRNQGGRGLLNIFNLCRSQEKKMRMYFHASDSVLLKNVVAVDANYSALNLQKTETNTEIVSQICNMQTDWKNKTLHGKYPNLLNNPSVDKVSSLLWLKMGYLFPETEGFIIAIQDEVIKTRNYDKHILKSSIKDVCRMCNQPNETIDHVIAGCPVLANTAYLGRHNQVAKIIHRQLASNYRLIENPPPFYKYSPSPVIENSEIVLYWDRPIVTDKTVDYNRPDIVVINKIQKYATIIDVGCPLTKNLNKTESEKISKYQNLAAEIQHVWQLSKVEIVPIIISATGVVTDRFASGLTKIGLSKGICITIQKALILQTCHIVRKFLN

SEQ ID NO: 24954 - protein, 1159 aa, Teleogryllus occipitalis
MHYPFDMEQFVQNEASDVPGSRAVPGTGPQPDDDNVSDQNGNVYSNSSEKNASTSSGLRTKRNASRRNETSNRIKWSREMNKKVIRTYLLINECRYDPLPGWRHKLHSEFSKTYPEFNLTEQNLADRKNVIMKRKYLTQIEIDEIRREVGNELQAAVEDHQTGDNNDTTIETNASSINKETAEKFVGYFYLFRDTDPLGRPKIPKLIFTKQTNILIKQVDQVIPQVADQLNNLTDIHTALYAAAVAVIDLNGQHIQNNPPSKTKKARKPAWQFRLEQSIVKLRTEINIIHEFLSNNKSRRVKHKINRILHKMQININDPELRQKLTLYHDEARQKLKAKGARLRRYNECSKRKQQNMLFERNQKVFYRNLEHKADSQEKVDNYKFKSYWQEIWTNPSSYNRDASWLSELQEKMGNLPEMSEVHITTEDIEGSLKKCQNWKSAGSDKIQNFWLKRFVSLHNLISNSFNEILQKPDQCPKFLTQGITYLLPKSVPKSDPKNYRPVTCLSVLYKLLTSVLHEKIYMHCNQNNIISMEQKGCIRGTFGCKEQLTVDSVIIKQAEVKSRNLSMCYIDYRKAFDSVPHEWLIHVLKIYKINTKVVNLLAALMKNWCTEINLENCTFKIDIRRGIFQGDSLSPLWFCLAINPLSQLLNKECLGYRLRLRDPTSRISHLLFMDDLKLFAESQNHLKALKNVTRVFSEDIAMSFGFDKCAEIHLKNGKLVEVPDETCDFRQLLYHDTYKYLGIQQNRRVNHTNMKSMFKERYKSRITKLMNKKLYSRNLISAINTYAVPVLTYSFGILKYSDTDLRELDTITRTTLTKFRIHHPKSAVERLYLPRNQGGRGLLNIFNLCRSQEKKMRMYFHASDSVLLKNVVAVDANYSALNLQKTETNTEIVSQICNMQTDWKNKTLHGKYPNLLNNPSVDKVSSLLWLKMGYLFPETEGFIIAIQDEVIKTRNYDKHILKSSIKDVCRMCNQSNETIDHVIAGCPVLANTAYLGRHNQVAKIIHRQLASNYRLIENPPPFYKYSPSPVIENSEIVLYWDRPIVTDKTVDYNRPDIVVINKIQKYATIIDVGCPLTKNLNKTESEKISKYQNLAAEIQHVWQLSKVEIVPIIISATGVVTDRFASGLTKIGLSKGICITIQKALILQTCHIVRKFLN

SEQ ID NO: 24955 - protein, 1157 aa, Teleogryllus occipitalis
MHYPFDMEQFVQNEASDVPGSRAVPGTGPQPDDDNVSDQNGNVYSNSSEKNASTSSGLRTKRNASRRNETSNRIKWSREMNKKVIRTYLLINECRDDPLPGWRHKLHSEFSKTYPEFNLTEQNLADRKNVIMKRKYLTQIEIDEIRREVGNELQAAVEDHQTGDNNDTTIETNASSINKETAEKFVGYFYLFRDTDPLGRPKIPKLIFTKQTNILIKQVDQVIPQVADQLNNLTDIHTALYAAAVAVIDLNGQHIQNNPPSKTKKARKPAWQFRLEQSIVKLRTEINIIHEFLSNNKSRRVKHKINRILHKMQININDSELRQKLTLYHDEARQKLKAKGARLRRYNECSKRKQQNMLFERNQKVFYRNWEHKADSQEKVDSYKFKSYWQEIWTNPSSYNRDASWLSELQEKMGSLPEMSEVHITTEDIEGSLKKCQNWKSAGSDKIQNFWLKRFVSLHNLISNSFNEILQKPDQCPKFLTQGITYLLPKSVPKSDPKNYRPVTCLSVLYKLLTSVLHEKMHCNQNNIISMEQKGCIRGTFGCKEQLTVDSVIIKQAEVKSRNLSMCYIDYRKAFDSVPHEWLIHVLKIYKINTKVVNLLAALMKNWCTEINLENCTFKIDIRRGIFQGDSLSPLWFCLAINPLSQLLNKECLGYRLRLRDPTSRISHLLFMDDLKLFAESQNHLQALKNVTRVFSEDIAMSVGFDKCAEIHLKNGKLVEVPDETCDFRQLLYHDTYKYLGIQQNRRVNHTNMKSIFKERYKSRITKLMNKKLYSRNIISAINTYAVPVLTYSFGILKYSDTDLRELDTITRTTLTKFRIHHPKSAVERLYLPRNQGGRGLLNIFNLCRSQEKKMRMYFHASDSVLLKNVVAVDANYSALNLQKTETNTEIVSQICNMQTDWKNKTLHGKYPNLLNNPSVDKVSSLLWLKMGYLFPETEGFIIAIQDEVIKTRNYDKHILKSSIKDVCRMCNQPNETIDHVIAGCPVLANTAYLGRHNQVAKIIHRQLASNYRLIENPPPFYKYSPSPVIENSEIVLYWDRPIVTDKTVDYNRPDIVVINKIQKYGTIIDVGCPLTKNLNKTESEKISKYQNLAAEIQHVWQLSKVEIVPIIISATGVVTDRFALGLTKIGLSKGICITIQKALILQTCHIVRKFLN

SEQ ID NO: 24956 - protein, 926 aa, Teleogryllus occipitalis
MTDIHTALYAAAVAVIDLNGQLIQNNPPSKTKKARKPAWQFRLEESIVKLRTEINIIHEFLSNNKSRRVKHKINRILHKMQININDSELRQKLTLYHDEARQKLKAKGARLRRYNECSKRKQQNMLYERNQKVFYRNLEHKADSQEKVDSYKFQSYWQEIWTNPSSYNRDASWLSELQEKMGNLPEMSEVHITTEDIEGSLKCQNWKSAGSDKIQNFRLKRFVSLHNLISNSFNEILQKPDQCPKFLTQGITYLLPKSVPKSDPKNYRPVTCLSVLYKLLTSVLHEKIYMHCNQNNIINMEQKGCIRGTFGCKEQLTVDSVIIKQAEVKSRNLSMCYIDYRKAFDSVPHEWLIHILKIYKINTKVVNLLAALMKNWCTEINLENCTFKIDIRRGIFQGDSLSPLWFCLAINPLSQLLNKECLGYRLRLRDPTSRISHLLFMDDLKLFAESQNHLKALKHVTRVFSEDMSMSFGYDKCAEIHLKNGKLVEVPDETCDFRQLLYHDTYKYLGIQQNRRVNHTNMKSIFKERYKSRITKLMNKKLYSRNLISAINTYAVPVLTYSFGILKYSDTDLRELDTITRTTLTKFRIHHPKSAVERLYLPGNQGGRGLLNIFNLCRSQEKKMRMYFHASDSVLLKNVVAVDANYSALNLQKTETNTEIVSQICNMQTDWKNTTLHGKYPNLLSNPSVDKVSSLLWLKMGYLFPETEGFIIAIQDGVIKTRNYDKHILKNSIKDVCRMCNQPNETIDHVIAGCPVLANTAYLGRHNQVAKIIHRQLASNYRLIENPPSFYKYSPSPVIENSEIVLYWDRPIVTDITVDYNRPDIVVINKIQKYATIIDVGCPLTKNLNKTESEKISKYQNLAAEIQHVWQLSKVEIVSIIISATGVVTDRFASGLTKIGLSKGICITIQKALILQTCHIVRKFLN

SEQ ID NO: 24957 - protein, 1159 aa, Teleogryllus occipitalis
MHYPFDMEQFVQNEASDVPGSRAVPGTGPQPDDDNVSDQNGNAYSNSSEENASTSSGLRTKRNASRRNETSNRIKWSREMNKKVIRTYLLINECRDDPLPGWRHKLHSEFSKLYPEFNLTEQNLADRKNVIMKRKYLTQIEIDEIRREVGNELQAAVEDHQTGDNNDTTIETNALSINKETAEKFVGYFHLFRDTDPLGRPKIPKLIFTKQTNILIKQVDQVIPQVADQLNNLTDIHTALYAAAVAVIDLNGQRIQNNPPSKTKKVRKPAWQFRLEQSIVKLRTEINIIHEFLSNNKSRRVKHKINRILHKMQININDSELRQKLTLYHDEARQKLKAKGARLRRYNECSKRKQQNMLFERNQKVFYRNLEHKADSQEKVDSYKFKSYWQEIWTNPSSYNRDASWLSELQENMGNLPEMSEVYITTEDIEGSLKKCQNWKSAGSDKIQNFWLKRFVSLHNLISNSFNEILQKPDQCPKFLTQGITYLLPKSVPKSDPKNYRPVTCLSVLYKLLTSVLHEKIYMHCNQNNIISMEQKGCIRGTFGCKEQLTVDSVIIKQAEVKSRNLSMCYIDYRKAFDSVPHEWLIHILKIYKINTKVVNLLAALMKNWCTEIILENCTFKIDIRRGIFQGDSLSPLWFCLAINPISQLLNKECLGYRLRLRDPTSRISHLLFMDDLKLFAETQNHLKALKYVTRVFSEDIAMSFGFDKCAEIHLKNGKLVELPDETCDFRQLLYNDTYKYLGIQQNRRVNHTNMKSIFKERYKSRITKLMNKKLYSRNLISAINTYAVPVLTYSFGILKYSDTDLRELDTITRTTLTKFRIHHPKSAVERLYLPRNQGGRGLLNIFNLCRSQEKKMRMYFHASDSVLLKNVVAVDANYSALNLQKTETNTEIVSQICNMQIDWKNKTLHGKYPNLLNNPSVDKVSSLLWLKMGYLFPETEGFIIAIQDGVIKTRNYDIHILKSGIKDVCRMCNQPNETIDHVIAGCPVLANTAYLGRHNQVAKIIHRQLASNYRLIENPPPFYKYSPSPVIENSEIVLYWDRPIVTDKTVDYNRPDIVVINKIQKYATIIDVGCPLTKNLNKTESEKISKYQNLAAEIQHVWQLSKVEIVPIIISATGVVTDRFASGLTKIGLSKGICITIQKALILQTCHIVRKFLN

SEQ ID NO: 24958 - protein, 848 aa, Teleogryllus occipitalis
MQININDSELRQKLTLYHDEARQKLKAKGARLRRYNECSKRKQQNMLFERNQKVFYRNLEHKADSQEKVDNYKFKSYWQEIWTNPSSYNRDASWLSELQEKMGNLPEMSEVHITTEDIEESLKKCQNWKSAGSDKIQNFWLKRFVSLHNLISNSFNEILQKPDQCPKFLTQGITYLLPKSVPKSDPKNYRPVTCLSVLYKLLTSVLHEKIYMHCNQNNIISMEQKGCIRGTFGCKEQLTVDSVIIKQAEVKSRNLSMCYIDYRKAFDSVPHEWLIHVLKIYKINTKVVNLLAALMKNWCTEINLENCTFKIDIRRGIFQGDSLSPLWFCLAINPLSQLLNKECLGYRLRLRDPTSRISHLLFMDDLKLFAESQNHLQALKNVTRVFSEDIAMSFGFDKCAEIHLKNGKLVEVPDETCDFRQLLYHDAYKYLGIQQNKRVNHTNMKSMFKERYKSRITKLMNKKLYSRNLISAINTYAVPVLTYSFGILKYSDTDLRELDTITRTTLTKFRIHHPKSAVERLYLPRNQGGRGLLNIFNLCRSQEKKMRMYFHASDSVLLKNVVAVDANYSALNLQKTETNTEIVSQICNMQTDWKNKTLHGKYPNLLNNPSVDKVSSLLWLKMGYLFPETEGFIIAIQDEVIKTRNYDKHILKSSIKDVCRMCNQPNETIDHVIAGCPVLANTAYLGRHNQVAKIIHRQLASNYRLIENPPPFYKYSPSPVIENSEIVLYWDRPIVTDKTVDYNRPDIVVINKIQKYATIIDVGCPLTKNLNKTESEKISKYQNLAAEIQHVWQLSKVEIVPIIISATGVVTDRFASGLTKIGLSKGICITIQKALILQTCHIVRKFLN

SEQ ID NO: 24959 - protein, 848 aa, Teleogryllus occipitalis
MQININDSELRQKLTLYHDEARQKLKAKGARLRRYNECSKRKQQNMLFERNQKVFYRNLEHKADSQEKVDSYKFQSYWQEIWTNPSSYNRDASLLSELQEKMGHLPEMSEVHITTEDIEGSLKKCQNWKSAGSDKIQNFWLKRFVSLDNLISNSFNEILQKPDQCPKFLTQGITYLLPKSVPKSDLKNHRPVTCLSVLYKLLTSVLHEKIYMHCNQTNIISMEQKGCIRGTFGCKEQLTVDSVIIKQAEVKSRNLSMSYIDYRKAFDSVPHEWLIHILNLYKINTKVVNLLTALMKNWCTEINLENCTFKIDIRRGIFQGNSLSPLWFCLAINPLSQLLNKECLGYRLRLRDPTSRISHSLFMDDLKLFAESQNHLKALKYVTRVFSEDIAVSFGFDKCAEIHLKNGKLVEIPDETCDFRQLLYHDTYKYLGIQQNRRVNHTNMKSIFKERYKSRITKLMNKKLYSRNLISAINTYAVPVLTYSFGILKYLDTDLRELDTITRTTLTKFRIHHPKSAVERLYLPRNQGGRGLINIFNLCRSQEKKMRMYFHASYSVLLKNVVAVDANYSVLNLQKTETNTEIISQICNMQTDWKNKTLHGKYPNLLNNPSVDKVSSLLWLKMGYLFPETEGFIIAIQDGVIKTRNYDKHILKSSIKDVCKMCNQPNETIDHVIAGCPVLANTTYLGRHNQVAKIIHRQLASNYRLIENPPPFYKYSPSPVIENSEIVLYWDRPIVTDKTVDYNRPDIVVINKIQKYATIIDVGCPLTKNLNKTESEKISKYQNLAAEIQHVWQLSKVEIVPIIISATGVVTDRFASGLTKIGLSKGICITIQKALILQTCHIVRKFLN

SEQ ID NO: 24960 - protein, 1031 aa, Phanerotoma sp.
MNETQVGGSSDPPDPVPTPGPFLGSFSESNTCEICSRNFTTKAGCRLHQRKAHKAWYDAQQNTTQVKARWTDEERRLMARQEAALISQGSKFLNQDLAKYFPQRTSNSIQSQRSKPQYRALLREYMEQTVNNSRYLPPIPSTSADRSLSPLTRHEVITLVDDEDEDVSEAENRVVFVEHIQALPPSRSKGFNVDRLEAICSALHTWNTHRILEEVTLYLRETFPPSGSRPKKTGNKKKLQMSKKKARRMEYANIQKLWKKDRTACLRSILKDKKTTTEPKEDVMVPFWERLMTVKNSTTPGVEVPEDILTDLWIPILPAEIKKALPTNNSAPGPDGLTVRELKNIPVEILLKLFNIFILCGELPKHLLEARTTLIPKKDGASEPGEFKPITVPSVMVRTFHKVLANRMSNLMRLDTRQKAFRPIDGCSENIFLMDLALRHSQANFKPIFMASLDVAKAFDSVTHNTIRDTLLTAGVPNLMMKYIINCYSRSVTKISCGSWTSRTIIPTCGVKQGDPLSPMIFNLIMDRLFKKLPPEIGARIGSRTLNATGFADDLVIFASSAQGLQNLLDITTKYLADCGLNVNTSKSFTVSFKSVARQQKMVMDAKQLFQSNGLNLPALTRDDQWKYLGVPFSPEGRLISRPLDRLADDLKLLSSAPLKPQQRLFALRTVVLPALYHQLVLGLVNLQLLKKCDILVRKSIRKWLALPHDVPKQYFHADVKDGGLSVPSLRWVIPIQRLHRLKNLTLVEEGDLPQEWSSFLEIEKQRVQRRLESDGARIDTLSKYKHRMAYLLHRSNDGGPLKHSKDVSNQHHWITDGNLFVTGRDFVRMNSLRINTIPLRVRTSRGSIRDKHCRAGCQDAETLHHVLQICHRTHGARIKRHDALLTYLTNRLDSAYTVTKEPIFRRTETGLDTDLKPDLVIKLGSLAMVVDAQVNWERANLDQCHQSKIEKYRPLDQYIRSRFGVSNVAFTSLTLSSRGVWSRASFEDLKRLGLLAAKDAKVLSTRVLVGGLAEIGLFMKSTATRRRRRG

SEQ ID NO: 24961 - protein, 1183 aa, Apodemia ares
MHWSTELNEAIIRIYFEISELETNMTVHRKKLRDRIIEIHPSLQHLSEQRISDQRRAIMNNSMISKERIQQIRREIEMQLKLTHPHIHKEQQSHTDTQLNTLLSLQLDNSEKDQVPDATNTENIHFNNNVQFNETIIEIEEKNKWIKKIFEECFDVFNNTEPNTRPYIPKQKSSKKLSQIVQYINTDILPIYTDSNTDFGRLHNVLYCATWTAAKANGARINLDTSLQNTSHGRTKENAPKWQVRLEKKVEDLRQKIGRLTQYMRGNRNPNLNRHVQNILMQYKIHTLHEEPNSQLEHFLDTLKQKLTVISCRLKRYKACTLRKTQNAQFYNNEKTFYRKLKIVINNNQTQTSSHVQLQNSTAWKNDVNRFWSSIWENPKAHNTEATWIKEETTKYNSIELMGFDNIPIDVFQMVIKKLHNWKTPGTDKIHNYWIKKFCHIQPFLYKWINNFIMNPDSMPEYITNGITYMLPKDHQDLSNPAKYRPITCLQTIYKIITSCLTHLICAHVSKNNILSEQQKGCRKFSQGCKEQLVVDSVVLKRVQKEKKNLHTMYIDYKKAYDSIPHSWPLKILGIYKIHPTVISFLQKTMTKWNTRLRLSTSTETVETGTIKIQRGIFQGDALSPMWFCLALNPLSNLLNSSHAGYLIEYSKISTDLLTHKGQYYLSHLFYMDDIKLYAATQDNLYQLADITENFSLDICMEFGIDKCKINSTMKGQTKKYNYSLQSGQQINSLEYNEGYKYLGYSQSKQINYKEIKIQLRQEFKHRLNVIAHTHLISKNMIKAINTYAVPVLTYSFGIINWTKQELQNLQRIINTTLTKNRKHHPRSCIQRLTLPRKEGGRGIIDINNLHNRQITSLRAYFHQKASTLHTATVENDNKLTPLNLRDRSPQKNESLASKQTKLEAWAQKSLHGRHYNDLNLPYVDKAASNDWLRHGELFPETEGFILAIQDQVIETRNYKKHIIKIPNTIDLCRRCNSASETIQHITGSCKSIVQTDYKHRHDQVARIIHQKLALKYKFLPPRLIPYYKYNAQTVLENASHKLYYDRAILTDKTVHSNRPDITLIDKENKTAYLIDVTIPNTHNIQTSIAEKLTKYLELKNEVIRMWNLQKVTIVPIVLSTTGVIPKQLHQSLHILNLPKHLYISLQKAVILNTCRIVRKFLQTDQTEVDEIITPNSNNSHLA

SEQ ID NO: 24962 - protein, 1062 aa, Emesis brimo
MHCNNNVQFSEATIGTEEENQWIKKIFEECYDVFSNAEPNARPYIPKQKSSKKLSQIVQYINTCILPNYTDININFRKLHSVIYCAAWTAAKANGARINLDTSVLGTFQAKTKENVPKWQVRLEKKVEDLRRKIGRLTQYIRGNRNRNLNRHVQNILKQYKIHTLHEEPNTQLEHFLDTLKQKLIVISSRLKRYKACTLRKTQNAQFYNNEKTFYRRLKTMTDNNQTQTNNYVQSHNSTANRKQDLSRYWSSIWEDPKSHNTEATWIKDETARYNSIELMDFDNIPIDVFQTVIKNLHNWKTPGTDKIHNYWIKKFNHIQPYLYEWINNFIMNPDSMPQYITNGVTYMLPKDQQDMSNPTKYRPITCLQTIYKIITSCLTHLISAHISKNNILSEQQKGCRKFSQGCKEQLVIDSVVLRNVQKEKKNLHTMYIDYKKAYDSVPHSWLLKILEIYKIHPTVISFLQSTMTKWNTKLRLSTSTETVETDVINIQRGIFQGDSLSPMWFCLALNPLSNLLNSSYAGYLIKNPKKSTDLLTHNRQCYLSHLLYMDDIKLYADSQDNLYKLANITESFSLDICMEFGIDKCKINSVIKGQLQKYHYSLQSGQIINPLNNNDGYKYLGYSQSKEINSKEIKIQLRQEFKHRLNAIVHTHLNSKNIIKAINTYAIPILTYTFGILKWTTYELKNLQRIINTTLTKNRKHHPRSCVQRMTLSRKDGGRGIIDINNLHNKQITSLRTYFHYKAITSTLHTVIVEKDNKLTPLNLRDRLPQKNEALTSKQSKLEVWAQKSLHGRHYHDLNLPYVDKVASNDWLRRGELFPETEGFILAIQDQVIETKNYKKHIIRVPNTIDLCRRCKSASETIQHITGSCKSIAQTDYKHRHDQVASIIHQKLASKYKFLTPPHLPYYKYNAQTVLENKTHKLYYDRAILTDRTVHCNRPDITLLDKENKVAYLIDIAIPNTHNIQTSIAEKLTKYLELNIEISRMWNLQKVTIVPIILSTTGVIPKQLHQSLQILDLPKFLYISLQKAVILNTCRIVRKFLQTDQTDVDEIIPNLTNNHLA

SEQ ID NO: 24963 - protein, 1427 aa, Nymphidium onaeum
MSRLSDKTPCEGRNFIGQYHRGHPFLTNDPKTPILVFYVMSFRKYNLRPLPGDRRGAPGADAGCFSMRSIGGMGLNRRVSTNENITADITSPSSPISSSQSLFPSPNSSPPSYIQEQNSRSSTLSPPPVNVALMAHATTSVPTTGQRRARKKWTENENKFIWRTYLIVTKLESDTRGYLDNLYKNFVKEFPTVDVSKQRIGDQRRAIVKNKLLSQSILDEIKEEVSLYLNNTSVQELSTLTQPILSQSNKRMQWSNELNESVMRAYFEVTELETNMTIHRKKLREKFIELHPNLEHLSEQRISDQRRVIVNNRMISQERIAQIKMEVEIYLRAQGHQSQDRVGTHCTSTSSSQLTCIGISQDTNTNIDTQTQSIQNIEYRASASTKIKIKETFIHSLDIFKNSDPTTRPYIPRQKSSKKLSDIVNYLNSDILPMYVDLNTDFNTLQTVLYCAAWTAAKANGAKLNTETLSQNNTKHKTKKNIPRWQIRLEKKVDDLRSKIGRLTQYIRGNRNHNLNKQVQNILLQYKIHTSHEEPNSHLPQFLDTLKQKLAVVCSRLKRYKACTLRKTQNIQFSLNEKTFYRNLKNSTSNQNQDNTLNNQSYNITPKTEDFYNYWSILWGTPKTHNGDAAWIQDETDKYTHMVPMEFNNIPIEIFQAVITKLHNWKTPGSDNIHNYWIKKFSHIHPFLYNFINKFINEPHTLPDYITRGVTYMLPKDVKDLNNPAKYRPITCLQTLYKIITACLTRLIYSHSSINSILSEQQKGCRKFSQGCKEQLIIDSVVLKQVQKKKKNIHTMYIDYKKAYDSVPHSWLLKILEIYKINPTIISFLQRTMTNWTTTIRVVTATDTTETNAIKIQRGIFQGDALSPMWFCLAMNPLSNLLNSTDAGFIIDNSNILNNSLAFLNKCQLTHLLYMDDIKLYAEDRDELYQLATISEDFSRDVCMEFGIDKCKINSVRMGETDNYSFDLPSGQQIDSLNDSEGYKYLGYIQSSQIHYAEVKTRLRQEFTHRLNVISRTYLASKNITKAINTYAVPTLTYSFGIINWTKTELQNLQRLINVTLTKHRKHHPRSCTQRMTLPRKEGGRGLIDITNLHNKQITGLRKYFHYKATVSALHKATTDIDHKLTPLNLHDRTTQKNEKLTDRQTKQEIWAQKALHGRHYHDLNLTHVDKNASNDWLKRGELFPETEGFMIAIQDQVIETRNYQKHIIKLPNINDICRRCSSAPETIQHITGACKSIVQSDYKHRHDQVANIVHQRLASKYNFLSPPYLPYYKYSPETVLENTTHKLYFDRAILTDKTVHFNRPDITLIDKESKTAFLIDIAVPNTHNIQTSITEKLTKYLELKDEIIRMWKLRKVTIVPIVLSTTGVIPKQMHLSLKLLNLPEYLYSNLQKAVILNTCRIVRKFLQTEQTDTDNTITISNISHLA

SEQ ID NO: 24964 - protein, 1406 aa, Hypophylla argenissa
MSFKKYNLRSLPGVRRGAPGADAGCFSMRSIGGRVLNRRVSTNENATADSSLSSSISSTRSLFPSPSSSPHPFSLEHSERSSTSSPQSVDVALEANAINSVPTSGRICARKKWTENENKFIWRTYLTITKLEKNTRGYLDDLYQQFIQKFPDTNITKQRIGDQRRAIVKNQLLSQTTLNEIKDEVTAYLETILPVAEAQLTQSGKRMRWTNEINETIIRSYFEITDIETNMTAYRTKLRNRFIEIYPNLQHLSEQRISDQKRVIVKNSMVSQERIQQIRQEVEIQKNNSGSATHLGLNNPVQTQLVLTSSSLQPVHTNINQPKHSYEHQHLQRNISPIRDQDFSNYKAHDSDNTIITDSQLHNIQNIENMVQTEESSKIKAIFKKCLEKYKNIDPTRRPYIPKQKTCQKLSDVVRFIDTNILPFYTNSCTDFDTLQSVLYCAAWTAAKTNGARLNLETATHTNANYETDKTIPKWQGRLEKKVKDLRAKIGRLEQYIRGNRNLNLTRHVQNIFIQYKDHSSHEEPNTQLTHFLDTLKQKLAVVSSRLKRYKACTLRKTQNIQFSHNEKAFYRNIKDTTSNHTQNITPPQDNSTPREEDLHKYWSSLWENRKNHNNEASWIEDEVARHENTEVMAFENIPEHVFLAVIKKLHNWKTPGTDNIHNYWIKKFTYIHPYIYNHVNNFIKNPHTTPEYITTGITYMLPKDQQDPTNPSKYRPITCLQTIYKIITSCLTQAISIHIEKNNILSEQQKGCKKSSQGCKEQLIIDSVILKNVQKKKKNLHTMYIDYKKAYDSVPHSWLVKILEIYKINPTLISFLQKIMTQWTTRLRLKQGATSIETNIIKIQRGIFQGDALSPLWFCLALNPLSNLLNSSEAGYLIDYCEDLTNSFTHENHYCLSHLLYMDDIKLYAATQDKLHKLAKITEVFSMDICMEFGIDKCKVNSVEKGHIHKYHYEMLSGQQIDSLDIDEGYKYLGYHQSNQIHYKEVKLHLRQQFKHRLNVIARTYLTSKNIVKAINTYAVPILTYSFGVIHWTKTELQNCQRLINTTLTKNRKHHPRSCIQRLTLPRKEGGRGLIDIVNLHNKQITNLRKYFHSKTLTSTLHNAVVENDHKLTPLNLQDSLTQNNEVQTDRQTKMEAWAQKSLHGRHYQDLNLPSVDKNASNDWLSRGELFPETEGFMLAIQDQVIETRNYQKHIIKVPNIIDTCRRCNSASETIQHVTGACKSIVQTDYKHRHDQVANIIHQKLASKYNFISSPLTPYYKYIPDTILENASHKLYFDRAILTDKTVHFNRPDITLVDKRNKTAFLIDIAIPNTHNIQATITEKLTKYLDLKDEIMRMWNLQNVTIVPIVLSTTGVISKQLQLSLKMLDLPRYLYINLQKAVVLNTCRIVRKFLQNDQTRIDLTT

SEQ ID NO: 24965 - protein, 1389 aa, Sarota myrtea
MRLRNRVIPQAGTCEGESRPKSFRLGSPTYSGGGSVSLNTAQSRTVAANLPSSPPSHINLTTYSSSSPISSTQSLFPSPNSSLHQFELEPSSSSRSSTLSPQSVDVALAANTINSVPTTGRNRARKKWTENENMFIWRTYLIITKLETNTHSYLDNLYKQFVERFPNIKVSKQRIGDQRRAIVHNRLLSQLTLDEIRDEVAILLKDKISLPQTSTLTQSGKRMRWSSELNESIMRIYFEITELETNMTVHRKKLRDRFIEVYPDLQHLSEQRISDQRRAIVNNNMMPQEKILQIRQEVEKQLKHPNTTHTEFTTTSSSIPVIDTDVRQENQVLVNDNSFNCQPHNKQSSVMETSKKADIRKTFEKCLERYKNTDPTTRSYIPKQKQSRKLSEIVHYINTDILPLHTNSETDFDQLQSVLYCAAWTAAKANGAKLNLAITDVHDRVAKSGPKWQLRLEKKVNLRSKIRRLTQYMRGNSNYNLNKQVQNILEQYKIHTLHEEPNAQLTHFLDTLKQKLAVTSSRLKRYKACTLRKNQNTQFYNNEKTFYRKLSNTTTNQAQNNLTSSQIHNTAPRKEDLHRYWSSLWDNSTHHNNEAIWIENEIAQYDKTVTMDFQNISVDVFQTVIKKLHNWKAPGTDNIHNYWIKKFTYIHPFLYNHINNFIKDPQSMPDYITTGITYMLPKDNQDLTNPSKYRPITCLQTIYKIITSCLTHLIYSHIDNNKILSEQQKGCRKFSQGCKEQLIIDTIVLKNVQKKKKDLHTMYIDYKKAYDSVPHSWLQKILEIYKINPIVITFLQQTMSKWSTQLRLSTTTETIQTDMIKVRRGIFQGDALSPIWFCLALNPLSNLLNTSLSGCQEYPDSLSDLLTHNSQYYLSHLLYMDDIKLYAGTRGDLHHLVETTEKFSSDICMEFGIDKCKINSINRGQIIKYCYEMQSGQRIDSLDGDEGYKYLGYFQSRQIHYKDIKKNLRKQFKHRLNTITRTYLTSKNIIKAINTYAVPILTYSFGVINWSKSELQNLQRVINVTLTKNRKHHPRSCVQRLTLPRREGGRGLIDITNLHNKQIATLRRYFYYKAVTSTLHKATVENDKKLTPLNLKDRTTQKNEEQVSKQTKMQAWAQKSLHGRHYRDLGQPNVNKTASNDWLSRGEFFPETEGFMLAIQDQVIETRNYQKHIIKISNTIDLCRRCNSASETIQHITGSCRSIAQTDYKHRHDQVASIIHQKLALKYNFITSPLLPYYKYNPEVVLENACYKLYFDRAILTDKTVHFNRPDITVVNKEQKTAFLIDIAIPNTHNLHTSITEKLTKYLDLKEEIMRLWNLQKVVIVPIVLSTTGVIPKQLQQSLKTLDLPTYLYISLQKAVILNTCRIVRKFLQTATDTTTNDITLGLGP

SEQ ID NO: 24966 - protein, 950 aa, Parnassius smintheus
MDSSRRPQNRRCPTAEQSRFMEEIDSVNSPEELEEVARRTMSFLGRPVHTEHDSGRRLQRRRTDNRQPARAVDRMSEAAHIQGKYRKNRKKTVQQVLNGPARYCEISKSSIEQYFTEMAAPRNGDQVWPDVFNQDDPTSQSELELIKVFERKEVIRKLKSKSNTSPGPDGLTYGDLRKADPGAFVLTALFNAVWRLEVVPGCWKDSNTILLHEKGPESDISNWRPIAMGDTCPKLFAAIVADRVKTWAVANRRYSTSQKGFLPYEGCYEHNFVLQETIQQARRDKGEVVVAWLDLASAFDSVPHSSIHRALEHHGMPVKVRKLIDSLYKNTITKVRTSEGFTDPIKLQSGVKQGCPLSPHIFNLTLEVVIRAMESTGEGIKIRNKCVTTLAYADDIAILADSPEGMRRLLNAAEEGARSVGLVFNPAKCATLHMKCDCESAVQDTVFNIQGDPMKSMGPNDCYEHLGIPTGFDIRQTPTSALKRLIADVKKIDQSLLAPWQKLDAVGTFILPRLYFIMEGADVEKEYMREIDRNVKNFAKRWLNLPQRASSELVFLPPSMGGGGLMPLSDLLDLYTVTHAFKMLCATDDLVSVLAREGLLETVSERLRKVPSNIDMARYLSGDLDLPRSSSRSSFWTKARSAARRIQNKFSIRWIWHREEEEFLIQCGNGAAGRITPSLRHNLFKKMRLQLVQYYASKLQAKKDQGKVFEVTRKTGFSNHFLRSGRNIRFCDWRFVHRARLGVLPLNATKRWQVDIDKRCRRCGWEQETIPHVLNHCGVHSAARQLRHNNIQSRLVKALRCPGLVSTNQTVEGTHGIAALLRPDIVVRDEINKEIKIVDVTVPFENRSAAFRAARMEKITKYSCLAEQLRARGYRVRVNAFVVGSLGGWDENNQRVLDFFNIGRFYAGMMRRFMISDTIRWSRDIYVEHVSGIRQYTVQHDLDRSINVRS

SEQ ID NO: 24967 - protein, 1184 aa, Hypermnestra helios
MGECPKVVAEGHKVVILLPIEEREELLCPLCTRRGRYVGARKIENLYRHCKEHHPEKEIHYRCWRCGYMAPEGKRYPRKIVSQHCTKCVPDHRMSPRRTERERRNRIRRELGVADNSSPVNPLPYSLSPPQVAGSADPEPINNQRISENTLPAPSRPITTTSPLFSDTESANPGGHNLDTTPHRRAVPRNAETPEGIIRISEQAQTSEEPEADAGEPLASALNFPNNQNNAIQVNERLENADRTGRRSQNLRYPTIEQNRYVEEIGLVSNPEELEDVARRVMIFLSRLVNRVHDIEGRPRLRRNLADSNRPARASDRMSEAAYIQGKYRKNRKVAVQQILQGSAKYCEIPKSAIEEYYREMAAPRDGDQVWPEVFDHDEPTANSDSELLRDFERKEVMKKLKSKSNTSPGPDGLTYGDLRRADPGAFVLTALFNAVWRLEAVPRCWKDSNTILIYKKGPESDMSNWRPIAMGDTCPKLFAAIVADRVRNWAMTNRRFSTSQKGFLPYEGCYEHNFVLQEIIQRARRDKGEVVVAWLDLASAFNSVPHSSIRRALEQHGMPAKARNLIDSLYKDMRTKVRTSEGFTDPITMYAGVRQGCPLSPHIFNLTLEVVIRAMESTGEGFSIRHKRIATLAYADDIVVLADSPEGMRRLLNAAERGARSVGFTFNPAKCASLHMRSDCETVVLDTIFNIQGEPMKSLGPNDYYEHLGIPTGVEIKQTPTNALNKLLADVRKIDQSLLAPWQKLDAVGTFILPRVYFIMQGADVEKEYLREIDRNVKNFAKKWLNLPQRASSELVFLPPSMGGGGLIPLSDLFDLYTVTHAFKMLCATDDLVSELAMEGLKETVSERLRKAPSNIDMARYLSGDLDLPRSTSRSTFWTKARSAARRIQTKINMKWIWHRGEEEFRIQCGNGAAGTITATLKQFLFKKMRLQLVQYYAGKLQAKKDQGKVFEVTRKTGFSNHFLRNGRNTRFCDWRFIHRARLGVLPLNATKRWQTDIDKRCRRCGQELETIPHVLNHCGVHSAARQLRHNSVQNRLVKALKCPGLVSINKTVEGTRGTAASLRPDIVVRDETNKEIKIVDVAIPFENRSAAFRTARMEKIRKYSCLSEQLTAQGYRVRVSAFIVGSLGGWDENNQRVLEFLNIGRFYAGMMRRFMISDTIRWSRDIYVEHVSGTRQYTVQVV

SEQ ID NO: 24968 - protein, 1186 aa, Parnassius honrathi
MAEPLKVVVEGQKVVILLPIDAHEELLCPICTRRGRYIGARKIENLYRHCEEHHSEKEIHYRCWRCGYMAPEGKRYPRKIVSQHCSECVPDHGVSPRRTERERRNRIRRDLGVTNNSSPQYLSPHQPSSPPGVFGSVDLEINNQRILGTPMRIDTQPENMTPSLITDIDFPNSGETNQNTASHKHAMSRNNVTPESVPRVSEQPQALEEPAADGVNRESSSILNLSGANELNLRVRRNVENSSDNIVNTDSSRRPQNRRCPTAEQRRLVEEIDSVSSPEELEEVARRTMSFLGRLVHTEHDFGRRLQRHRTDNRQPARALSRMSEAAYIQGKYRKNRKKTVQQVLNGPARFCEISKSSIEQHFTEMAAPRNGHRVWPDVFNHDDPTSQSELELIKVFERKEVARKLKSKSNTSPGPDGLTYGDLGKADPGAFVLTALFNAVWRLEVVPGCWKDSNTILLHKKGPESDVSNWRPIAMGDTCPKLFAAIVADRVKTWAIANRRYSTSQKGFLPYEGCYEHNFVLQETIQQAKRNKGEVVVAWLDLASAFDSVPHSSIHRALEHHGMPEKVRKLIDSLYKDTITKVRTSEGFTDPIKLQSGVKQGCPLSPHIFNLTLEVVIRAMESTGEGIKIRNKCVTTLAYADDIAILADSPEGMRRLLNVAEEGARSVGLVFNPTKCATLHMKCDCESAVQDTVFNIQGEPMKSMGPNDCYEHLGISTGFEIRQTPTSALKKLIADVKKIEQSLLAPWQKLDAVGTFILPRLYFIMQGADVEKEYLREIDRNIKNFAKRWLNLPQRASSELVFLPPSMGGGGLMPLSDLLDLHTVTHAFKMLCATDDLVSIVAREGLLETVSERLRKVPSNIDMARYLSGDLDLPRSSSRSSFWTKARSAARRIQNKIGIRWIWHREEEEFQIQCGNGAAGRITPPLKHNLFKRMRLQLVQYYASKLQAKKDQGRVFEVTRKTGFSNHFLRSGRNTRFCDWRFVHRARLGVLPLNATKRWQVDIDKRCRRCGREQETIPHVLNHCGVHSAARQLRHNNIQSRLIKALKCPGLVSTNQTVEGTHGTAALLRPDIVVRDEINKEIKIVDVTVPFENRSAAFRAARMEKITKYSCLAEQLRARGYRVRVNAFVVGSLGGWDENNQRVLDFFNIGRFYAGMMRRFMISDTIRWSRDIYVEHVSGIRQYTV

SEQ ID NO: 24969 - protein, 992 aa, Graphium doson
MSVSLTVGSENEAVPPFNAAPPSVPSIEPATLRMDPSSSPRTTTAAQQPDLQTSQSLHHNPRYRTAEQERLVGEISAVNDPEGLDTVACRAMQYLGRLKTTENCNINTRPGIRRVHIDGDRRYEDQTRLREATAIQRRYRRNKKRAMQQILQGSATVCRINKQTLTDNFREMAGPRSGEAIWPDVFNQNDPTNASNERLLEKFGRREILRKLKSRCNTSPGPDGLTYLDLKKADPGAYVITALFNAVWQLEAIPACWKDSNTILLYKKGPESSVASWRPIALGDTCPKLFAAVVADRVKNWAVANNRYSSSQKGFLHYEGCYEHNFVLQEVIRHAKSNKREAVVAWLDLTNAFNSVPHSSINRALVQHGMPLKLRKIVGSLYNGTQTRIRTSEGFTEPITLQAGVKQGCPLSPHIFNLTIEVIIREMEKTGLGYCVNDKRATTLTYADDIAVLAETPEAMCRLLAAAERGARSVGLKFNPAKCATLHINAGRDDRVQQTDFYIQEERVKALSPDEYYEHLGIPTGFEIKQTPVLTLAELLSDAKKVDQSLLAPWQKLDAVATFILPRIYFLLQGADIEKEYLKELDRQIKRMAKRWLNLPQRASSELVFLPPSQGGGGLMPLTDLYDLYTVTHAFKMLSAEDDLVSGLAMGGLRDTVSERLRKEPSHIDLARYLSGDLDIPRSTSRSTFWTKARSAGRRLRTKIDLQWLWNEEKGELHLKCGHRVSGIITPQRRCHPFKTLRLHVVQYYAEQLKAKKDQGKVFEVTSKSRFSNHFLRNGRNTRFCDWRFIHRARLGVLPLNATKRWQKDIDKRCRRCGLEPETIPHVLNHCRPHAASRQARHNNIQDRLVKAIKCPGTVRVNQMVEGSRGSEAALRPDIVVRDETNKDIKIVDVTIPFENRPAAFRLARQDKINKYSPLAEQLRARGYHVTIHAFIVGSLGAWDERNERVLESLNVGRSYAGMMRRFMVSDTVKWSRDIYVEHVSGIRQYLT

SEQ ID NO: 24970 - protein, 1168 aa, Protographium marcellus
MATDAKVVVEGNDVLILLPINADEELICPLCSRRGRYVGARKIENLYRHCKEHHAEKRILYRCWKCGYMAPDGKRYPRKVVSQHCNECVSEVVNSPYRTDRNRRIRIRRELGGGADAATHQHLNTPRQYSSNGTAHEEEEPSPVATGLDNAEEPTTPSLLRLHSETEELVRNPVQVRSERHNEETPLVNTVPSPGGPPETRNQGNTQSFQAVEISSALPSIQQGRTSGSQNTNTPRGQRFRTAEQERHVREICAVTDREELDAVAYRAMLYLGRLKQADGCGNLQPRVRRERVEGGAPEHEGDRLREATNIQKRYRRNRKRAIQQILRGPMRLCPIDKRSIEEHFGGMASQQAGESVWPDVFNQSEPTNASDAQLLKNFERREILTKLKTRPNTSPGPDGLTYADLRKADPGAHVITALFNAVWRLETIPVCWKNSNTILLYKKGTEHDISNWRPIAMGDTCPKLFAAILADRVKNWAVANGRYSKSQKGFLNYEGCYEHNYVLQEVIQHAKVNKREVAVAWLDLSNAFNSVPHCSINRALEQHGMPSKAINVVRSLYDEAKTKIRTSEGLTNPITLKAGVKQGCPLSPHIFNLTLEVILREMERTGEGYSVRNSRVTTLTYADDIAVLADSAESMRRLLNAAEGGARAVGLRFNPAKCASLHIVPQCEDPVQHTTFCIQGGRISALGPNEYYEHLGIPTGFEVKQTPTCTLKELLSDVKKIDQSLLAPWQKLDAVGTFILPRVYFILQGAEIDKEYLTEVDKNIKRIAKKWLNLPQRASSEVAFLPPSLGGSGLMPLSDLYDLYTVTHAFKMLSAEDGLVNGLAMEGLIDTVSERLRKRASNIDIARYLSGDLDLPRSTTCSTFWTKARSAVRRLRAKFDLQWIWHRERSEFHIKCGNRLSEMIGPQTKRDLFRKLRLQVVQYYADKLRAKKDQGKVFEVTSKSRVSNHFLRNGRNTRFCDWRFVHRARLGVLPLNATKRWQKDVDTRCRRCGLEPETIPHVLNHCHPHAAAIQARHNTIQNRLVKAIKCPGQVIVNQTVDGTHGTAATLRPDIVVRDETNKEMTIVDVTVPFENRQVSFRVARQEKIRKYNPLAEQLRARGYHVSVHAFVVGSLGGWDEGNERVLDALSVGRSYAGMMRRFMISDTVRWSRDIYVEHVSGTRQYPL

SEQ ID NO: 24971 - protein, 1184 aa, Hypermnestra helios
MGECPKVVAEGNKVVILLPIEEREELLCPLCTRRGRYVGARKIENLYRHCKEHHPEKEIHYRCWRCGYMAPEGKRYPRKIVSQHCTKCVPDHRMSPRRTERERRNRIRRELGVADNSSPVNPLPYSLSPPQVAESADPEAINNQRISENTLPAPSRPITTTSPLFSDTESANPGGHNLDTTPHRRAVPRNAETPEGIIRISEQAQTSEEPEADAREPLVSALNFPNNQNNAIQVNERLENADRTGRRSQNLRYPTIEQNRYVEEIGLVSNPEELEDVARRVMIFLSRLVNRVHDIEGRPRLRRNLADSNRPARAPDRMSEAAHIQRKYRKNRKVAVQQILQGSAKYCEIPKSAIEEHYREMAAPRDGDQVWPEVFDHDEPTANSDSELLRDFERKEVMKKLKSKSNTSPGPDGLTYGDLRRADPGAFVLTALFNAVWRLEAVPRCWKDSNTILIYKKGPESDMSNWRPIAMGDTCPKLFAAIVADRVRNWAMTNRRFSTSQKGFLPYEGCYEHNFVLQEIIQRARRDKGEVVVAWLDLASAFNSVPHSSIRRALEQHGMPAKARNLIDSLYKDMRTKVRTSEGFTDPITMYAGVRQGCPLSPHIFNLTLEVVIRAMESTGEGFSIRHKRIATLAYADDIVVLADSPEGMRRLLNAAERGARSVGLTFNPAKCASLHMRSDCETVVLDTIFNIQGEPMKSLGPNDYYEHLGIPTGVEIKQTPTNALNKLLADVRKIDQSLLAPWQKLDAVGTFILPRVYFIMQGADVEKEYLREIDRNVKNFAKKWLNLPQRASSELVFLPPSMGGGGLIPLSDLFDLYTVTHAFKMLCATDDLVSELAMEGLKETVSERLRKAPSNIDMARYLSGDLDLPRSTSRSTFWTKARSAARRIQTKINMKWIWHRGEEEFRIQCGNGAAGNITATLKQFLFKKMRLQLVQYYAGKLQAKKDQGKVFEVTRKTGFSNHFLRNGRNTRFCDWRFIHRARLGVLPLNATKRWQTDIDKRCRRCGQELETIPHVLNHCGVHSAARQLRHNSVQNRLVKALKCPGLVSINKTVEGTRGTAASLRPDIVVRDETNKEIKIVDVAIPFENRSAAFRTARMEKIRKYSCLSEQLTAQGYRVRVSAFIVGSLGGWDENNQRVLEFLNIGRFYAGMMRRFMISDTIRWSRDIYVEHVSGTRQYTVQVV

SEQ ID NO: 24972 - protein, 1421 aa, Astraptes enotrus
MTNGALVFRNYAMRLRSRQLPQAGTREGESRPGPSGSGCPTYSGGGTASHKTIQSRTVVVDNSSHIISHPSSPISSTHSLFPSPSSSPFSYRNQSSPVTSNTLTPVLNEFAQEAYAKSVCTTEHLLRGDVVQDAIEAEVPVPMSNQSRKRNKWSKDMNEYILRTYFQITKLETENKNSYLPLLYTKFSVKFPHMHVSRQRVGDQRRAIIRNKLLKQQEIDNIYAEIQAEFRNEKITINQNQNALSGQRMRWTSEHNESIIRSYLKITKLETDMTAYRTLLHHDFITLFPHLAHITVQRIADQRRVITNNQLISKERIEAIKKEIAAELQMSHNIELNYNSTNLSELNKSSEINSNETFLNNIDVNCLGHQDQLEPSSNVRNFEIDQIFQETLTYFTGIDPTKRQHIPKQKSSKKIASIICYINKTILPENLTKDTTFDTFQTVIYSAAWTAAKINGAKIYIPSRDNRYQNRSNRKPKWQIRLEEKVKDLRIKIGRLTQFMNGNRSKKLQQHINYIIETYKLHTIHEEANTQLSHFLDTLKQKLTVVSSRLKRYKTCTFRKTQNKHFITNEKQFYRNLKNIGNDEIPNNNFTNIPHKQITPAPKDLYNFWSSIWDNEVNHKSDAEWIREEKLRNITTLEMEFQEISVETLKNVLNRLQNWKAPGSDCIQNFWYKKFTHAHSYLLKYINNFIQNPQLLPKYIMAGTTYMISKDTTDHTNPAKYRPITCLQTIYKIITSCLADSIYEHLNTNNILTEEQKGCRKLSQGCKEQLTIDAVIMKQVQENKKDLYSMYVDYQKAYDSIPHSWLIEVLHIYKIHPQIISFLCNVMGNWTTRLKLTTTNGTTETPSINIKRGIFQGDALSPLWFCLALNPLSKMLSLTGTGYMLKYLDSESNDQISVHSSTSEIRINHLLYMDDIKLYADTKDDLHRLANITEHFSDDIHMQFGIEKCKLNSVQAGKIQQHSYQMDSGVHIDPLDQNSGYKYLGYIQSKFIHHKEIKSTLTTQFKHRLNIILKSQLNSKFIVKAVNTFAIPILTYSFGVINWTKTELKSLQRNINTSLTKHRKHHPRSCVQRMILPRKEGGRGFIEIINLHNKQVRNLRSYFHDKTITSDLHKAIVQNDIKLTPLNLSERSIQKNQQLTDIHTKILEWTQKSLHGRHRHDLCQPNVDKIASNEWLRRGDLFPETEGFIIAIQDQVIETRNYQKYIMKSPIPTDLCRRCSSSSETIQHITGACKAIVQTDYKHRHDQVAKIVHQKLAIKHDLISQPLKPYYEYNAEAILDNKTHKLYFDRAILTDKTIHYNRPDITLVDKVNKVAYIIDIAIPNSHNVQNTISEKLSKYADLKDEVTRMWQLRKAVIVPIVLSTTGIIPTQLKQSLNTLHLPVHTFASLQKAVILNTCRIVRKFLQVDKDSNTVESVAAIS

SEQ ID NO: 24973 - protein, 1417 aa, Chioides albofasciatus
MTNGALVFRNYAMRLRSRQIPQAGTREGESRPGPSGSGCPTYSGGGTASHMTAQSRTVVVDNSSNIISHTSSPISSTESLFLSPSSSPYSYQTQSPSSRSNTLTPVPSECAHEPDGIAVRTTECTLRGNVVQKAIHAEVSVPISDISRKRNKWSKDMNEYILRTYFQITKLETENKNCYLPLLHTKFSDKFPHMKVNRQRVGDQRRAIIRNKLLKQEEIDKIHAEVQAEFTDGKIVTTQSQNISKGQRMRWTSEHNEAIIRSYWKITKLETDMTAYRTLLHNDFITLFPHLAYISVQRIADQRRVITNNKLISEERLQAIKNEVISELQISQTIALNYNSNNLSETNINSEINSNETFLDNIDINCLEHQDEVELSSNVRNVDIDNIFQETLTYFTGTDPTKRQKIPKQKSSKKLAKIIAYINNILLPENLSETTSFETFQTVMYSAAWTASKSNGAKISIPTKDIRYQNRIRRKPKWQVRLEEKVNDLRRKIARLTQFIQGNRSRKLKQHIDYIIKTYKLHSIHEEENTQLSHFLDTLKQKLIVTSSRLKRYKMCTLRKTQNKQFITNEKQFYRGLRNTGNNETSSHDATNIPYEHIAPASKDLYDFWSSIWDNEVTHKADAEWIKDEKLRNSTIGEMEFRVISVETLTNVLNKLQNWKAPGSDCIQNFWYKKFTRIHPYLLKYINNFIQNPQLLPKYIMAGTTYLIPKDTTDQMNPAKFRPITCLQTFYKIITSCLAYNIYEHLNTNNILTEEQKGCRKLSQGCKEQLTIDSVIMKQVQAKKKDLYSMYIDYQKAYDSVPHSWLIEVLRIYKIHPQIISFLSDIMTKWTTRLKLITTDGITETPLINIKRGIYQGDSLSPLWFCLALNPLSKILNLTGTGYVLKYMDSRPNDQTSAQKIRVNHLLYMDDIKLYADTIDDLHRLANITENFSHDIHMQFGIEKCKINSVQAGKTQLIRYKMESGENIDPLDQTSGYKYLGYIQSKSIHHKEIKSMLTTQFKHRINVILKSQLNSKNIVKAVNTFAIPILTYSFGIINWTKTELKSLQRKINTSLTKHRKHHPRSCTQRMTLPRKEGGRGLIDIINLHNNQVKNLRIYFHDKTVTSDLHKAIVQNDIKLTPLNLCDRSIQKNEELTDIRTKILEWTQKSLHGRHRNDLCQTNVDKIASNEWLRRGELFPETEGFLIAIQDQVIETRNYQKYIMKSPIPTDLCRRCNSSSETIQHITGACKAIVQTDYKHRHDQVAKIIHQKLAIKHNLISQPLKPYYEYSPEVILDNKTHKLYFDRAILTDKTIHYNRPDITFIDKVNKTAYIIDIAIPNSHNVQNTIAEKIGKYTDLKDEVTRMWQLRKVVIVPIVISTTGIIPTQLKQSLSTLNLPSYTYITLQKAVILNTCRIVRKFLQVEKDFNIADSITTTI

SEQ ID NO: 24974 - protein, 1396 aa, Epargyreus spanna
MRLRNRQIPQAGTREGESRPGPSGSGCPTYSGGGTASHMTAQSRTAVVDNSSDVISHPSSPISSTQSLFPSPSSSPYSYQTQSSSSSSRSNTLTLVSSECAHERNGKSVRTTECILRGNVVQGAIHAEEPVPISNVSRKRNKWSKDMNEYILRTYFQITKLETENKNSYLPLLYTKFSDKFPHMKVSRQRVGDQRRAIIRNKLLKQHEIDNIYAEVQSEFTNEIHTTHQSQNILTGQRMRWTSEHNESIIRSYLKITKLETDMTAYRTLLHHDFITKFPHLAHINVQRIADQRRVITNNQLISEERLEAIKREITSELQISQKTALNCNNIILSETDINSEINRNETFLDNIDVNYLEHHDQLEQSSEERNYDIDKTFQETFTYFTGTDPTKRQHIPKQKSSKKLANIISYINTTLLPENLNEVTTFETFQTVIYSAAWTASKCNGSKISIPSRDNRYRNRSSRKPKWQIRLEEKVKDLRRKIGRLTQFIGGNKSRKLKQHIDYIIKPYKLHSVHEEENTQLSHFLDTLKQKLIVASSRLKRYKICTLRKTQNKHFITNEKQFYRGLRNTGNNVTSSHNTANILHEQITPTSKDLYDYWSSIWDNEVTHKEDAEWIKEEKVRNSTIGEMEFRAISVETLTNVLNKLQNWKAPGSDCVQNFWYKKFTHTHSYLLKYINNFIQNPQLLPKYIIAGTTYMLPKDTTDQMNPSKYRPITCLQTFYKIITSCLADNIYEHINTNNILTEEQKGCRKLSQGCKEQLTIDSVIMKQVQEKKKDLYSMYVDYQKAYDSVPHSWLIEVSCIYKIHPQIISFLSNIMKNWTTRLKLTTTNGITETPLININRGIYQGDALSPLWFCLALNPLSKILSSSGTGYTLKYLDSEPNAQTSVQNVRINHLLYMDDIKLYADTKEDLHRLANITEKFSHDIHMKFGIEKCKVNSVQAGNTQQHTYQMESGEYIDPLDQTRGYKYLRYIQSKFIHHKEIKSMLTTQFKHRMNTILKSQLNSKNIVKAVNTFAIPILTYSFGIINWTKTELKSLQRIINTSLTKHRKHHPRSCVQRMTLPRKEGGRGFIDISNLHNNQVKNLRTYFHGKIVTSNLHKAIVQNDIKLTPLNLSDRSKQKNEELTDVQTKIFEWTQKSLHGRHRHDLCQTNVDRIASNEWLRRGDLFPETEGFIIAIQDQVIETRNYQKHIMKSPIPTDLCRRCSSSSETIQHITGACKAIVQTDYKHRHDQIAKIIHQRLAIKHNLIAQSFKPYYEYSPEVILDNRTHKLYFDRAILTDKTIHYNRPDITLIDKVNKTAYIIDIAIPNSHNVQNTIAEKIGKYTDLKDEVTRMWQLRKAVIVPIVISTTGIIPTQLKQSLSTLNLPAYTYINLQKAVILNTCRIVRKFLQVEKE

SEQ ID NO: 24975 - protein, 1411 aa, Epargyreus clarus
MTNGALVVRTYAMRLRSRQIPQAGTREGESRPGPSGSGCPTYSGGGNASHMTALSRTAVVDNSSHIISHPSSPISSTQSLFPSPSSSPCSYQTQSSSSLTPVSSECTHERNGKSVRTTERILRGNVVQGAIHAEEPVPISNVSRKRNKWSKDMNEYILRTYLQITKLETDNKNSYLPLLYTKFSDKYPHMKVSRQRVGDQRRAIIRNKLLKQHEIDNIYAEVQSEFTNEIHTTHTTHQSQNILTGQRMRWTSEHNESIIRSYLKITKLETDMTAYRTLLHHDFITKFPHLAHITVQRIADQRRVITNNQLISEERLEAIKREIISELQISQKTALNCNSINLSETDINSEINRNETFLDNIDVNYLEHHDQLEQSSEERNYEIDKTFQETLTYFTGTDPTKRQHIPKQKSSKKLANIISYINTTLLPENLNEVTNFETFQTVIYSAAWTASKSNGSKISIPSRDNRYRNRSSRKPKWQIRLEEKVKDLRRKIGRLTQFIAGNKSRKLKQHIDYIIKTYKLHSVHEEENTQLSHFLDTLKQKLIVASSRLKRYKICTLRKTQNKHFITNEKQFYRGLRNTGNNETSSHNTANILHEQITPTSKDLYDYWSSIWDNEVTHKEDAGWIKEEKVRNSTIGEMEFRVISVETLTNVLNKLQNWKAPGSDCIQNFWYKKFTHTHSYLLKYINNFIQNPQLLPKYIMAGTTYMLPKDTTDQMNPSKYRPITCLQTFYKIITSCLADNIYEHINTNNILTEEQKGCRKLSQGCKEQLTIDSVIMKQVQEKKKDLYSMYVDYQKAYDSVPHSWLIEVLRIYKIHPQIISFLSNIMKNWTTRLKLTTTNGITETPLINIKRGIYQGDALSPLWFCLALNPLSKILSLSGTGYTLKYLDSDPNAQTSAQNVRINHLLYMDDIKLYADTKDDLHRLANITENFSHDIHMKFGIEKCKVNSVQAGNTQQLTYQMESGEYIDPLDQTRGYKYLGYIQSKFIHHKEIKSMLTMQFKHRINTILKSQLNSKNIVKAVNTFAIPILTYSFGIINWTKTELKSLQRIINTSLTKHRKHHPRSCVQRMTLPRKEGGRGFIDISNLHNNQVKNLRTYFHGKIVTSNLHKAIVQNDIKLTPLNLSDRSKQKNEELTDIQTKIFEWTQKSLHGRHRHDLCQTNVDRIASNEWLRRGDLFPETEGFIIAIQDQVIETRNYQKHIMKSPIPTDICRRCSSSSETIQHITGACKAIVQTDYKHRHDQIAKIIHQRLAIKHNLIAQPFKPYYEYSPEVILDNKTHKLYFDRAILTDKTIHYNRPDITLIDKVNKTAYIIDIAVPNSHNVQNTIAEKISKYTDLKDEVTRMWQLRKAVIVPIVISTTGIIPTQLKQSLSTLNLPAYTYISLQKAVILNTCRIVRKFLQVEKDSITTTI

SEQ ID NO: 24976 - protein, 1411 aa, Epargyreus clarus
MTNGALVVRTYAMRLRSRQIPQAGTREGESRPGPSGSGCPTYSGGGNASHMTAQSRTAVVDNSSHIISHPSSPISSTQSLFPSPCSSPCSYQTQSSSSLTPVSSECAHERNGKSVRTTERILRGNVVQGAIHAEEPVPISNVSRKRNKWSKDMNEYILRTYLQITKLETENKNSYLPLLYTKFSDKYPHMKVSRQRVGDQRRAIIRNKLLKQHEIDNIYAEVQSEFTNEIHTTHTTHQSQNILTGQRMRWTSEHNESIIRSYLKITKLETDMTAYRTLLHHDFITKFPHLAHITVQRIADQRRIITNNQLISEERLEAIKREIISELQTSQKTALNCNSINLSETDINSEINRNETFLDNIDVNYLGHHDQLEQSSEERNYEIDKTFQETLTYFTGTDPTKRQHIPKQKSSKKLANIISYINTTLLPENLNEVTNFETFQTVIYSAAWTASKSNGSKISIPSRDNRYRNRSSRKPKWQIRLEEKVKDLRRKIGRLTQFIAGNKSRKLKQHIDYIIKTYKLHSVHEEENTQLSHFLDTLKQKLIVASSRLKRYKICTLRKTQNKHFITNEKQFYRGLRNTGNNETSSHNTANILHEQITPTSKDLYDYWSSIWDNEVTHKEDAGWIKEEKVRNSTIGEMEFRVISVETLTNVLNKLQNWKAPGSDCIQNFWYKKFTHTHSYLLKYINNFIQNPQLLPKYIMAGTTYVLPKDTTDQMNPSKYRPITCLQTFYKIITSCLADNIYEHINTNNILTEEQKGCRKLSQGCKEQLTIDSVIMKQVQEKKKDLYSMYVDYQKAYDSVPHSWLIEVLRIYKIHPQIITFLSNIMKNWTTRLKLTTTNGITETPLINIKRGIYQGDALSPLWFCLVLNPLSKILSLSGTGYTLKYLDSEPNAQTSAQNVRINHLLYMDDIKLYADTKDDLHRLANITENFSHDIHMKFGIEKCKVNSVQAGNTQQLTYQMESGEYIDPLDQTRGYKYLGYIQSKFIHHKEIKSMLTMQFKHRMNTILKSQLNSKNIVKAVNTFAIPILTYSFGIINWTKTELKSLQRIINTSLTKHRKHHPRSCVQRMTLPRKEGGRGFIDISNLHNNQVKNLRTYFHGKIVTSNLHKAIVQNDIKLTPLNLSDRSKQKNEELTDIQTKIVEWTQKSLHGRHRHDLCQTNVDRIASNEWLRRGDLFPETEGFIIAIQDQVIETRNYQKHIMKSPIPTDICRRCSSSTETIQHITGACKAIVQTDYKHRHDQIAKIIHQRLAIKHNLIAQPLKPYYEYSPEVILDNKTHKLYFDRAILTDKTIHYNRPDITLIDKVNKTAYIIDIAVPNSHNVQNTIAEKISKYTDLKDEVTRMWQLRKAVIVPIVISTTGIIPTQLKQSLSTLNLPAYTYISLQKAVILNTCRIVRKILQVEKDSITTTI

SEQ ID NO: 24977 - protein, 981 aa, Epargyreus clarus
MRLQILKLFKLLYIVQRGQHQRATGPKLAYRLEDNRYRNRSSRKPKWQIRLEEKVKDLRRKIGRLTQFIAGNKSRKLKQHIDYIIKTYKLHSVHEEENTQLSHFLDTLKQKLIVASSRLKRYKICTLRKTQNKHFITNEKQFYRGLRNTGNNETSSHNTANILHEQITPTSKDLYDYWSSIWDNEVTHKEDAGWIKEEKVRNSTIGEMEFRVISVETLTNVLNKLQNWKAPGSDCIQNFWYKKFTHTHSYLLKYINNFIQNPQLLPKYIMAGTTYMLPKDTTDQMNPSKYRPITCLQTFYKIITSCLADNIYEHINTNNILTEEQKGCRKLSQGCKEQLTIDSVIMKQVQEKKKDLYSMYVDYQKAYDSVPHSWLIEVLRIYKIHPQIISFLSNIMKNWTTRLKLTTTNGITETPLINIKRGIYQGDALSPLWFCLALNPLSKILSLSGTGYTLKYLDSEPNAQTSAQTVRINHLLYMDDIKLYADTKDDLHRLANITENFSHDIHMKFGIEKCKVNSVQAGNTQQLTYQMESGEYIDPLDQTRGYKYLGYIQSKFIHHKEIKALLTMQFKHRMNTILKSQLNSKNIVKAVNTFAIPILTYSFGIINWTKTELKSLQRIINTSLTKHRKHHPRSCVQRMTLPRKEGGRGFIDISNLHNNQVKNLRTYFHGKIVTSNLHKAIVQNDIKLTPLNLSDRSKQKNEELTDIQTKIFEWTQKSLHGRHRHDLCQTNVDRIASNEWLRRGDLFPETEGFIIAIQDQVIETRNYQKHIMKSPIPTDICRRCSSSSETIQHITGACKAIVQTDYKHRHDQIAKIIHQRLAIKHNLIAQPFKPYYEYSPEVILDNETHKLYFDRAILTDKTIHYNRPDITLIDKVNKTAYIIDIAVPNSHNVQNTIAEKISKYTDLKDEVTRMWQLRKAVIVPIVISTTGIIPTQLKQSLSTLNLPAYTYISLQKAVILNTCRIVRKFLQVEKDSITTTI

SEQ ID NO: 24978 - protein, 1400 aa, Epargyreus clarus
MTNGALVVRNYAMRLRSRQIPQAGTREGESRPGPSGSGCPTYSGGGTASHMTTQTHTAVVDNISHIISHPSSPISSTHSLFPSPSSSPYSYQTSSHRSNTLTPVSSECAQEAYVGPVRTTERILRGDVVQDAIHGEKPVPISNVSRKRNKWSKDMNKYILRTYLQITKLETENKNSYLPILYTHFAEKFPHMQVSRQRVGDQRRAIIRNKLLNQQEIDNIYAEVQVEFKNERVATNQNITTGQRMRWTSEHNECIIRSYLKITKLETDMTAYRTLLHLDFITQFPHLSHITVQRVADQRRVIINNKLISEERLEILKKEITAELQISQKNDLNYNSIETSVMNSGINSNENFLNVIDVNCLDDHEQPEPSSNVRNPEIDETFQGILTHFTSTDPTKRQHIPKQKSSKKFASIIHYINNITLPEHLSEATSFETFQTVLYSAAWTAAKINGAKISIPFKQNLYQNRSRRKPKWQIRLEEKIKDLRRKIGRLTQFMNGNRSKKLEQHINYIIDTYKLHSVHEEENTQLSHFLDTLKQKLIVVSSRLKRYRTCTLRKTQNKHFITNEKQFYRGLRQTGNNETSNHNVANSKCSQNTPKSEDVYRFWSSIWDNEVNHNADAEWIKGEKLRNITSGEMEFQEISMEKLQNVLNKLQNWKAPGSDCIQNFWYKKFTHTHFYLHKYINSFIHNPQLVPKYIMAGITYMIPKDTQDQVNPAKYRPITCLQTIYKIITSCLADNIYEHLNKNNILTEEQKGCRRLSQGCKEQLTIDSVIINQVQEKRKDLYSMFIDYQKAYDSVPHSWLIEVLHIYKIHPQIISFLCNIMNNWTTRLKLTTTNSTIETPSINIKRGIYQGDALSPLWFCLALNPLSKMLNLTNAGYILKYLDNERDDQTDIREMRVNHLLYMDDIKLYADTKDDLHYLANITENFSHDIRMQFGIDKCKVNSVQAGKTEQQRYQLESGEYIDPLDQNSGYKYLGYTQSKIIHHKETKATLTTQFKHRISTILKSQLNSKNIVKAVNTFAIPILTYSFGIINWTKTELKCLQRNINTLLTKHRKHHPRSCVQRMTLPRKEGGRGFIEIINLHNKQIKNLRTYFHLKTKTSNLHKAIVQNDFKLTPLNLSVRTSQKNEELIDAQTKISEWTQKSLHGRHRHDLCQVNVDKKASNEWLRRGDLFPETEGFMIAIQDQVVETRNYQKYIMKSPIPTDLCRRCNSSSETIQHITGACKAIVQSDYKHRHDQVAKIIHQKLANKYNLIQQPLKPYYEYNPESILDNSTHKLYFDRAILTDKTIHYNRPDITLIDKINKLAYIIDIAIPNSHNVQNTISEKICKYTDLKDEVTRMWQLKKAIIVPIVISTTGLIPKQLKQSLNTLNLPVYTFASLQKAVILNTCRIVRKFLQVEKS

SEQ ID NO: 24979 - protein, 1378 aa, Narcosius parisi
MTNGALVFKNYAMRLRSRQIPQAGTRKGESRPGPSGSGCPTYSGGGTASHMTTQSCTAVVDNSSHIISHPSSPISSTHSLFPSSSSSPYSYETQSSSLRSDTLTPVSSECAQETYTKSVRTTERTLRGDVVQDAMQAELSVPMSTIPRKRNKWSKDMNEYILRTYFEITKLETENKNSYLPILYTKFSHEFPHMQVSRQRVGDQRRAIIRNKLLKQQEIDNIYAEVQAKLKNEKMSTNQNQNILTGQRMRWTSEHNESIIRSYLKITKLETDMTAYRTLLHHDFITHFPHLAHITAQRIADQRRIIINNQLMTKERLEALKIEVATELQMSQKITLNINTSQMNRNSEINSNETFLNNIEVSCLDQHEQPEPINDARNSEIDQIFQETLTYFNGIDPTKRQYIPKQKSSKKFARIIDYINTIILPEQLTETTTFETFQTVIYSAAWTAAKVNGAKISIPPRENSNQNRSSRKPRWQIRLEEKVKDLRQKIGRLTQFMNGNRSRKLQQHINYIINTYKLHTIHEEANTQLIHFLDTLKQKLIVVSSRLKRYKTCTLRKTQNKHFITNEKHFYRSLRNTGNNETANDNVTNKPSKQITPKSEEFYKFWSSVWDNEVNHEADAEWIKDEKSRNITSGEMEFQDISAETLKNVLNKLQNWKAPGSDCIQNFWYKKFAHVHFYLLKYINNFIQHPELLPKYIMAGTTYMIPKDTLDKINPEKYRPITCLQTIYKIITSCLTYNIYEHLNTNNILTEEQKGCRKLSQGCKEQLTIDSVIMKQVQEKKKDLYSMYIDYQKAYDSVPHSWLVEVLHIYKIHPQIIRFLCSVMKNWTTRLKLTTPNGTTETPSINIKRGIYQGDALSPLWFCLALNPLSKMLNLTRTGYILKYLDNESDDKTDVQERRLNHLLYMDDIKLYAETKDDLHYLANLTENFSHDIHMQFGINKCKINSVQAGKTEQYRYQLESGEYIDPLDQSSGYKYLGYTQSNTIHNKETKTLLTTQFKHRINTILKSQLNSKNIVKSVNTFAIPILTYSFGIINWTKTELKSLQRNINTSLTKQRKHHPRSCVQRMTLPRKEGGRGFIEILNLHNTQIKNLRMYFHNKAITSNLHKAVVQNDVKFTPLNLSDKITQKNEEVINSQTKIAEWTKKSLHGRHRHDLCQVNVDKIASNEWLKRGDLFPETEGFMIAIQDQVVETRNYQKHIMKSPIPTDLCRRCSSSSETIQHITGACKAIVQSDYKHRHDQVAKIIHQKLANKYNLTPQSLKPYYEYNPEAILDNSSHKLYFDRAILTDKTIHYNRPDITLIDKANKIAYIIDIAIPNSHNVQNTISEKLSKYTDLKDEVTRMWKLRKSVIVPIVISTTGIIPTQLKQSLSTLNLPLYT

SEQ ID NO: 24980 - protein, 1363 aa, Codatractus imalena
MTTQSRTAVVDKSRHKSHSSSPISSTHSLFPSPSSSTHSLFPSPSSSPSSYQTQSSSQRSNTLTPVSSECAQGSYMKSVRTIDCMLRGDVVQGAIQGEVPVPISNQPRKRNKWSKDMNEFILRTYFQITKLENENKNSYLSILHTKFSNKFPNVNVSRQRVGDQRRAIIRNKLLKQQEIDKIYTEVQTEFQNETITTNLNQDLLLGQRMRWNSEHNESILRSYLRITKLETDMTAYRTLLHRDFITLFPHLSHISVQRIADQKRVIINNKLIPEERLDVIRKEVTTELSQRNELVQNSINTTEINKNSDTSNDTVSLNNHNYHNQPEQCIEMRNLDIDQTFQKTLTYFTGTDPTVRQHIPKQKSSKKLAQIIYYINTTILPEYLTEVICFENFQTIIYTAAWTAAKCNGAKINIPPRDSQYQNRSSRKPKWQIRLENKVEDLRRKIGRLTQFINGNRNIKLHQHINYITETYKLHTVHEETNTQLSHFLDTLKQKLIVVSSRLKRYKACTLRKTQNKHFITNEKQFYRNLKHTSNNEPSNQTCNQIAPKPEDVYNFWSSIWNKEVNHNVDAQWIKDEKLRNTTTPEMKFQEISVETLNNVLNKLQNWKSPGSDYIHNFWYKKFTQAHSHLLGYINNFIQNPQLLPKYISSGTTYMIPKDTTEQINPATYRPITCLQTIYKIITSCLADNIYKHLKANNILTEEQKGCKKLSQGCKEQLTIDSVIMKQVQDKKKDLYSMYIDYQKAYDSVPHSWLIDVLHIYKIHPQIINFLHNIMKNWTTRLKLITTNGTTETPPINIKRGIYQGDTLSPLWFCLALNPLSKMLSLNSAGYKLKYLEPDDQTNIREIRVNHLLYMDDIKLYADTKDDLYHLANITERFSHDIKMQFGIEKCKLNSVQAGKTQQHRYLLESGKYIDPLDQNSGYKYLGYIQSKSIHHKDIKTILTTQFKHRMNTILRSQLYSKNLVKAVNTFAIPILTYSFGIINWTKTELKSLQRNINTLLTKHRKHHPRSCVQRLTLPRKEGGRGFIDIINLHNKQVQNLRAYFHDRTITSNLHKAIVQNDKKLTPLNLSEKTLQKNEELTNIKTKILEWSQKSLHGRYRQDLCQNNVDKIASNEWLRCGDLFPETEGFMIAIQDQVVETRNYQKHIMKSSLHTDICRRCNSSSETIQHITGACKAIVQSDYKHRHDQVAKIIHQKLAIKHNLITQPHKPYYEYKPEAILDSSTHKLYFDRAILTDKTIHYNRPDITLINKVNQSAYIIDIAIPNSHNLQNTISEKISKYTDLKDEVIRMWQLRKAVIVPIVLSTTGIIPIQLKQSLTTLNLPIHTFISLQKAVILNTCRIVRKFLQVEKDSNIADSITTID

SEQ ID NO: 24981 - protein, 1391 aa, Aeromachus stigmata
MENSLKFKKHKTIKYNLRSLKKIQVEPEQHEIQPIDKRSENQIVPELQPETLSVMSYTDDSSNFSLSSFKSLSSLSVNSRMLEDVVQETVQVVNPVPINSVNRKRNKWSKDMNEFILRTYFQITKLETENKNIYLPILHSSFSTKFPHMQVSRQRVGDQRRAIIRNKLLKQNEIDNIYAEVKVELELREIQISHETQNTIFGKRMRWTSEQNEGIIRSYLRVTKLETDMTAYRTLLHQDFVTRFSLFSQLSIQRIADQRRSIMKAKKISEERLQTIKEEIAAELGLMQDTTTVSSVSVQKINDTTAETIENFSNTIDSVNDGCMLDTTIAINENVNDTTQSAIQATQNPLINVDSITVNVTSNNHNTIIDLNLDKTFHEALTCFTGTDPINRPYIPRQKTSKKLSAIVHYVNNKILPKYLAEDTDFVNFQTVIYSAAWTVAKCNGSKINTQVKEKSYDIRERRKPKWWIRLEKKIEDLRRKIGRLTQFIKGNRSKKQQKHINYIINEYKIHSVHEEPNIHLSHFLDTLKQKLTVMSSRLKRYKTCTLRKTQNKHFLSNEKHYYRSLRNPETNQNSNSNIASNDNINTEPAPIAEDLYRYWSSIWDNKVNHNTNAQWITEQKVYNNAIVEMNFEQITQETLHRVISKLQNWKAPGSDNIQNFWYKKFKYAHVYILKYINGFIINPQTLPKYVTAGTTYMIPKDTTDRQNPAKYRPITCLQTIYKIITSCLAENIYKHLAKNNILTEEQKGCRKLSQGCKEQLIIDSVIMKQVHDKRKSLYSMYIDYQKAFDSVPHTWLLEVLDMYKINPQIIRFLRNIMLNWTTQLNLSTSHGITKSAPININRGIYQGDALSPLWFCLALNPLSSMLKLTNTGYLLKCEDNKTNEQKLNHLLYMDDIKLYAETKSELEELVNITETFSKDICMKFGIDKCKINSVQAGIPHQHTYQMQSGTHIDPLSDNDVYKYLGYIQSNLIHHKDIKATLTIQFKHRVNIILRSQLNSRNITKAINTFAIPILTYSFGIIKWSKTELTNLQRNINTALTKHRKHHPRSCVQRMTLPREEGGRGFIDIPNLHNKQIKNLRAYFHEKANVSAIHKAIVFNDVKSTPLNLHDKTTQKNEKQTDRQTKISEWTHKSLHGRHRKDLCHTNVDKVASNEWLRQGELFPETEGFMIAIQDQVIETRNYQKYIMKIPIPTDKCRRCNSSTETIQHITGACKSIVQTDYKHRHDQVAKIIHQKLAIKHNLLSQPLKPYYDYNPEVVLENKTHKLYFDRALLTDKTIHYNRPDITLVDKINKLAYIIDIAIPNSHNIQSTISEKLTKYTDLKEEVRRMWHLQKATIVPIVLSATGIIPTQLQNSLKTLDLNPKIFQSLQKAVILNTCRIVRKFLQNETD

SEQ ID NO: 24982 - protein, 1252 aa, Muschampia musta
MKMSKPNKTRYFLRSLSRAQGENPDTMNVRKLQRENVTDEEIDTIKAAMSDDDTSSTVTFSSYRSSSSLSVNSRILEDVVQDTTQVDKSAPTTSKSRKRNKWSKDMNEYILRSYFHITKLETENKNNYLPILFEQFSSKFPHIQVNRQRIGDQRRAIVRNNLITPMERERIYAEVKSELQVGKESQHTNVENIICSNQRMRWTSELNEAIIRSYFRITKLETDFTTYRTLLHQDFVCSFPHLAHVTVQRIADQRRVILNNKLIPEDRLQIIKEEVAIEIQLSIELTVLQSNVTESNKEGSENTENFLNDTDKNRQNDNCTESDRTERNLELDEIFQEALIYFTNTDPTKRHYIPRQKSSKKLGSSIHYINDTILPEELKDELSFERFQTIIYSAAWAVAKYNGAKISLVVEQIQERKTSKRKPKWQVRLEKRVEDLRRKIARMTQFIKGNRGKKLQQQINKIKEQYKIHTTHEDPNKKLSHFLDTLKQKLCVVASRLKRYNTCTLRKTQNNQFASNEKLFYRYLRNIDTLQNKQINCNEIPIQNHYAPEDLHRYWSTIWGDDISHNAQAEWIEDEKARYNTMEIMDFQQISEETFKNVINKLQNWKTPGSDHIQNFWYKKFSFAHPCLLKHINNFINNPHLLPKYILAGTTYMIPKDVNDYKNPAKYRPITCLQTIYKIITSCLTENIHKHLHIHNILTEEQKGCKKLSQGCKEQLTIDSVIMKQVQQKRKNLYSMYIDYQKAYDSVPHSWLLEVLKIYKIHPKIINFLQNSMINWTTRLKVNTMNESIETAPINIRRGIYQGDALSPLWFCLALNPLSKMLNLTNTGFLLQYANERCDDEVMVKDKRVSHLLYMDDIKLYADTKDGLHNLISITEGFSQDICMKFGIDKCKINSIERGRTLHDSYQMESGENIEPIDMSRGYKYLGYTQSKDIHHKEIKFNLMTQFKQRLNNILKSQLNSKNVTKAINSFAVPILTYSFGIIKWNKTELKNLQRKINVEMTRHRKHHPRSCVQRMTLPRTEGGRGIIDIMNLHDNLIKNLRAYFYEKSTKSDLHNAIVQNDTKLTPLNLNNKTQPDNNQTDRQTKIIQWAQKSLHGRHRQDLCQSTVDKIASNEWLRRGELFPETEGFMIAIQDQVIETRNYQKFIMKMPIPTDKCRRCNSSSETIQHITSACKAIAQSDYRYRHDQVANIIHQKLAHQLKLISPQLEPYYQYKPDTILENNTHKLYFDRAILTDKTIHYNRPDITLIDKH

SEQ ID NO: 24983 - protein, 1335 aa, Muschampia poggei
MKMSKPNKTRYFLRSLSRAQGENPDTRKLRTLQKENVTDEEIDTIKSPMSDDDTSSTVTFSSHRSSSSLSVNSRILEDVVQNTTQVEKPAPTTSKSRKRNKWSKDMNEYILRSYLHITKLETENKNNYLPILFEQFSSKFPHIQVNRQRIGDQRRAIVRNNLITPMERERIFAEVKSELQVGKESQHTNVENIICSNQRMRWTSELNEAIIRSYFRITKLESDFTTYRTLLHQDFVCSFPHLAHVTVQRIADQRRVILNNKLIPENRLQIIKEEVAIEIQLTTELTVPQSNVTESNKEGSENTENFLSDTDKNRQNNNSTESDRAERNLELDEIFQEALIYFTNIYPTKRHYIPRQKSSIKLGSSIHYINKTILPEELKDELSFERFQTIIYSAAWAVAKYNGAKISLDVEQIQERKASKRKPKWQVRLEKRVEDLRRKIARMTQFIKGNRGKKLQQQINKIKEQYKIHTTHEDPNKKLSHFLDTLKQKLYVVASRLKRYNTCTLRKTQNNQFVSNEKHFYRYLRNIDTLQNKQMNCNKIPIQNHCAAEDLHRYWSTIWGDEISHNAQAEWIEDEKSRYNTMEVMDFQQISEETFKNVINKLQNWKTPGSDHIQNFWYKKFSFAHPCLLKYINNFINNPHLLPKYILAGTTYMIPKDVNDYKNPTKYRPITCLQTIYKIITSCLTENIHKHLHIHNILTEEQKGCKKLSQGCKEQLTIDSVIMKQVQKKRKNLYSMYIDYQKAYDSVPHTWLLEVLKIYKIHPKIINFLQNSMINWTTQLKVKTMNESIETASINIRRGIYQGDALSPLWFCLALNPLSKMLNLTNTGFLLQYANERCDDEVTVKDKRVSHLLYMDDVKLYADTKDGLHNLISITEGFSQDICMKFGIDKCKINSIERGRILHDSYQMESGENIEPIDMNRGYKYLGYTQSKDIHHKEIKFNLMTQFKQRLNNILKSQLNSKNVTKAINSFAVPILTYSFGIIKWNKTELKNLQRKINVEMRKHRKHHPRSCVQRMTLPRTEGGRGIIDIMNLHDDQIKNLRAYFYEKSTKSDLHNAIVQNDTKLTPLNLNNKTQLDNNQTDRQTKILQWAQKSLHGRHRQDLCQSTVDKIASNEWLRRGELFPETEGFMIAIQDQVIETRNYQKFIMKMPIPTDKCRRCNSSSETIQHITSACKAIAQSDYRYRHDQVANIIHQKLAHQLKLISPQLKPYYQYKPDTILENNTHKLYFDRAILTDKTIHYNRPDITLIDKHNKSAYIIDIAIPNTHNIQSTISEKLTKYTDLKEEMCRMWKVQNATIVPIVLSATGIIPTHLKQSLDKLNLPSYTQTHIKNQLF

SEQ ID NO: 24984 - protein, 1351 aa, Gorgopas trochilus
MKMQKLNKKIYNLRSLSRAQGEELRSVRTFNREHARDEDTEILESPTPDDDTSSTVTFSSHRSSSSLSVNSRLLEDVVQETTQVEQPAPINSMPRKRNKWTKDMNEYIMRTYYQVTKLETENKNSYLPILYEKFSSKYPQMQVSRQRIGDQRRAIVRNNLLPQQERDRIYAEIKAEIQEGKELQATPTENHNQRMRWTTEQNEAIIRSYFRITKLETDLTTYRTLLHQEFIASFPHLAHLSAQRIADQRRVIINNKLISESRIQIIKQEVATEIQFVTEHTASQININLFENINRSENSDSFLNNIDINCLHDNDTDTNKDERNEELEETFQNALKYFTNIHPTKRHYIPKQKSSKKLGSIIHYINSVILKEELNDELSFEKFQTIIYSAAWTAAKYNGAKISIADEGSQHRKKSNRKPKWQVRLERKLEDLRRKIARLTQFIKGNQGKKLQQQVSDIKQQYKIHSSHEEPNKYLSHFLDTLKQKLSVVASRLRRYKTCTLRKTQNNQFASNEKHFYRYLRTIGTLQNTQQNSNETYTQNLPKPEELHKFWSAIWDDEINHNTQAKWIEDERACNATIDVMDFQQISAETFKNVINKLQNWKTPGSDHIQNFWYKKFSFAHPYLLRHINNFINNPQLLPKYISAGTTYMIPKDTNDYKNPAKYRPITCLQTIYKIITSCLTENIYKHLNINNILTEEQKGCRKLSQGCKEQLTIDSVIMKQVQEKRKNLYSMYIDYQKAYDSVPHSWLIEVLKIYKIHPKIISFLHSTMRNWTTQLKVNTLGGAVETTPINIRRGIYQGDAFSPLWFCLALNPLSKMLNLTNTGYLLQYTNSTSDDDIAIRDKRVSHLLYMDDVKLYADTKDNLHILTNITEGFSQDICMKFGIDKCKVNSIENGRILHDSYQMESGENIEPLDINNGYKYLGYTQSKVIHHKEIKITLTTQFKKRLNNILKSRLNSKNIAKSINSFAIPILTYSFGIIKWTKTELKNLQRKINVAMTKHRKHHPRSCVQRMTLPRTEGGRGIIDIINLHNRQIKNLRTYFHEKSTKSDLHRAITENDKKLTPLNLNDKTQQENEEQTDRQTKILEWARKSLHGRHRQDLCQPTVDKTASNEWLRRGELFPETEGFMIAIQDQVIETRNYQKFIMKMPIPTDRCRRCGSASETIQHITSACKVIAQSDYKYRHDQVANIIHQKLALQHNLIPAPLKPYYKYKPDTILENNTHRLYFDRAILTDRTVHYNRPDITLIDKINKSAYIIDIAIPNSHNIQNTISEKLTKYTELKDEICRMWKVQNATIVPIVLSATGLIPTQLKLSLNRLKLPSYTQVNIQKAVVLNTCRIVRKFLQTDKDRTI

SEQ ID NO: 24985 - protein, 1356 aa, Noctuana brunneofusca
MNMNKPYKTRYYLRSLSRAQGENPDTRSVRTLRKEDVTDDDIDTLTSPTPDNDTSSTVTIFSNQSSSSLSTVNSRLLDDVVEETTQVKKPTPTTSISRKRNKWSKEMNEYILRSYFHITKLETENKNSYLPILYEKFSSKFPEIQVSRQRIGDQRRAIVRNNLITQQERDRIYAEVKSKLQEGKELQDLQPTCFSEHNIIPNQRMRWTSEQNEAIIRSYFKITKLETDLTTYRTLLHQDFISLFPQLAHLTVQRIADQRRVIINNKLILEKRLQEIKQEVTTEIELVTKLTSQNNISLAENDKEGPENTDIFLNNINIFDNSGTETNRSERNMELDIIFQEAHKHFINIHPTKRPYIPKQKSSKKLGSIIHYINKTILPEELKDELNFEKFQTVIYSAAWSVAKHNGAKISIVPEETQNQKTRQKNPKWQVRLEKKVEDLRRKIARLTQYINGNRGSKLQRQINDIKEQYKIHSTHENPNEQLSHFLDTLKQKLAVAASRLKRYKTCSLRKIQNNQFASNEKHFYRCLRTTENRQKSSNGISIQDQPAPEDLHKFWSAIWDDKISHNTQAEWIKDEKEHNATTEDMDFQQISVETFKNVINKLQNWKTPGSDNIQNFWYKKFSFAHPYLLNYINNFINNPQILPKYISAGTTYMIPKDTNDYKNPAKYRPITCLQTIYKIITSCLTENIYKHLNHNNILTEEQKGCKKLSQGCKEQLTIDSVIMTQVQEKRRNLYSMYIDYQKAYDSVPHSWLIEVLKIYKIHPKIINFLCNTMINWTTRLKVNTLNGAIETTPINIRRGIYQGDALSPLWFCLALNPLSKILNFTNLGYLLKYTNDKSEDEDTLNDKRVSHLLYMDDIKLYADTKDGLHRLTNITEGFSQDICMKFGIDKCKINSIEGGRTLHDSYQMDSGENIEPLDINNGYKYLGYTQSKIIHHKEIKSTLITQFTLRLNNILKSQLNSKNITKAINSFAVPILTYSFGIIKWTKTELKNLQRKINVAMTKNRKHHPRSCVQRMTLPRTEGGRGIIDIINLHNNQIKNLRTYFHEKSTKSDLHKAIVQNDTKLTPLNLNNSTQQYNEEQTDRQTKIQEWAQKSLHGRHRQDLCQTNVDKIASNEWLRRGELFPETEGFMVAIQDQVIETRNYQKYIMKMTIPTDKCRRCSSSSETIQHITSACKTIAQSEYKYRHDQVANIIHQKLAFQHKLITPPLQPYYKYKPDTVLENNTHKLYFDRAILTDKTIHYNRPDITLVDKLNKSAYIIDIAIPNSHNIQNTISEKLTKYTELKEEICRIWKVQNATIVPIVLSATGIIPTQLKQSLHKLNLPSYTQTSIQKSVILNTCRIVRKFLQTDKDKNF

SEQ ID NO: 24986 - protein, 1037 aa, Telemiades fides
MDCLHDNNQSELNPSRNPQLDEIFQETLVYFTNTDPIKRTYIPRQKSSKRLSIITHYINKVLLPEYITDDTSFDTFQTVIYCAAWTAAKSNGAKLYIPCRENRYQSCSSKKPKWQVRLEKKVEDLRKKIGRLTQFINGNRNKKLQEHINYIIETFKIHSSHEEPNTELTHFLDTLKQKLTVVSSRLKRYKTCTLRKTQNQQFSTNEKQFYRGLRNLDNNETTQITPTPEDLYTFWASQWEKEINHESNAEWIKEEELSNNTVREMEFEEITIETFKKVLNNLQNWKAPGSDCIQNYWYKRFTQSHNYLLKFINNFIKEPQSLPKYITAGTTCMISKDKTDQVNPEKYRPITCLQTIYKIITSCLAENIYKHLNDNNVLTEEQKGCRKLSQGCKEQLTIDSVIIKQVQGKKKDLYSMYIDYQKAYDSVPHSWLLDVLHIYKIHPHIVSFLHNTMANWTTRIKLTTAHGTIETSSINIKRGIYQGDALSPLWFCLALNPLSKMLNRTTIGYPLKYQNTAPDGQTIVCEKRLNHLLYMDDLKLYADTKDDLNILTNITEKFSKDIRMHFGIEKCKINSVQGGIIQQYKYQLKTGEYIDSLDHKSGYKYLGYIQSKLIHHKEIKTMLTTQFKHRINTIAKSKLNSKNMVKAINSFAIPILTYSFGIIHWTKAELKNLQRNINTSLTRHRKHHPRSCTQRMTLPRQEGGRGFIDINNLHNKQIKNLRIYFHEKSTSSKLHQAVVYNDTRLTPLNLSNKTNHKNEELRDIQTKIVEWTQKSLHGRHRHALCQANVDKIASNEWLRRGELFPETEGFMIAIQDQIIETRNYQKHIMKSSIPTDTCRQCRSLSETIQHITSACKAIVQTDYKHRHDQVVKIIHQKLATKYNLLSHPPKPYYEYNPEVVLENKCHKIYFDRAILTDKTTHYNRPDITLIDKVNKSAYIIDIAIPNSHNVQNTISEKLSKYTDLKEEVTRMWQLRKTFIVPIVLSATGIIPTQLKQSLKTLDLPLNTFISLQKAVILNTCRIVRKFLQFEQESNIID

SEQ ID NO: 24987 - protein, 1307 aa, Ectomis asine
MTNGALVFKKYAMRLRSRQIPQAGTREGESRPGPCGPGSPTYSGGGNASHMTAQSDTAAVNKTHVISHSSSHVISHPSSPMSSTHSLFPSPNSSPLPFSCQSQPSSRRSSVTTASGHVVQEGIPANLPVPISCQSRKRIKWTKDMNEFILRSYLQVTKVETENKNSYLSFLHTTFTNKFPHIQVSRQRIGDQRRAIIRNKLLKQQDIDKIYTEVKTEIEKDTIVGSQYEDQLVGKRMRWTSEHNESIIRSYLKITKLETDMTMYRTQLHQDFITKFPKLSHITVQRIADQRRVVINNRLISEERLEAIKTEVATELKASQESIINNEINSDTFMNNIAVNCLDYTDQPNAITDIRKLQVEELFRESLMYFKDTDPTKRPHIPKQKSSKRLASIMHYINTVLLPEHLTETTRFETFQTVIYCAAWTAAKSNGAKINIPTVDSPYQNCSKRKPKWQIRLEKKVEDLRKKIGRLTQFINGNRSKKLQQYVNYITETYKVHSVHEESNTRLPHFLDTLKQKLTVVSSRLKRYITCTLRKSQNKQFITNEKQFYRDFKNVDNKETSNNTSRDITPNLITPTPEDLHDFWSSLWANNVNHKPDSEWIKEEKLNNTKIQEMDFNEISIETLKAVLNKQQNWKTPGSDCIQNYWYKKFTQAHSYLLKYINDFIRDPQVLPKYVTAGTTYMILKDNSDQLNPEKYRPITCLQTIYKIITSCLAENIYKHLNANSILTEEQKGCKKFSQGCKEQLAIDAVIMKNVQDKTKDLYSIYIDYQKAYDSVPHSWLLEVLHIYKIHPQIIRFLHDTMKNWTTRLKLSTAHGTIETSSINIKRGIYQGDALSPLWFCLALNPLSNILNRTNIGYPLQYIDSAPDGQTNIRQKRVNHLLYMDDLKLYADSKDDLHHLITITENFSQDIHMQFGIEKCKLNSIQSGKTDHYKYQLNTGKYIDSIDQKSGYKYLGYVQSKLIHHKEVKAMLTSQFKHRINTIMKSKLNSKNMVKAINTFAIPILTYSFGIIHWTKTELRNLQRNINTSLTKHRKHHPRSCVQRMTLPRKEGGRGFIDIVNLHNNQIKNLRVYFHKKALSSKLHDAIVQNDTKATPLNLSNKAIQSNEKLTDIQTKISEWTQKSLHGRYRHDLCQDNVDKIASNEWLRRGELFPETEGFMIAIQDQVIETRNYQKHIMKCPILTDICRQCRSSPETIQHITSACKAIVQTDYKHRHDQVVKIIHQKLAIKHNLIAQPPKPYYEYKPEAVLDNHSHKIYFDRAILTDKTTHYNRPDITLIDKVNKYAYIIDIAIPNSHNMQNTISEKL

SEQ ID NO: 24988 - protein, 981 aa, Heliopetes ericetorum
MSFQTLIYSAAWTVAKANGAKIFIPPRETLQPHRQNRKPKWQMRLEKKVEDLRSKIGRLSQYINGRRGEKLQKHINQIWNQYRVHSTHDEPNTQLSHFLDTLKQKLTVAASRLKRYKTCTLRKTQNSQFVSNEKQFYRSLSTNENNRITHNNLLNNTKTHYNNTIRLNKSNPVEIYKFWSSIWDDDTSHNSQAEWIEGEKTNTSMIPTMDFEHISAETFQNVINKQQNWKTPGSDYLQNFWYKKFTRIHPHLLQHINTFLSDPELLPKYITAGITYMIPKDNTDLKNPAKYRPITCLQSIYKIITSCLSEKIYEHLNANNILTEEQKGCKKFSQGCKEQLIIDSVILKKVQEKKKNVYSMYIDYQKAYDSIPHSWLVEVLNIYKINQKIVNFLQNTMKNWTTQLKINTVDGLVETSSISIKRGIYQGDALSPLWFCLSLNPLSKLLNSTSLGYPLYHTNDNIVNDLPMPEFRLSHLMYMDDIKLYTDKKDDLTCLAKITEKFSQDIRMKFGIDKCKINSIEGGKLLQYEYETEEGDYINSLDPKTGYKYLGYIQSNLIHHKDIKFKLTSQFKHRLNTILRTQLHSKNITKAINTFAIPILTYSFGIINWTKTDLKNLQRKISTLLTKHRKHHPRSCVQRLTLPRAEGGRGFIDIANLHYRQIQNMRTYFHNKSSTSTLHKAIVLNDTKLTPLNLSHRVVQDNEKQTDGQTKILEWAQKSLHGRHRHDLCQTNVDKIASNEWLRRGELFPETEGFMIAIQDQVIETRNYQKYIMKVPIPTDTCRRCNSSSETIQHITSACKSIAQSDYKYRHDQVAKIIHQKLAIKHKLINLPCKPYYEYKPDTILENKTHRLYFDRAILTDKTIHFNRPDLTLIDKPNKTAYIIDIAIPNSHNLQSTISEKLSKYTDLKEEICRMWKIEKAIIVPIVLSATGIVPKQLKQALNSLDLPSSIVISLQKAVVLNTCRIVRKFLQTDKDTTIYE

SEQ ID NO: 24989 - protein, 1272 aa, Eantis tosta
MTNRALASTKYAMRLRNRQIPQAGTREGESRPGPSSSGSPAYSGGGNVSHMTAQSCTAAVNPSFHTNSSPSSPISPTQSLFHSPNSSPHSFQNQQSSSRSTTISPASSDYVQDADTHVFLPINNNIVLGDVVQETAPVSEPVPINSLLRKRIKWNNNMNEYILRTYLQITKLETENKNSYLTLLHEKFTNKFPEIQVSRQRIGDQRRSIIRNNLVRQHDRDRIFAEVKLQLEGEGDVQSASQYTNTLGQRMRWTSEYNEAIIRAYFRITKLETDMTSYRTLLHQDFINSFPHLAHITAQRIADQRRVIINNKQIPDERLQLIKQEVARDLTNLQESLTTYKNINLSESNNLQVGENENFIDNIDINCLNDNLQEQGSEDTNSILDKTFQEALTYFTGTDPTSRHYIPKQKSSKKLGRIIHYINNTILPKQLHKELSFETFQTVIYAAAWTVAKSNGAKICIPTRVIENIRRDNRKPKWQIRLEKKVEDLRKNIGRLTQFIKGNRGSKLQQNINNIINHYKIHSKHEEPNTQLSHFLDTLKQKLSVAASRLKRYKICTLRKTQNKQFVSNEKQFYRKFRLAKNNNSNQNKENTTQNQPTLENLHKFWSAIWDDNTTHNAEAVWIAEEKTDNNSIKDMDFEHVTVETFRTVINRLQNWKTPGSDFLHNFWYKKFTYAHPYLLYHINNFLNNPQHLPRYISAGTTYMIPKDTADCQNPAKYRPITCLQTIYKIITSCLTENIYKHLDKNNILTEEQKGCRKFSQGCKEQLIIDSVIMKEVLKTRSNLYSMYIDYQKAYDSVPHSWLIEVLNIYKVHPKIIHFLHNTMTHWTTQLKITTTEGAIETMPINIKRGIYQGDALSPLWFCLALNPLSKMLNSSNMGYQLKYTNDETAADEEKRISHLLYMDDIKLYADKKEDLASLSNITEVFSQDICMKFGIEKCKVNSVEAGKTHQYTHQLASGDQIDPLDPNNGYKYLGCTQSKLIHHKEIKSNLTRQFEHRINSILKSQLNSKNISKAINTFAIPILTYSFGIINWTKMELKNLQRKINTLLTKHRKHHPRTCVQRMTLPRIEGGRGFIDIINLHNRQIKNLRTYFHEKTAESNLHRAIVLTDTKFTPLNLSNKTSHNTEIVKDTQTKILEWTQKSLHGRHRHDLCQTTVDKVASNEWLRRGELFPETEGFMIAIQDQVIETRNYQKHIIKLPIPTDKCRRCNSSSETIQHITSACKSIAQSDYKYRHDQVAKIIHQKLSIKHNLISQPYEPYYKYKPETVLENN

SEQ ID NO: 24990 - protein, 1346 aa, Salatis canalis
MRLRNRKIPQAGTREGESRPGPSGSGSSAYSGGGIVSHKATQPRAAVVDTSHITQPSSLPPSLISSTHSLFPSPSSSPCSYQSQPSSSSRSTTITPLSGNSVKSSDYVLRGNVVQRAIQAKVSVPISSQTRKRNKWSKEMNEHILRTYLQITKLETENKNNYLPILYTKFADKFPHMQVSRQRVGDQRRAIIRNKLLNQQEIDRIYIEVQAEFKQAKQITTNQIHNVIVGQRMRWTSEHNEFIIRSYLKITKLETDMTAYRTLLHRDFITTFPQLAHVTVQRIADQRRVIVNNKQISEERLKIIKDEVAIELQMSQDNITNSNSTHLSETNTNIEMINNETFLNNIEINCFESNDQPESNSEVRNLELDQIFLETLTYFTGTDPTKRQYIPKQKSSKKLGNTIHYMNKVLLPEHLNENTTYDTFQTVMYSAAWTAAKVNGAKICIPSLDSPYQNRRFKKPKWQIRLEKKVEDLRIKIGRLTQFINGNRNRKLQQHINYITEKYKIHSVHEESNTQLSHFLDTLKQKLIVVSSRLRRYKTCTLRKTQNKQFITNEKQFYKYLSISGNNETSQSNSGNISANQITPTLKDLHKFWASIWDNDVNHKADANWIKDERLSNVTIGEMAFHQISIEILKNIISKLHNWKTPGSDFIQNFWYKKFTYTHSYLLKYINDFIKNPQSLPKYVTAGTTYMIPKNTIYQENPANYRPITCLQTIYKIITSCLSEIIYEHLNLNSILTEEQKGCRKLSQGCKEQLTIDSVIMKQVQEKKKDLYSMYIDYQKAYDSVPHSWLIEVLHLYKIHPQIISFMRNTMTNWTTQLKLTTVNGTTETSSINIKRGIYQGDSLSPLWFCLALNPLSKMLNRTNTGYPLKYIQTDSTNNEQTDKCETKVNHLMYMDDIKIYADKIDDLHHLVNITETFSNDIHMQFGIEKCKLNSIQAGKTHQHSYQMESGEHIDPIDQKSGYKYLGYIQSKFIHHKDTKAKLTAQFKHRINKILRSQLNSRNIVKAVNSFAIPILTYSFGIICWTKTELKSLQRIINTSLTKHRKHHPRSCIQRMTLPRKEGGRGLIDIINLHNKQIKNLRMYFHEKTDTSNLHKAITQNDTKLTPLYLSNRTTQKNEELTDIKTKLSEWTQKSLHGRHRHDLCQTNVDKVASNEWLRRGELFPETEGFMIAIQDQVIETRNYQKHIMKSSIPTDICRRCSSSSETIQHITGACKAIVQSDYKHRHDQVAKIIHQKLAIKHGLISHQPKPYYEYNPEAVLDNSTHKLYFDRAILTDKTIHYNRPDITLVDKINKFAYIIDIAIPNSHNVQNTISEKISKYTDLKDEVSRMWQLKKAVVVPIVLST

SEQ ID NO: 24991 - protein, 1359 aa, Anisynta dominula
MQNQNQNQKNKNCKYNLRSLSRTQRDNPVSESKFRHEQENNIIADLIEQPQFLTNSPRADREESRSLSSESVNSRLEDVVQETAQVKDPVPMSSQMRKRNKWSKDMNEYILRTYFQITKLETINKNTYLPILHDLFSKKFPQIQVSRQRVGDQRRAIMRNLLISQKEIDRIYAEIKSELETGGTESTNKEPNIIAGQRMRWTSEYNEAIIRMYFRITKLETDMTAYRTLLHQNFITTFPHLAHLSAQRIADQRRVIINNKQISEERLHFIKQKIATELRISEESSAINNRMNIPESNTAEVDSHESIMNNIDVNPDFERNLTNEGRNLNLDQLFQDTLTYFKSKDPTNRQHIPRQKSSKRLGCIIHYINSTLLPEHLNDDMSFDTLQTVIYSAAWAAAKSNGAKICIPPQEKRHQNGNKWKPKWQIRLEKKVENLRSNIGRLTQFINGRTSRKLEKHINNILEKYKIHSIHEEPNTQLPHFLDTLKQKLLVVSSRLKRYKICTLRKTQNKQFTSNEKHFYRFLGNSGTNQSSNTAISSNDTSVQGTSTPEDLYKFWSTIWDNNTNHNINAEWIKDEKLRNVAIKEMNFQQISTETFNKVINKLQNWKAPGSDCIQNIWYKKFTYAHSYILNHINNFIINPQLLPQYITAGTTYMIPKDNTDQQNPAKYRPITCLQTIYKIITSCLAENIYEHLITNNILTEEQKGCRKLSQGCKEQLAIDSIILKQVQEKKENLYSMYIDYQKAYDSVPHSWLLEILDIYKIHPHIIRFLQNSMINWTTRLRLNTINGTIETASINIKRGIYQGDALSPLWFCLALNPLSNMLNLTKTGYLLKYSNNNSNEQTHLQEKRLNHLLYMDDIKLYADTKDDLHNLANITEIFSQDICMQFGIEKCKINSVEAGKTNQHCYQMVSGDTIDPIDDNGTYKYLGYIQSKYIHHKEIKLMLTTQFKYRVNKILRSQLNSKNITKAINTFAIPILTYSFGIINWTKTELNNLQRNINTALTKHRKHHPRSCVQRMTLPRKEGGRGFIDIINLHNKQIKNLRTYFHGKAATSDLHKAIVDNDIRLTPLNLHSKTIQKNEKQTDTQTKISEWTLKSLHGRHRKDLCQTTVDKIASNEWLRRGELFPETEGFLIAIQDQVIETRNYQKHIIKTPIPTDLCRRCNSASETIQHITGACKAIVQTDYKHRHDQVAKIIHQKLSIKHKLTLQPFKPYYEYNPEAVLENKTHKLYYDRAILTDKTTHHNRPDITLIDKINKHAYIIDIAVPNSHNIQNTISEKLAKYTDLKDELSRMWQLRKATIVPIVLSTTGIIPTQLQQSLKTLDLPVHTYINLQKAVILNTCRIVRKFLQTEKDRTVLNS

SEQ ID NO: 24992 - protein, 1317 aa, Tiana niger
MKMHKPYKITYNLRSLSKSKGETPDSRSMRRNHEKDVLEEDEDTVESPTPDKDTSSSLTFSSHRSISSLSIDSRLLEDVVQETAQVEEPAPTTSTSRKRNKWSKNMNEYILRSYFQITKLETENKNSYLPILYEKFCNKFPDMQVARQRVGDQRRAIIRNNLIKQTEIDKIYLEVQSELRIEKEIQPLNFTKNIIVGQRMRWTSEQNEAIMRAYFRITKLETNFTAYRILLHEEFINLFPHLTHLTVQRISDQRRVIIRNNQISEERLQDIKQEVAAELQLLNEHTALHSNVNLFENDKDGSGSVESSINNIHSTAENNREERNMRIDEIFEEALKHFTSTHPTKRHYIPKQHSSKKLASIIQYVNNSILPKELSKELSFETFQTVIYSAAWTVAKCNGAKIYIKPEESLHLKSSNRKPKWQIRLERRVDDLRRKIGRLTQFINGNRSKRLQQEINCIKEQYKIHSSHEVPNTQLSHFLDTLKQKLTVVASRLKRYTTCTLRKTQNKQFASNEKHFYRCLRTTDNKQNTQENCNTKALVQNQCTLENLHKFWSSIWDNDISHDTQADWIEREKARHATIEIMEFQEISVETFKNVINKLQNWKTPGSDYIQNFWYKKFSFAHPYLLNHINNFISNPQLLPKYISAGTTYMIPKDNTDNKDPAKYRPITCLQTIYKIITSCLTENIYKHLNINNILTEEQKGCKKLSQGCKEQLIIDSVIMKQVQEKRRNLYSMYIDYQKAYDSVPHSWLIEVLKIYKINPKIINFLHITMANWTTQLKMTTLGEPIETAPINIRRGIYQGDALSPLWFCLSLNPLSNMLNLTNLGYLLKYTDEESDNNVPLRNKRLSHLLYMDDVKLYADTKDGLNNLTNITEGFSRDICMKFGIDKCKINSIKAGKTLQHSYQMESGDIIEPLDMNNGYKYLGYTQSKGIHHKEIKDSLLKHFTQRLTSIFKSQLNSKNITKAINSYAIPILTYSFGIIKWTKTELKNLQRKINVLMSKHRKHHPRSCVQRMTLPRTEGGRGIIDIANLHNSQIKNLRVYFHEKSAKLDLHKAIVKNDKRLTPLNLNDKKQQDNEEQTDRQHKIQEWARKSLHGRHQQDLCQSTVDKIASNEWLQRGELFPETEGFMIAIQDQVIETRNYQKYIMKMSISTDTCRRCGSSTETIQHITSACKSIAQSDYKYRHDQVAKIIHQKLAIQHKLTSQPFKPYYEYKPETVLENNTHRLYFDRAILTDKTTHYNRPDITLVDKLNKSAYIIDIAIPNSHNIQSTISEKLTKYTELKDELCRMWKLQKATIVPIVLSATGIIPTQLKVSLIN

SEQ ID NO: 24993 - protein, 1322 aa, Toxidia parvulus
MQNKNPKTKNVKYNLRSRSRTNLTRASSRSLSSVSVDSMLLEDVVQETNQVKNPVPISSQVRKRNKWNKDMNEYILRAYFQITKLESINKNTYLPILHDLFSKKFPQMQVSRQRVGDQRRAIMRNNLIQQNEIDRIYAEIKSELELGETEAINKEHNVTSGQRMRWTAEYNEAIIRFYFRITKLETDMTAYRTLLHQNFITTFPHLAHLSVQRIADQRRVIINNKQISEEHLECIKQEIANELRSSEESLETNNSMNLPHTSTNEVNSNESLMDNIDVYPSTDSEARLTNEERNINLDCTFQDTLNYFIGKDPTNRQHIPKQQSSKRLGSIINYINNKLLPEHLNEDMSFDTLQTIIYCAAWTAAKGNGANICIPPKEKPHQNGKIWKPTWQVRLEKKVEDLRSKIGRLTQYINGIRSNKLQRHINYIIENYKIHSTHEEPNTQLTHFLDTLKQKLTVVSSRLKRYKICTLRKTQNKQFTSNEKYFYRFLRNSSNSNTDFTLNNTSVPVTPSQEDLYKFWSSIWDNNINHNINAEWIKDERLRNVKIKEMNFQQISTETFKKVINKLQNWKAPGSDCIQNVWYKKFTNAHPYILSHINNFIINPQLLPKYVTSGTTYMISKDTTDQQNPAKYRPITCLQTIYKIITSCLAENIYEHLTINNILTEEQKGCRKLSQGCKEQLTIDSVVLKQVQKEKKNLYSMYIDYQKAYDSVPHSWLLEVLDIYKIHPHIIKFLQNSMTNWTTRLKLTTVNGTTETESINIKRGIFQGDALSPLWFCLALNPLSNMLNLTSTGYLLKYSNNNPNELTHAHEKRLNHLLYMDDIKLYADTKDDLHNLANITETFSQDICMQFGIEKCKINSVEAGITQQHCYEMVSGDIIDPIDDKGTYKYLGYIQSKYIHHKEIKTILKTQFKHRVNKILKSQLYSKNITKAINTFAIPILTYSFGIINWTKTELHSLQRNINTALTKHRKHHPRSCVQRITLPRIEGGRGFIDIANLHNKQIKNLRTYFHEKTVTSDLHKAVVNNDVQLTPLNLHFKSIQRNEKQTDRQTKILEWTQKSLHGRHRKDLSQTTVDKIASNEWLRRGELFPETEGFIIAIQDQVIETRNYQKHIIKTPIPTDLCRRCNSASETIQHITGACKAIVQTDYKHRHDQVAKIIHQKLSIKHKLTLEPFKPYYQYNPEAVLENKTHKLYYDRAILTDKTTHYNRPDITLIDKINKCAYIIDIAVPNSHNIQNTIAEKLAKYTDLKDELSRMWQLRKATIVPIVLSTTGIIPKQLQLSLKTLDLPVHTFISLQKAVILNTCRIVRKFLETENVRTYFE

SEQ ID NO: 24994 - protein, 960 aa, Jera tricuspidata
MYSAAWTAVKINGAKMSIPTREIQHLQRNNRKPKWQIRLEKKVEDLRKKIGRLTQFIKGNRGNKLKQHVNYILKQYKVHSTHEEPNTQLSQYLDTLKQKLTVAACRLKRYKTCTLRKTQNKQFTSNEKQFYRNLCKVENNQNSNHDTSPQNQPTPEDLHSYWAAIWDDHTSHNTQAGWIKEEKTRNNFIKDMDFEQISTETFTHVVNKLQNWKTPGSDFIQNFWYKKFTNAQPCLLYHINSFINNPQLLPKYITAGTTYMIPKDTTDYRNPAKYRPITCLQTIYKIITSCITENIYNHLNIHNILTEEQKGCRKLSRGCKEQLTIDSVIMKQVYKKRRNLYSMYIDYQKAYDSVPHSWLIEVLSLYKIHPKIIHFLHNTMANWTTRLKITTTNGAIETMPISIKRGIYQGDALSPLWFCIALNPLSKMLNSTKTGYLLEYTNNEPVNEEPNQERRLSHLLYMDDIKLYADTKDDLYRLTNITEMFSQDICMKFGIEKCKTNSIVAGNTQQHRYQMASGDRIDPLDLNSGYKYLGYTQSKLIHHKEIKTTLAKQFKYRINTILRSQLNSKNTTKAINTFAIPILTYSFGIINWTNTELKSLQRTINTLLTKYRKHHPRSCVQRMTLPRTEGGRGFIDIINIHKRQIHNLRTYFFEKAVESDLHKAIVINDRKLTPLNLGNNSPQNNEVQTDRQTKIIEWNQKSLHGRHRQDLCLTTVDKIASNEWLRRGELFPETEGFMIAIQDQVIETRNYQKYIMKIAIPTDTCRRCHCSSETIQHITSACKSIAQSDYKHRHDQVAKIIHQKLTIKHNLTSQPFKPYYEYKPESILENDTHRLYFDRAILTDKTIHFNRPDITLIDKRNKTAYIIDIAIPNSHNIQNTISEKLSKYTELKEEICRMWKVQRATIVPIVLSTTGIIPTQLKQSFNTLGLPFYTVVGLQKAVILNTCRIVRKFLQTNENL

SEQ ID NO: 24995 - protein, 1402 aa, Telegonus cellus
MTNGALVFKNYAMRLRSRQIPQAGTREGESRPGPSGSGCSTYSGGSTASHTITQSRTAVVDNTSHSISHSSSPISSTHSLFPSPSSSPYSYQTQSSSSRSNSLTPVSSERTLRGHVVQNAIQGEVSVPISNLSRKRNKWSKDMNEYIMRTYLQITKLETENKNSYLPILYTKFSDRFPHMQVSRQRVGDQRRAIIRSNLLKQQEIDKIYAEVQTEFNNEKIATNQNILTCQRMRWTSKQNEAIIRSYFKITKLETDMTAYRTVLHDHFITQFPHLSHLTVQRIADQRRVIMNNQLIAEERLETIKKEVTAELQISEQSIVNNNSSNSSETNRNVVINSNETFLNNIDVNCLNPQDQPELSSNVRTTEIDQTFQETLTYFIDTDPTKRQHIPKQKSSKKFASIVCYINNIILPEHLNEATTFATFQNIIYSAAWTAAKSNGAKINITPKDSRFLKNSSRKPKWQIRLEEKVTDLRRKIGRLTQFMNGNRSSKLQQHINYIIETYKLHTVHEEANTQLAHFLDTLKQKLTVVSSRLKRYKTCTLRKTQNKYFITNEKQFYRGLRNTGSNETSNYNFTNTTLQQITPTSEDLYKFWSSIWDNEVNHKADAEWIKDEKLRNVTTSEMEFQEISVKTLTNVLNKLQNWKAPGSDCLQNFWYKKFTHTHPYLLKYINNFIQNPQLIPKYIMAGTTYMIAKDNTDQINPAKYRPITCLQTIYKIITSCLADNIYEHLNTNNILTEEQKGCKKLSQGCKEQLTIDSVIMRQVQEKRKDLYSMYIDYQKAYDSVPHSWLLEVLQIYKIHPQIISFLNNIMKNWTTRLKLTTPNGTIETPSINIKRGIYQGDTLSPLWFCLALNPLSNMLNLTKSGYILKYLDSEHDNQTNIQETKVSHLLYMDDIKLYADTKDDLHCLANLTENFSHDIHMQFGIEKCKLNSVQAGKTQQHRYQMESGEYIDPLDQNSGYKYLGYAQSNVIHHKEIKTMLITQFKHRLNTIFRSQLNSKNLFKAVNTFAIPILTYSFGVINWTKTELKSLQRNINTSLTKQRKHHPRSCVQRMTLPRKEGGRGVIEISNLHNKQIRNLRTYFHHKTLTSNLHKAIVQNDLKLSPLRLSDRATQKNEELINIHSKILEWTQKSLHGRHRHDLSQANVDKIASNEWLRRGDLFPETEGFMIAIQDQVIETRNYQKYIMKSSIPTDLCRRCSSSSETIQHITGACKAIVQSDYKHRHDQVAKIIHQRLACMYNLIPKPLKPYYEYNPETILDSSTHKLYFDRAILTDKTIHYNRPDITLIDKANRSAYIIDIAIPNSHNVQNTISEKISKYTDLKDEVTRMWQLQKVVIVPIVLSTTGIIPIQLKQSLSTLNLPHTFGSLQKAVILNTCRTVRKFLQVDKDLNFYFRGFQCTSW

SEQ ID NO: 24996 - protein, 1401 aa, Telegonus anausis
MTNGTLVFKIYAMRLRSRQIPQAGTREGESRPGPSGSGCSTYSGGSTASHTITQSCTAVVGNTSHSISHPSSPISSTHSLFPSPSSSPYSYQTQSSSSRSNSLTPASSESMLRGHVVQNAIQSEISVPISNLSRKRNKWSRDMNEYIMRTYLQITKLETENKNSYLPLLYTKFTDKFPHMQVSRQRIGDQRRAIIRNKLLKQQEIDKIYAEVQAEFKNERIATNQNILTGQRMRWTSKQNEAIIRSYFKITKLETDMTAYRTILHDHFITQFPHLSHLTVQRVADQRRVVMNNQLITEERLETIKKEVTAELQISEQSMLNNNNVDSTETNRNGEINSNETFLNNIDVNCLNSPNQPELSSNVKNTEIDQTFIETLTYFTDIEPTKRQHIPKQKSSKKFASIVCYINNIILPKHLNEATSFETFQNIIYSAAWTAAKSNGSKINITPIDSRSKKNSSRKPKWQIRLEEKIVDLRRKIGRLTQFMNGNRSLKLQQHINYIIETYKLHTVHEEANTQLSHFLDTLKQKLVVVSSRLKRYKICTLRKTQNKYFISNEKQFYRALRNTGSNETPNYSFTNTTLQQVTPTSEDLYKYWSSIWNNEVNHKADAEWIKDEKLRNVSTSEMEFQEISVKTLTNVLNKLQNWKAPGSDGLQNFWHKKFTHAHPYLLKYINNFIQNPQLIPRYIMAGTTYMIPKDTTDQINPAKYRPITCLQTIYKIITSCLAENIYDHLNTNNILTEEQKGCKKLSQGCKEQLTIDSVIMRQVQEKRKDLYSMYIDYQKAYDSVPHSWLLEVLQIYKIHPQIISFLSNIMNNWTTRLKLTTPNGITETPSINIKRGIYQGDALSPLWFCLALNPLSKMLNLNKSGYIFKYLDSEHDNQTNMQETKVSHLLYMDDIKLYADTRDDLHCLANITENFSNDIHMQFGIEKCKINSVQAGKTQQHRYQMESGEYIDPLDQNSGYRYLGYAQSDAIHHKEIKKMLITQFKHRLNTIFRSQLNSKNLFKAVNTFAIPILTYSFGVINWTKAELKSLQRNINTSLTKQRKHHPRSCVQRMTLPRKEGGRGVIEISNLHNKQIRNLRTYFHHKTLTSNLHKAIVQNDSKLSPLKLSDRATQKNEEQISIHTKILEWTQKSLHGRHRHDLSQANVDKIASNEWLRRGDLFPETEGFMIAIQDQVIETRNYQKYIMKSSIATDLCRRCNSSTETIQHITGACKAIVQSDYKHRHDQVANIIHQKLASKYNLISNPLKPYYEYSPEAILDSRTHKLYFDRAILTDKTIHYNRPDITLIDKANKSAYIIDIAIPNSHNVQNTISEKISKYTDLKDEVARMWQLRKVVIVPIVISTTGIIPIQLKQSLSTLDLPSHTFGTLQRAVILNTCRIVRKFLQVDRDLNTTDSIATTT

SEQ ID NO: 24997 - protein, 1398 aa, Astraptes apastus
MTNGALVFRNYAMRLRSRQIPQAGTREGESRPEPSGSGCSTYSGGSTASHTITQSRTAVVDNTSYPISHPSSPISSTHSLFPSPSPSPYPYQSSSSRSNSLTSVSSESIMRGHVVQNAIRGEVSVPISNPPRKRNKWSKDMNEYIMRTYLQITKLETENKNSYLPILYTKFSDRFPHMQVSRQRVGDQRRAIIRNKLLKQQEIDTIYAEVQAEFKNENVAINQNILTGQRMRWTSKQNEAIIRSYFKITKLETDMTAYRTLLHDHFITQFPHLSHISVQRIADQRRVIMNNQLIAKELLETIKREVTAELQISEQRVSNNNTIASPDTNRNSEINSNETFLNNIDVNCLDPQDQPELSNYIRNTEIDQTFQETLTYFIDTDPTKRQYIPKQKSSKKFASIICYINNIILPEHLYEETTFKAFQNIIYSAAWTAAKTNGAKINITHKDRRFKQNSSQKPKWQIRLEQKITDLRTKIGRLTQFINGNRSSKLQKHINYIKETYKLHTVHEEVNTQLSHFLDTLKQKLIVVCSRLKRYKTCTLRKTQNKCFMTNEKQFYRGLRNTGSNETANCNLTNTFQQITPTSEDLYRFWSSIWDSEVNHNADAEWIKDEKLRNVTTSEMDFQEISVKTLTNVLSKLQNWKAPGSDCLQNFWYKKFTHVHPYLLKYINNFIKNPQLIPKYLMAGTTYMIPKDTTDPSNPAKYRPITCLQTIYKIITSCLADNIYEHLNTNNILTEEQKGCKKFSQGCKEQLTIDSVIMRQVQEKRKDLYSMYIDYQKAYDSVPHSWLLEVLQIYKIHPQIISFLSNIMTNWTTQLKLTTPNGTIETPSINIKRGIYQGDALSPLWFCLALNPLSKMLNLTKPGYILKYLDNEHDSQTNMQETKVSHLLYMDDIKLYADTKTDLHCLANITENFSDDIHMQFGIEKCKVNSIQAGKTQQHRYQMESGEYIDPLDQSSGYKYLGFAQSNSIHHKEIKTMLITQFKHRLNTIFRSQLNSKNLFKAVNTFAIPILTYSFGVINWTKTELKSLQRNINTSLTKQRKHHPRSCVQRMTLPRKEGGRGVIEISNLHNRQVRNLRTYFHNKTLTSNLHKAIVQNDSKLSPLKLSDRATQKNEELVDVRTKILEWTQKSLHGRHRHDLSQANVDKIASNEWLRRGDLFPETEGFMIAIQDQVIETRNYQKYIMKSSIPTDLCRRCSSSSETIQHITGACKAIVQSDYKHRHDQVAKIIHQRLACMHNLILKPLKPYYEYNPETILDSSTHKLYFDRAILTDKTIHYNRPDITLIDKVNKSAYIIDIAIPNSHNVQNTISEKISKYTDLKDEVTRMWHLQKVVIVPIVLSTTGIIPVQLKQSLCTLNLPLHTFGSLQKAVILNTCRIVRKFLQVDKDLNSTDTITTTT

SEQ ID NO: 24998 - protein, 1401 aa, Urbanus esmeraldus
MTNGALVLSNYAMRLRSRQIPQAGTREGESRPGPSGSGCSTYSGGSTASHTITQSRTAVVDTTSHHISHPSSPISSTHSLFPSPSSSPCSYQTQSSSSRSNSLTPVPSESMLRGHVVQNAIQGEVSVPISNLSRKRNKWSKDMNEYIMRTYFQITKLETENKNSYLPILYSKFSNRFPHIHVSRQRVGDQRRAIIRNKLLKQQEIDKIYIEVQAEFKNENTETNQNISTGQRMRWTSEQNEVIIRSYFKITKLETDMTTYRPLLHDNFITHFPHLSHISVQRIADQRRVIMYNQLIPQERLETIKKEVRAELQIPEESVLNSNSINSSETNRNSEINSNETFLNNIDINCLNSQDQPGLSSNERNAEIDQTFQETLTYFTDTNPTKRHQIPKQKSSKKFASIVSYINNIILPEHLDETTNFETFQNTIYSAAWTAAKSNGAKINITPKDNKYQKNSSRKPKWQIRLEEKITDLRRKIGRLTQFMNGNRSCKLQQHINYIIETYKLHTVHEEANTQLSHFLDTLKQKLIVVSSRLKRYKTCTLRKTQNKYFITNEKQFYRSLRNTGSNENSNHNLTNTTLQQITSTSEDLYKFWSSIWDNEVNHKADAEWIKDEKFRNVTTGEMEFQEISVETLKNVLNKLQNWKAPGSDCLQNFWYKKFTHTHPYLLKYINNFIQNPHLIPKYIMAGTTYMIPKDTTDRFNPAKYRPITCLQTIYKIITSCLANNIYEHLNTNNILTEEQKGCRKLSQGCKEQLTIDAVIMRQVQEKRKDLYSMYIDYQKAYDSVPHSWLLEVLQIYKIHPQIIRFLSNIMKNWTTQLKLTTPTGTTETPSINIRRGIYQGDALSPLWFCLALNPLSNMLNSTKSGYILKFLDSEDDNHTNIQETRVSHLLYMDDIKLYADTQDDLHCLANITENFSRDIHMQFGIEKCKLNSIQAGKTQQNTYQMESGEYIDPLDQNSGYKYLGYVQSNVMHHKAIKTMLGTQFKHRLNTIFRSQLNSKNLFKSVNTFAIPILTYSFGVINWTKTELKSLQRNINTSLTKQRKHHPRSCVQRMTLPRKEGGRGIIDISNLHNKQIKNLRQYFHNKTLTSNLHKAIVQNDLKLSPLNLSDKATQKNEELMNIQTKILEWTQKSLHGRHRHDLCQANVDKIASNEWLRRGDLFPETEGFMIAIQDQVIETRNYQKYIMKSSIPTDLCRRCSSSSESIQHITGACKAIVQSDYKYRHDQVAKIIHQRLASMYNLIPKPLKPYYEYNPETILDSSTHKLYFDRAILTDKTIHYNRPDITLIDKANKAAYIIDIAIPNSHNVQNTISEKIAKYTDLKDEVTRMWQLRKVVIVPIVLSTTGIIPIQLKQSLNTLNLPFHISGSLQKAVILNTCRIVRKFLQVDKDLNTTDTVTTTT

SEQ ID NO: 24999 - protein, 1352 aa, Autochton itylus
MRLRSRQIPQAGTREGESRPGPSGSGCPTYSGGGTASHITTQIYTAVVKNSPHIISPSSSPVSSTHSLFPSPSSSPCSYQTQSPSVRSNTSNECAQEAYVKPVRTTKCMRGDVVQDAIQAKISVPISNLSRKRNKWSKNMNEYIMRTYFQITKLETENKNSYLPILYTKFSNKFPHVQVSRQRIGDQRRAIIRNKLLNQQELDNIFTEVQTELENETIVTNQNKNIQKGRRMRWTSEHNEAIIRSYYKITKLETDMTAYRTLLHQNFVTLFPHLAHITVQRIADQRRVIIDNQLISEEQLETIKKEVTAELQISQKIALNCKTINSSEIYTNSEINSNETFLNHIDVNCLNYNDTPEPARDVRNLDIDHTFQETLAYYTDTDPTKRQHIPKQKSSKKLASITYYINTILLPEYLSDATNFETFQTVIYSASLTAAKSNGAKINIPPRENQYQIKSNRKPKWQIRLEEKVNDLRTKIGRLTQFINGNKSRKIQQHVNYIIDTYKLHSVHEEANTQLSHFLDTLKQKLIVVSSRLKRYKTCTLRKTQNKQFISNEKQFYRGLRNTNNKNTVDHNITNIRSQQISPTSDDLYKFWSAIWDNEVNHNADAEWIKDEKLRNTATGEMDFQEISIDTLKSVLNRLQNWKAPGSDFIQNYWYKKFSHAHSYLLKYINNFIQNPHSLPKYITAGTTYMIPKDTADEMNPAKYRPITCLQTIYKIITSCLADNIYEHLNTNNILTEEQKGCRKLSQGCKEQLTIDSVIMKQVQEKRKDLYSMYIDYQKAYDSVPHSWLVEVLQIYKIHPQIINFLNNIMKNWTTRLKLTTKSGISETPSISIKRGIYQGDALSPLWFCLALNPLSRMLILSKSGYILKYSDHERNNQTMMHETKVSHLLYMDDIKLYAETKDSLHRLASITENFSQDIHMQFGIEKCKLNTVQAGYTQQHRYQLESGEYIDSLNQNSGYKYLGYLQSKFIHHKEIKTNLTTQFQHRINTILRSQLNSKNIVKGVNTFAIPILTYSFGIINWTKTELKSLQRKINTSLTKQRKHHPRSCVQRMTLPRKEGGRGFIEILNLHNKQIRNLRMYFHNKTKTSILHKAIVQNDLKLTPLNLSENTTQKNEEVMNTQTKILEWTQKSLHGRHRHELCQANVDKIASNEWLKRGDLFPETEGFMIAIQDQVIETRNYQKHIIKSSVPTDLCRRCSSSSETIQHITGACKAIVQSDYKHRHDQVAKIIHQKLAIKHNLISPPFKPYYEYNPEAILDNSTHKLYFDRAILTDKTIHYNRPDITLIDKTNKSAYIIDIAIPNSHNLQNTISENVAVTKIYNCSDCSFYHWHNTHTIKTITYHPKFTIIHFC

SEQ ID NO: 25000 - protein, 1419 aa, Cecropterus dorantes
MTNGALVFRNYAMRLRSRQIPQAGTREGESRPGPSGSGCPTYSGGGTASHMTTQSCTAVVDNTSHSSSHPSSPISSIHSFFPSPSSSPYSYQTQSFSSRSNTLTPESSETAQEGFAKSVRTTECMMRGNVVQNAIKAQVSVPIPNISRKRNKWNKDMNEYIMRTYFQITKLESENKNSYLSLLHTKFSDRFPHMQVSRQRVGDQRRAIIRNKLLKQQEIDNIYAEVQTELKNDKIVRNQNILPAQRMKWTSEHNETIMRSYFKITKLETDMTAYRTVLHNDFITHFPHLSHITVQRIADQRRVIINNQLIPKERLEAIKNEVSSELQTSRTNTLNNNSINSFETNRNNEIHSNETSLNNIDVNCLDHQNQTQLNSNPRNFEIDQIFLETLTYFNGTDPTIRQHIPKQKSSKKFARIINYINTIILPEHLNEATTFENFQNIIYSAAWTVAKSNGAKINIPSGDNRYQKRGNRKPTWQIRLEEKVKDLRAKIGRLTQFINGNRSKKIQQHINYIIETYQLHSVHEEANTQLSHFLDTLKQKLIVVSSRLKRYKTCTLRKTQNKQFITNEKQFYRGLKNIDNNQNSNHNFTLQHSYITPQHNTPTSTDLYNFWSSIWDNKISHKTDSEWIKDERARNNTTSEMQFQDISGVTLKNVLNKLQNWKAPGSDCIQNIWYKKFTHIHPYLLKYINNFIQNPQLLPKYILAGTTYMIPKDTTDQNNPAKYRPITCLQTIYKIITSCLADSIYEHLNINNILTEEQKGCRKLSQGCKEQLTIDAVIMKQVQGKKKDLYSMYIDYQKAYDSVPHSWLIEVLKIYKIHPQIISFLSSIMENWTTRLKLTTTHGTTETPLINIKRGIYQGDALSPLWFCLALNPLSNMLNQSKAGYLLQYLDNECDNQTNTRETRVSHLLYMDDIKLYADTKDDLHFLANITENFSHDIHMQFGIEKCKINSVLAGNTQQHRYQMESGEYIDPLDQNSGYKYLGYIQSKVIHHKEIKAMLTTQFKHRMNTIFRSQLNSKHLIKAVNTFAIPILTYSFGVINWTKTELKSLQRNINTSLTKHRKHHPRSCVQRMTLPRKEGGRGVIEIINLHNKQIKNLRVYFHHKTSTSKLHKAIVQNDLKLTPLNLSDRATQKNEEIRNIQTKILEWTQKSLHGRHRHDLSQANVDKIASNEWLRRGDLFPETEGFMIAIQDQVIETRNYQKYIMKSAIPTDLCRRCSSSSETIQHITGACKAVVQSDYKHRHDQVAKIIHQKLADKHNLISKPFKPYYEYNPEAVLDNSTHKLYFDRAILTDKTIHYNRPDITLIDKINKSAYIIDIAIPNSHNVQNTISEKISKYTDLKDEVTRMWQLRKVVIVPIVLSTTGIIPIQLKQSLSILNLPLHTIGHLQKAVILNTCRIVRKFLQIEKDSNTTDLNTTTT

SEQ ID NO: 25001 - protein, 1377 aa, Ectomis octomaculata
MRLRSRQIPQAGTREGESRPGPYGPGSPTYSGGGNASHMTSQSSTAVVSNSHVMSHPSSPISSTHSLFPSPNSSPLSYQTQPSSSRSSAVSPQPSGYILRGDVVQEAIPANIPAPISCEPRKRIKWSKDMNEYILRTYLQITKIETENKNNYLSILYTNFSNKFPHIKASRQRIGDQRRAIIRNKLLKQEEIDKIYAEVQTELKIIRTAANQDREKVVDQPRPTKQRMKWTTEHNESIIRSYLKITKLETDMTMYRTMLHQDFVTKFPNLSHISIQRIADQRRVIINNKLVSEARLEAIKTEVATELIELQEITINSEINNETLLTNIDVNRLNYKDASICTDHLPDVNNDVRNRHIDELFQETVTYFNDIDPTKRQHIPKQKTSKRLGSITHYINKILLPERLSEATSFETFQTLIYSAAWTAAKSNGAKIFIPARNNQYQSRGLHKPKWQIRLEKRVEELRKNIGRLTQFINGNRSRKLQEHINNIKERYKIHSVHEESNTQLSHFLDTLKQKLTVLSSRLQRYKTCTLRKTQNKLFITNEKQFYRDLRSADKEETVHHSSKNISSKQIAPTAEDIYKFWSSIWENDVNHKVDAEWIEDEKLSNTSVEEMEFGEISIETLKEVLNKCQNWKAPGSDCIQNYWYKKFTYAHSYLLKFINIFIKNPELLPKYITAGITYMIPKHKTDQINPENYRPITCLQTIYKIITSCLAETIYNHLNTNNILTEEQKGCRKLSQGCKEQLTIDSVIMKQVQEKRKDLYSMYIDYQKAYDSIPHSWLLEVLDIYKIHPQITGFLRNIMKNWTTRLKLKTAHSTIETSPINIKRGIYQGDALSPLWFCLALNPLSKMLNRISVGYLLKYDDGAADRQTNIEENRVNHLLFMDDLKLYADTEENLSNLVNITETFSHDIHMQFGIEKCKINSVKAGNIHEHKYKLKSGQYIDPLDQNHGYRYLGYVQSKLIHHKEIKTTLTTQFKNRINTIFKSKLNSKNLTKAVNTFAIPILTYSFGIIHWTKTDLKKLQRNINTSLTKHRKHHPRSCIQRMTLPRKEGGRGFIDITNLHNKQIKSLRTYFHVKSGTSKLHKSIVQNDKKFTPLNLSDCTNQKNEELTDIRTKISDWTQKVLHGRYRHDLDQDNVDRIASNEWLKRGELFPETEGFMMAIQDQVIETRNYQKYIMKSSIPTDLCRQCRSSSETIQHITGACKAIVQSDYKHRHDQVAKIIHQKLAIKHNLLPHTTQPFYKYTPETVLDSNTHKIYFDRAILTDKTTHYNRPDITLIDKVNKFAYIIDIAVPNSHNVQNTISDKLSKYTDLKDELTRMLQLQKTFIVPIVLSTTGIIPKQLKKSLKTLELPEHTFVTLQKTAILNTCRIVRKFLEFD

SEQ ID NO: 25002 - protein, 1419 aa, Cecropterus confusis
MTNGALVFRNYAMRLRSRQIPQAGTREGESRPGPSGSGCPTYSGGGTASHITTQSRTAVVDNTSHFISHPSSPISSTHSLFPLPTSSPYSYQTQSSSSKSNTLAPESSEAVQKAYAKSVHATECMMRGNVVQDATKAQISVPISNISRKRNKWNKDMNEYIMRTYFQITKLETENKNSYLPLLHTKFSDMFPYMQVSRQRVGDQRRAIIRNKLLKQHEIDNIYTEVQAELKNDNIATNQNILTVQRMKWTSEHNEMIIRSYFKITKMETDITAYRTVLHNDFITLFPHLSHITVQRIADQRRVIINNQLIPKERLEAIKKEVSAELITSQANALNNNIITSSETNRNNEIHSSETFLNNIDVSCLDHHNQPQLSSSLRNLEIDQIFQDTLTYFNGTDPTKRQYIPKQKSSKKFARIISYINTIILPGHLNESTTFETFQTIIYSAAWTAAKSNGAKINMTSGDNRNQQRSSRKPKWQIRLEEKVKDLRVKIGRLTQFINGNRSKKLQQHINYILETYKLHSIHEEANTQLSHFLDTLKQKLIVVSSRLKRYKTCTLRKNQNKHFISNEKQFYRDLKNGSNNENSNHNFTLEHSNITPQHNTPTSTDLYNFWSSIWDNKISHKVDAEWIKDERLRNITTSEMQFQDISGETFKKNLNKLQNWKAPGSDCIQNIWYKKFTHIHPYLLKYINNFIQNPHLLPKYILAGTTYMIPKDTTDQNNPAKYRPITCLQTIYKIITSCLADSIYEHLSTNNILTEEQKGCRKLSQGCKEQLTIDAVIIKQVQGKKKDLYSMYIDYQKAYDSVPHSWLIEVLKIYKIHPQIISFLCDIMENWTTRLKLTTTHGTTETPSINIKRGIYQGDALSPLWFYLALNPLSNMLNQSKSGYLLKFLDNEHDNQTNTRDTRVSHLLYMDDIKLYADTKDDLHFLANITEKFSHDIHMQFGIEKCKINSVLAGNTQQDRYQMESGEYIDPLDQNSGYKYLGYIQSKVIHHKEIKVMLTTQFKHRMNTILRSQLNSKHLIKAVNTFAIPILTYSFGVINWTKTELKSLQRNINTSLTKQRKHHPRSCVQRMTLPRKEGGRGLIDIINLHNKQVKNLRTYFHNKTSTSNLHKAIVQNDLKLTPLNLNDRATQKNEELRNIQTKILEWTQKSLHGRHRHDLSQANVDKRASNEWLRRGDLFPETEGFMIAIQDQVIETRNYQKYIMKSAIPTDLCRRCTSSSETIQHITGACKAIVQSDYKHRHDQVAKIIHQKLADKHNLISKPFKPYYEYNPEVILDSSTHKLYFDRAILTDKTIHYNRPDITLIDKINKSAYIIDIGIPNSHNVQNTISEKISKYTDLKDEVTRMWQLRKVVIVPIVLSTTGIIPIQLKQSLSTLNLPLHTIGNLQKAVILNTCRIVRKFLQIDKNSNTTDLITTTT

SEQ ID NO: 25003 - protein, 1348 aa, Chioides albofasciatus
MTTQSCSVVVDNNSSHIISHPSSPTSSSHSLFPSPSSSPYSYQTQSSSLRSNTLTPVSSECAQEEYVTPVRTTKRMLRGNVVQDAIQGEVSVPISNVPRKRNKWSKDMNKYILRTYLQITKLETENKNSYLPILYTQFVTKFPHMQVCRQRVGDQRRAIIRNKLLNQQEIDEIYAEVQVELKNEKIATNQNQNIMTGQRMRWTSEHNESIIRSYLKITKLETDMTAYRTLLHLDFINQFPHLAHITVQRVADQRRVIINNQLISGERLEILKKEVTAELQISRNNALDYNSTNTSVINSNENFLNDIDVHCLDHHDQQPNNDERNPEIDQTFQETLSYFTGTDPINRQHIPKQKSSKKFASIVHYINNTILPEHLTENSSFETLQTVIYSAAWTAAKTNGAKISVPPRENQYQNRSRRKPKWQIRLEEKVKDIRGKIGRLTQFMNGNNSRKLEQHIQYIKDTYKLHSVHEEENTQLSHFLDTLKQKLIVVSSRLKRYKTCTLRKTQNKHFITNEKQFYRDLRETGNNETSNFANSTGKQTTPNSEDLYKFWSSIWDNEVNHNADAEWIKDEKVRNITNAEMEFQEISMETLQNVLNKLQNWKAPGSDCIQNFWYKKFTHVHFYLHKYINSFIQSPHLLPKYILAGTTYMIPKDKQDQTNPAKYRPITCLQTIYKIITSCLADNIYEHLNANNILTEEQKGCKRLSQGCKEQLTIDAVIMKQVQEKKKDLHSMFIDYQKAYDSVPHSWLIEVLHIYKIHPQIITFLCNIMKDWTTRLRLTTTNGTIETPSINIKRGIYQGDTLSPLWFCLALNPLSKLLNLTKTGYTLKYLDSESDDPTDTREIRVNHLLYMDDIKLYADTKDDLHYLANITEKFSYDIHMQFGIDKCKVNSVQAGKAEQHRYQLESGEYIDPLDQNGGYKYLGYTQSKIIHHKDTKTMLTKQFKHRISTILKSQLNSKNIVKAVNTFAIPILTYSFGIINWTKTELKGLQRNINTLLTKHRKHHPRSCVQRMTLPRKEGGRGFIEITNLHNKQIKNLRTYFHHKAITSNLHKAVVQNDLKLTPLNLNARTSQKNEELINVQTKISEWTQKSLHGRHRHDLCQVNVDKSASNEWLRRGDLFPETEGFMIAIQDQVVETRNYQKHIMKSPIPTDLCRRCSSSSETIQHITGACKAIVQSDYKHRHDQVAKIVHQKLANKYNFIQHPLKPYYEYNPESILDNSTHKLYFDRAILTDKTIHYNRPDITLIDKANKVAYIIDIAIPNSHNVQNTISEKISKYTDLKDEVIRMWQLRKAIIVPIVISTTGIIPTQLKHSLNTLNLPIYTLISLQKAVILNTCRIVRKFLQVEKS

SEQ ID NO: 25004 - protein, 1419 aa, Cecropterus takuta
MTNGALVFSNYAMRLRSRQIPQAGTHEGESRSEPSGSGCSTYSGGGTASHKTTQSRTAVVDTTFHFTTHPSSPISSTHSLFPSPSSSSYSYQTQSSSSRSKTVTPESSEAAQEVYAKSVSPTQCIMRENVVQDATKAQAPVPISNISRKRNKWNKDMNEFIMRTYFQITKLESENKNSYLSLLHTKFSDRFPHMEVSRQRIGDQKRAIIRNRLLKQQEIDNIYAEVQTELKNDKIVINQNILPAQRMKWTSEHNETIMRSYLKITKLETDMTAYRTVLHNDFITFFPHLSHITVQRIADQRRVIINNQLIPKERLEAIKKEVSAELQTSQTNKLINNSINSFETNRNNEIHSNETSLNNIDVNCLDHQNQTQLSSNLRNFEIDQIFLETLTYFNGTDPTKRQHIPKQKSSKKFAKIISYIDTIILPEHLNEGTTFENFQNIIYSAAWTAAKSNGAKINITSGNNKYQNRGNRKPKWQIRLEEKVKDLRAKIGRLTQFINGNRSKKIQQHINYITETYQLHSVHEEANTQLSHFLDTLKQKLIVVSSRLKRYKTCTLRKTQNKHFITNEKQFYRGLKNIYNNENTNNNLTLRHSNIEPQHNTPTSEDLYNFWSSIWDNKINHKTDAEWIKDERLRNITTSEMQFQDISVETLNNVLNKLQNWKAPGSDCIQNFWYKKFTHIHPYLLKYINNFIQNPYTLPKYIMAGTTYMIPKDTTHQNNPAKYRPITCLQTIYKIITSCLADTIYEHLQTNNILTEEQKGCRKFSQGCKEQLTIDAVIMKQVQKKKKNLYSMYIDYQKAYDSVPHSWLIEVLKIYKIHPQIISFLSNIMENWTTRLKLTTTHGSTETSSINIKRGIYQGDALSPLWFCLALNPLSNMLNKSKAGYILKYLDIECDNQTNRLETRVSHLLYMDDIKLYADTKNDLHFLANITENFSRDIHMQFGIEKCKINSVLAGNAQQHRYQMESGEYIDPLDQHSGYKYLGYIQSKFIHHKEIKTKLTTQFKHRMNTIFRSQLNSKNLIKAVNTFAIPILTYSFGIINWTKTELKGLQRNINTSLTKQRKHHPRSCVQRMTLPRKEGGRGVIDIINLHNKQIKNLRTYFHHKTFISNLHKAIVQNDLKLTPLNLSDRTTQKNEELQNIQTKILEWAQKSLHGRHRHDLSQANVDKIASNEWLRRGDLFPETEGFMIAIQDQVIETRNYQKYIMKSAIPTDLCRRCSSSSETIQHITGACKAIVQSDYKHRHNQVAQIIHQKLANKHNLISKPLKPYYEYKPDAILDSRTHKLYFDRAILTDKTIHYNRPDITLIDKINKSAYIIDIAIPNSHNVQNTISEKISKYTDLKDEITRMWQLRKAVIVPIVLSTTGIIPLQLKQSLTTLNLPLHTISNLQKAVILNTCRIVRKFLQIEKDSNTTDSITTTS

SEQ ID NO: 25005 - protein, 1401 aa, Urbanus proteus
MTNGALVLSNYAMRLRSRQIPQAGTREGESRPGPSGSGCSTYSGGSTASHTITQSCTAVVDTTSHPNSHPSSPISSTHSLFPSPSSSPYSYQNQSPSSRSNSLTPVSSGRMLRGHVVQNAIPSEQSVPISNLTRKRNKWSKDMNKHIMRSYFQITKLETENKNSYLPILYTTFSKRFPHMKVSRQRVGDQRRAIIRNKLLKQLEIDKIYAEVQEELKNEKIETNQDILTGQRMRWTTEQNEAIVRYYFKITKLETDMTTYRTLLHDHFVTHFPHLSHITVQRIADQRRVIMNNRLITKERLETIKKEVSVELQISEQRLLNSSSIDSSETNIDSELNINDNFLTNIDVNCLNSQYQPELSNNVRNVEIDQTFLETLTYFTDIHPTKRQHIPKQKSSKKFARIVCYINNIILPEHLNETTTFETFQNIIYSAAWTAAKSNGAKINITPKDSRYQKNSRRKPKWQIRLEEKISDLRRKIGRLTQFMNGNRSSKLQKHINYIIETYKLHSVHEEENTQLSHFLDTLKQKLIVVSSRLKRYKTCTLRKIQNKYFIANEKQFYRDLRNTSSNETPNNNFTNTTLQQITPTSEKLYKFWSSIWDSEVNHKADAEWITDEKLRNFTTCEMEFHEISVETLTNVLNKLQNWKAPGSDCLQNFWYKKFTHAHPYLLKYINNFIQNPQLIPKYLMAGTTYMIPKDTTDQTNPAKYRPITCLQTIYKIITSCLANNIYEHLNANNILTEEQKGCRKSSQGCKEQLTIDAVIMRQVQEKKKDLYSMYIDYQKAYDSVPHSWLLEVLHIYKIHPQIINFLDNIMKKWTTQLKLTTQNGTTETPPINIKRGIYQGDSLSPLWFCLALNPLSKMLNLTKYGYILKYLDSEHNNQIDTQETKVSHLLYMDDIKLYAETKDDLHCLANITENFSHDIHMQFGIEKCKLNSVQAGKTQQHRYQMESGEYLYPLDQSSGYKYLGYAQSNTIHHKEIKTMLVTQFKNRLNTIFRTQLNSKNLVKAVNTFAIPILTYSFGIISWTKTELKSLQRNINTSLTKQRKHHPRSCVQRMTLPRKEGGRGIIEISNLHNKQIKNLRMYFHNKTLSSNLHKAIVQNDVKLSPLNLSDRATQKNEELINIQTKILEWTQKSLHGRHRHDLSQANVDKIASNEWLRRGDLFPETEGFMIAIQDQVIETRNYQKYIMKSSIPTDLCRRCSGASETVQHITGACKAIVQSDYKHRHDQVAKIIHQRLASMHNLISKPLKPYYEYNPETILDSSTHKLYFDRAILTDKTIHYNRPDITLIDKINKSAYIIDIAIPNSHNVQNTISEKISKYTDLKYEVARMWQLRKVVIVPIVLSTTGIIPIQLKQSFSTLNLPLYIYGSLQKAVILNTCRIVRKFLQVDKDLNITDAITSTT

SEQ ID NO: 25006 - protein, 1389 aa, Urbanus velinus
MRLRSRQIPQAGTREGESRPGPSGSGCSTYSGGSTASHTITQSGTAVVDTTSHPISHPSSPISSTHSLFPSPSSSPYSYQNQSPSSRSNSLTPVPSGRMLRGHVVQNAIPSEQSVPISNLTRKRNKWSKDMNKYIMRSYFQITKLETENKNSYLPILYTDFSNRFPHMQVSRQRVGDQRRAIIRNKLLKQQEIDKIYAEVQEELKNEKIGTNQDILTGQRMRWTSEQNEAIIRYYFKITKLETDMTTYRTLLHDQFVTHFPHLSHITVQRIADQRRVIMNNRLITKERLETIKKEVSVELQISEQRLLNSSSIDSSEKNRNSEININDNFLTNIDVNCLNSQYQPELSNNVRNVEIDQTFLETLTYFTDIHPTKRQHIPKQKSSKKFASIVCYINNIILPEHLNETTTFETFQNIIYSAAWTAAKSNGAKINITPKDSRYQKNSRRKPKWQIRLEEKISDLRRKIGRLTQFMNGNRSSKLQKHINYIIETYKLHSVHEEENTQLSHFLDTLKQKLIVVSSRLKRYKTCTLRKIQNKYFITNEKQFYRDLRNTSSNETPNNNFTNTTLQQITPTSEKLYKFWSSIWDSEVNHKADAEWITDEKVRNFTTCEMEFHEISVETLTNVLNKLQNWKAPGSDCLQNFWYKKFTHTHPYLLKYINNFIQNPQLIPKYLMAGTTYMIPKDTTDQTNPAKYRPITCLQTIYKIITSCLANNIYEHLNANNILTEEQKGCRKSSQGCKEQLTIDAVIMRQVQEKKKDLYSMYIDYQKAYDSVPHSWLLEVLHIYKIHPQIISFLDNIMKKWTTQLKLTTQNGTTETPPINIKRGIYQGDSLSPLWFCLALNPLSKMLNLTKCGYILKYLDSELNNQIDTQETKVSHLLYMDDIKLYAETKDDLHCLANITENFSHDIHMQFGIEKCKLNSVQAGKTQQHRYQMESGEYIDPLDQRSGYKYLGYAQSSTIHHKEIKTMLITQFKHRLNTIFRTQLNSKNLVKAVNTFAIPILTYSFGIISWTKTELNSLQRNINTSLTKHRKHHPRSCVQRMTLPRKEGGRGIIEISNLHNKQIKNLRIYFHNKTLSSNLHKAIVQNDFKLSPLNLSDRATQKNEELINIQTKILEWTQKSLHGRHRHDLSQANVDKIASNEWLRRGDLFPETEGFMIAIQDQVIETRNYQKYIMKSSIPTDLCRRCSGASETVQHITGACKAIVQSDYKHRHDQVAKIIHQRLASMHNLISKPLKPYYEYNPETILDTSTHKLYFDRAILTDKTIHYNRPDITLIDKINKSAYIIDIAIPNSHNVQNTISEKISKYTDLKDEVARMWQLRKVVIVPIVISTTGIIPIQLKQSLSTLNLPLYIYGSLQKAVILNTCRIVRKFLQVDKDLNITDAITSTT

SEQ ID NO: 25007 - protein, 892 aa, Urbanus sp.
MKKQTHNCHIFLDTLKQKLIVVSSRLKRYKNCTLRKVQNKHFITNEKQFYRSLRNTGNNETPANNTNITLQSTTPTSEDLYKFWSSIWDNKVNHRADAEWIKDEKLRNITTSEMEFHEISVETLKSVLNKLQNWKAPGSDCIQNFWYKKFTHAHPYLLKYINSFIQNPQSVPKYIMAGTTYMIPKDTSDQTNPAKYRPITCLQTIYKIITSCLANNIYNHLNINSILAEEQKGCKKFSRGCKEQLVIDSVITKQVQVKRKDLYSMYIDYQKAYDSVPHSWLIEVLHIYKIHPQIISFLSNIMNNWTTQLKLTTTNGTIETPLINIKRGIYQGDTLSPLWFCLALNPLSKMLNLTNFGYILKYQENECDNQTYTRETKVNHLLYMDDIKLYADTIDDLRRLAIITEQFSHDIHMQFGIEKCKTNSIQAGITQQQTYQMESGEYIDTLDERVGYKYLGYIQSKVIHHKEIKTMLTKQFKHRMNSILKSQLNSKNLIKAVNTFAIPILTYSFGVINWTKTELKSLQRNINTSLTKQRKHHPRSCVQRMTLPRREGGRGVIDIINLHNKQIRNLRIYFHHKTLTSNLHKAIVQNDLKLTPLNVSDRTTQKNEELINIYTKILEWTQKSLHGRHHHDLSQTSVDKIASNEWLRRGDLFPETEGFMIAIQDQVIETRNYQKYIMKSSITTDLCRRCNSSSETIQHITGACKAIVQSDYKHRHDQVANIIHQKLASKYNLISKPLKPYYEYKPEAILDSTTHKLYFDRAILTDKTIHYNRPDITLIDKANKSAYIIDIAIPNSHNVQNTISEKISKYTDLKDEVARMWQLRKVVIVPIVLSTTGIIPIQLKQSLNTRNLPLHTFGALQKAVILNTCRIVRKFLQVDTDLNTADSITTTT

SEQ ID NO: 25008 - protein, 1417 aa, Proteides mercurius
MTNGALVLRNYAMRLRSRQIPQAGTREGESRPGPSGSGCPTYSGGGTASHMTTQASTAVVDNSHHVIPHPSSSPISSTHSLFPSPNSSPNSYQTHSSSFRSDTLTPVLSECAQEADEKSVRTTKRMLRGNVVQNAIQAISVPISTLSRKRNKWSNDMNKYILRTYLQITKLETENKNSYLPTLHMKFTNKYPQMKVSRQRVGDQRRAIIRNKLLNQQQIDNIYIEVQTEFKNETIDTNQNQSILTGQRMKWTSEYNESIIRSYLKITKLETDMTTYRTLLHKEFIEQFPHLAHITVQRIADQRRVIINNQQISKERLAEIKREVTLELQMSQKVELNYNSNNISELNRNSEISCNETFLSNIDVHCLDHHDEAETNNYIRNPEIDNTFQETLTHFTHTNPIKRQHIPKQKSSKKFASIVNYINNIILPEHLNETTTFENFQTIIYSAAWTAAKTNGAKINISPRENSYKNKNKQKPKWQIRLEEKVKDLRRKIGRLTQFINGNRSRKLEQHINHIIDTYKIHTVHEKANTQLPHFLDTLKQKLIVVSSRLKRYKTCTLRKTQNKHFIINEKQFYRSLKNTTNNETSDHNFANNPSRQNTPNSEDLYKFWSSMWDNEVNHKADAEWLQEEKLRHITTEEMKFEEISAETLQNVLNKIQNWKAPGSDCIQNFWYKKFTHAHPYLLKYINNFIQNPQLLPKYIMEGTTYLIPKDATDQMNPEKYRPITCLQTIYKIITSCLATNIYEHLNTNNILTEEQKGCRKLSRGCKEQLTIDSVIMKQVQEKKKDLYSMYIDYQKAYDSVPHSWLVQVLHIYKINPQIISFLCNIMKNWTTRLKLTTTNGTIETPLINIKRGIYQGDALSPLWFCLAINPLSKMLSLTDIGYKLKYLDNEHDDQGSLREIRVNHLLYMDDIKLYADTKDDLYHLAKITENFSHDIHMQFGIEKCKLNSVVSGKTQQHRYQMESGEHIDPLDQTSGYKYLGYVQSKLIHHKEIKSMLTTQFKHRINVILRTQLNSKNIVKAVNTFAIPILTYSFGIINWTKTELKSLQRNINTSLTKHRKHHPRSCVQRMTLPRKEGGRGFIDITNLHNKQIKNLRMYFHDKTITSNLHKAIVQNDIKLTPLSLSDRTIQTNGQLTDIHTKLLQWTQKSLHGRHRHDLCQTNVDKIASNEWLRRGDLFPETEGFIIAIQDQVIETRNYQKYIMKSQIPTDLCRRCSSASETIQHITGACKAIVQTDYKHRHDQVAKIIHQKLAIKHNLVSYPLKPYYEYNPEAILDNKTSKLYFDRAILTDKTIHYNRPDIILIDKVNKSAYIIDIAIPNSHNMQNTIAEKLSKYIDLKDEVTRMWQLRKAIIVPIVLSTTGIIPTQLKHSLSTLNLPTHTFASLQKAVILNTCRIVRKFLQIEKSSNTADSTATIN

SEQ ID NO: 25009 - protein, 1401 aa, Urbanus evona
MTNGALVPSNYAMRLRSRQIPQAGTREGESRPGPSGSGCSTYSGGSTASHTITQSRTAVVDTTSHHISHPSSPISSTHSLFPSPSSSPYSYQTQSSSSRSNSLTPVPSESMLRGHVVQNAIQGEVSVPISNLSRKRNKWSKVMNEYIMRTYFQITKLETENKNSYLPILYSKFSERFPHIHVSRQRVGDQRRAIIRNKLLKQQEIDKIYTEVQAEFKNENTETNQNISTGQRMRWTSEQNEVIIRSYFKITKLETDMTTYRPLLHDNFITHFPHLSHISVQRIADQRRVIMNNQLIPQEHLETIKKEVSAELQILEESVLNSNSINSSETNRNSEIISNETFLNNIDINCLNSQDQPGLSSNERNAEIDQTFQETLIYFTDTNPTKRHHIPKQKSSKKFASIVSYINNIILPEHLNKTTNFETFQNTIYSAAWTAAKCNGAKININPKDSKYQKNSSRKPKWQIRLEEKITDLRRKIGRLTQFMKGNRSSKLQQHINYIIETYKLHTVHEEANTQLSHFLDTLKQKLIVVSSRLKRYKTCTLRKTQNKYFITNEKQFYRSLRNTGSNENSNHNLTNTTLQQITSTSEDLYKFWSSIWDNEVNHRADAEWIKDEKFRNVTTGEMEFQEISVETLKNVLNKLQNWKAPGSDCLQNFWYKKFTHAHPYLLKYINNFIQNPHLIPKYIMAGTTYMIPKDTTDRFNPAKYRPITCLQTIYKIITSCLANNIYEHLNTNNILTEEQKGCRKLSQGCKEQLTIDAVIMKQVQEKRKDLYSMYIDYQKAYDSVPHSWLLEVLQIYKIHPQIIRFLSNIMKNWTTQLKLTTPTGTTETPSINIRRGIYQGDALSPLWFCLALNPLSNMLNLTKSGYILKFLDSEDDNHTDIQETRVSHLLYMDDIKLYADTQDDLHCLANITENFSRDIHMQFGIEKCKLNSVQAGKTQQHTYQMESGEYIDPLDQNSGYKYLGYVQSNVMHHKAIKTMLVTQFKHRLNTIFRSQLNSKNLFKAVNTFAIPILTYSFGVINWTKTELKSLQRNINTALTKQRKHHPRSCVQRMTLPRKEGGRGIIEISNLHNKQIKNLRQYFHNKTLTSNLHKAIVQNDLKLSPLNLSDKATQKNEDLINMQTKLLEWTQKSLHGRHRHDLCQANVDKIASNEWLRRGDLFPETEGFMIAIQDQIIETRNYQKYIMKSSIPTDLCRRCSSSSETIQHITGACKAIVQSDYKYRHDQVAKIIHQRLASMHNLIPKPLKPYYEYNPETILDSSTHKLYFDRAILTDKTIHYNRPDITLIDKANKSAYIIDIAIPNSHNVQNTISEKIAKYTDLKDEVTRMWQLRKVVIVPIVLSTTGIIPIQLKQSLNTLNLPFHISGSLQKAVILNTCRIVRKFLQVDKDLNTTDTVTATT

SEQ ID NO: 25010 - protein, 1401 aa, Astraptes hopfferi
MTNGALVFKTYAMRLRSRQIPQAGTREGESRPGPSGSGCSTYSGGSTASHTITQSRTAVVGNTSHSISHPSSPISSAYSQFPSPSSSPYSYQTQSSSSRSNSLTPVSSESMLRGHVVQNAIQGEISVPISNPSRKRNKWSRDMNEYIMRTYLQITKLETENKNSYLPILYTKFSDRFPHMQVSRQRVGDQRRAIIRNKLLKQQEIDKIYAEVQAEFKNEKIATNQNILTGQRMRWTSEQNEAIIRSYLKITKLETDMTAYRTVLYDHFITQFPHLSHLTVQRIADQRRVVMNNQLITVERLDTIKKEITAELQVSEQSMFNNNSIDSSETNRNNEINSNETSLNNIDVNSLNSQNQPELSSNVRNTEIDETFQETLTYFTDTDPTKRQHIPKQKSSKKFASIVCYINNIILPEHLNEATTFETFHNIIYSAAWTAAKSNGAKINISPKDSRFNKNSKRKPKWQIRLEEKITDLRRKIGRLTQFMNGNRSIKLQQHINYIIDTYKLHTVHEEANTQLSHFLDTLKQKLIVVSSRLKRYKICTLRKTQNKYFISNEKQFYRALRNTGSNETPNYNCTNPTLQQVTPTSEDLYKFWSSIWDNEVNHKADAEWIKHEKLRNVTTSEVEFQEISLKTLTNVLSKLQNWKAPGSDCLQNFWFKKFTHAHPYLLKYINYFIQNPQLIPKYIMAGTTYMIPKDNTDQINPAKYRPITCLQTIYKIITSCLADNIYEHLNSNNILTEEQKGCKKLSQGCKEQLTIDSVIMRQVQEKRKDLYSMYIDYQKAYDSVPHSWLLEVLQIYKIHPQIINFLSNIMKNWTTRLKLTTPNGTTETQSINIKRGIYQGDTLSPLWFCLALNPLSKMLNSNKSGYILKYLDSENDNQINMQETKVSHLLYMDDIKLYADTKDDLHCLANITENFSHDIHMQFGIEKCKVNSVQAGKTQQHRYQLESGEYIDPLDQNSGYKYLGYAQSNGIHHKEIKIMLITQFKHRLNTIFRSQLNSKNLFKAVNTFAIPILTYSFGVINWTKTELNNLQRNINTSLTKQRKHHPRSCVQRMTLPRKEGGRGIIDISNLHNKQIRNLRTYFHHKTLTSNLHKAIVQNDSKLSPLKLSERATQKNEEQISIDTKILEWTQKSLHGRHRHDLSQTNVDKIASNEWLRRGDLFPETEGFMIAIQDQVIETRNYRKYIMKSSIPTDLCRRCNSSTETIQHITGACKAIVQSDYKHRHDQVANIIHQKLASKYNLIPNPLKPYYEYSPEAILDSRTHKLYFDRAILTDKTIHYNRPDITLIDKANKTAYIIDIAIPNSHNVQNTISEKISKYTDLKDEVARMWQLRKVVIVPVVISTTGIIPIQLKQSLSILDLPSHTFGTLQRAVILNTCRIVRKFLQVDRDLNTTDSIAATT

SEQ ID NO: 25011 - protein, 1420 aa, Autochton zarex
MTNGALVLKNYAMRLRSRQIPQAGTREGESRPGPSGSGCPTYSGGGTASHMTTQSCTAVVDNTSHFISHPSSPISSTHSLFPSPSSSPYSYQTQSSSSRSNTLTPESGEAAQEPYAISVCTTELKLRGNVVQDATKAQVSVPIPNISRKRNKWNKDMNEYIMRTYLQITKLETENKNSYLSPLHMKFSDKFSHMQVSRQRVGDQRRAIVRNHLLKQHEIDKIYAEVETEFKNDKIANNQNILTTRRLKWTSEHNETIIRSYFKITKLETDMTAYRTVLHNDFITLFPHLSHITVQRIADQRRVIINNQLISKERLEAIKKEVSDELQKSQTYALNNSCINSSETNRNNETNSNETFLNNIDVHCLDHQNQPIVSSNLRNLEIDQIFQETLSHFNGTDPTKRQHIPKQKSSKKFAKIINYIDTIILPEHLNEATTFETFQSIIYSAAWTAAKSNGAKINITSNDNRYQKRSNGKPKWQIRLEEKVKDLREKIGRLTQFINGNRSRKLQQNINYIIETYKLHSVHEEANTKLTHFLDTLKQKLIVVSSRLKRYKTCTLRKSQNKHFITNEKQFYRGLKNIGNNETSNHNITFQHSNVTPQYNAPTSEDIFNFWSSIWDNKISHKTDAEWIKDERLRNSTTREMQFQEIYEETLKNVLNKLQNWKAPGSDCIQNFWYKKFTHIHPFLLKYINNFIQNPQLLPKYIMAGTTYMIPKDTTDQSNPAKYRPITCLQTIYKIITSCLADNIYEHLNTNNILTEEQKGCRKLSQGCKEQLTIDAVIMKQVQAKKKDLYSMYIDYQKAYDSVPHSWLIEVLNIYKIHPQIISFLSNIMENWTTRLKLTTSHGTTETPPINIKRGIYQGDALSPLWFCLALNPLSNMLNLTKSGYKLKYSDSECDNQTNIQQRTVSHLLYMDDIKLYADTKDELHFLANMTENFSNDIHMQFGVEKCKINSVLAENTQQHRYQMESGEYIDPLDQNSGYKYLGYIQSKVIHYKEIKTMLTTQFRHRMNTIFRSQLNSKNLIKAVNTFAIPILTFSFGVINWTKTELKSLQRNINTSLTKQRKHHPRSCVQRMTLPRKEGGRGVIEIINLHNKQVKNLRTYFYHKAFTSNLHKAIIQNDLKLTPLNLSDRTTQKNEELTNIQTKILEWTQKSLHGRHRHDLSQGNVDKIASNEWLRRGDLFPETEGFMIAIQDQVIETRNYQKYIMKSAIPTDLCRRCNSSSETIQHITGACKAIVQSDYKHRHDQVAKIIHQKLASKHNLITKPLKPYYEYNPEAILDSRTHKLYFDRAILTDKTIHYNRPDITLIDKFNKSAFIIDIAIPNSHNVQNTISEKISKYTDLKDEVTRMWQLRKVVIVPIVISTTGIIPLQLKQSLITLDLKPHTIGTLQKAVILNTCRIVRKFLQIEKDSNTTTDLITTTI

SEQ ID NO: 25012 - protein, 1309 aa, Cecropterus evenus
MTNGALVFKNYAMRLRSRQIPQAGTREGESRPAPSGSGCPTYSGGGTASHITTQSCTAVVDYTSHFISHPSSPISSTHSLFPSPLSSPYSYQTQSYSSRASTLTPESTEASQEVNAISVRSTECMLRGNVVQNATKAQVTVPISNILRKRNKWDKDMNEYIMRTYFQITKLETENKNSYLSLLHAKFSDNFPQMQVSRQRVGDQRRAIIRNKLLKQHEIDNIYAEVQAQFKNDKIIRNQNISTSQRIKWSSEHNETIIRSYFKITKLETDMTAYRSILHNEFITLFPHLSHITVQRIADQRRVIINNQLIPKERLEAIKKEVSEELQISQSIALNNNSNNSLETNRNDEICCTETSLNNIEVNCLDHQNPLNENVNLRNFEIDQIFKETLRYFNGTDPTKRQHIPKQKTSKKMARIINYIDTIILPEHLNEATDFETFQCIIYSAAWTAAKSNGAKINLTPSNNKYVKRFSRKPKWQIRLEEKVKDLRGKIGRLTQFINGNRSKKLQQHINYIIEAYKLHSVHEEANTQLSHFLDTLKQKLIVVSSRLKRYKNCTLRKTQNKHFIINEKQFYRGLKNTVSNETFNHNITPRHSNTTQQHNTPTSEDLFNFWSSIWDNKINHKNAEWINDERLRNITTSEMQFEDISGDTLKNVLSKLQNWKAPGSDCIQNFWYKKFTCIHPYLLKYINNFIQNPHLLPKYIMAGTTYMIPKDTTDQSNPAKYRPITCLQTIYKIITSCLADNIYEHLNTNNILTEEQKGSRKLSQGCKEQLTIDAVIMKQVQEKRKDLYSMYIDYQKAYDSVPHSWLVEVLKIYKIHPQIISFLCNIMENWTTRLKLTTTGGTTETPAINIKRGIYQGDALSPLWFCLALNPLSNMLNETKAGYILKYLDSECDSQTNIQEIRVNHLLYMDDIKLYADTKDELHCLAKVTENFSRDINMQFGIEKCKINSILMGNTQQHRYQMESGEYIDPLDQNNGYKYLGYIQSKTIHHKEIKTMLTTQFKHRMNTIFRSQLNSKNLIKAVNTFAIPILTFSFGIINWTKTELKCLQRNINTALTKQRKHHPRSCVQRMTLPRKEGGRGVIDIINLHNKQIINLRTYFHHKTFASNLHKAIVQNDLKLTPLNLSDKTTQKNEELINMQTKILEWTQKSLHGRHRHDLSQATVDKIASNEWLRRGDLFPETEGFMIAVQDQVIETRNYQKYIMKSAIPTDLCRRCSSSSETIQHITGACKAIVQSDYKHRHDQVAKIIHQKLASKHNLISKPFKPYYEYNPEAILDSSSHKLYFDRAILTDKKKKISRFLQKYFLKHL

SEQ ID NO: 25013 - protein, 1351 aa, Cecropterus bathyllus
MTTQSRTAVVDNTSHFISHPSSPISSTHSLFLSPSSSPHSYQTQSSSSTSNSLTSESSEAVQESMQATECMMRGNVVQDASKAQISVPISNISRKRNKWNKDMNEYIMRTYFQITKLETENKNSYLPLLHTKFSDRFPYMQASRQRVGDQRRAIIRNNLLKQQEIDNIYTEVQAELKNDKIATNQNMLTAQRMKWTSEHNETIIRSYFKITKLETDMIAYRTVLHNDFITIFPHLSHITAQRIADQRRVIINNQLIPKERLEAIKKEVSAELITSQTNALNEIHSNETLDDIEVNCLDHQSQPQLSSNLRNLEIDQIFQDTLTYFNGTDPTKRQHIPKQRSSKKFARIISYIDTILLPEHLNESTTFETFQTIIYSAAWTAAKSNGAKINITSGDNRYQKRSSRKPKWQIRLEEKVKDLRGKIGRLTQFINGNRSKKLQQHINYILETYKLHSIHEEANTQLSHFLDTLKQKLIVVSSRLKRYKTCTLRKTQNKHFITNEKQFYRGLKNVSNNENSNHNFTLHHSNITPQHNTPTSTDLYNFWSSIWDYKISHKTDAEWINDERLRNITTSEMQFQDISGETLKNVLNKLQNWKAPGSDCIQNIWYKKFTHIHSYLLKYINNFIQNPQLLPKYILAGTTYMIPKDTTERNNPAKYRPITCLQTIYKIITSCLADSIYEHLNANNILTEEQKGCRKLSQGCKEQLTIDAVIMKQVQGKRKDLYSMYIDYQKAYDSVPHSWLIEVLKIYKIHPQIISFLCDIMENWTTRLKLTTAHGTTETPPINIKRGIYQGDALSPLWFCLALNPLSNMLNQSKSGYLLKYLDNECDNQTNTREIRVSHLLYMDDIKLYADTKDDLHCLANITENFSHDIHMQFGIEKCKINSIVAGSTQQQRYQMESGEYIDPLDQNSGYKYLGYIQAKVIHHKEIKAMLTTQFKHRMNTIFRSQLNSKHLIKAVNTFAIPILTYSFGVINWTKTEIKSLQRNINTSLTKQRKHHPRACVQRMTLPRKEGGRGIIDIINLHNKQIKNLRKYFHHKTSTSNLHKAIVQNDLKLTPLNLNDRATQKNEELTNMQTKILEWTQKSLHGRHRHDLSQANVDKKASNEWLRRGDLFPETEGFMIAIQDQVIETRNYQKYIMKSAIPTDLCRRCSSSSETIQHITGACKAVVQSDYKHRHDQVAKIIHQKLADKHNLISKPFKPYYEYNPEAILDSSTHKLYFDRAILTDKTIHYNRPDITLIDKSNKSAYIIDIAIPNSHNVQNTISEKISKYTDLKDEVTRMWQLQKVVIVPIVLSTTGIIPIQLKHSLTTLNLPLHTIGNLQKAVILNTCRIVRKFLQIEKDSNTRDLITTIT

SEQ ID NO: 25014 - protein, 1176 aa, Cecropterus toxeus
MKWTSEHNETIMRSYLKITKLETDMTAYRTVLHNDFITFFPHLSHITAQRIADQRRVIINNQLIPKERLEAIKKEVSAELQTLQTSQTNTLNNNSINSFETNRNNEIHGNETSLNNIDVNCLDHQNQTQLSSNLRNFEIDQIFLDTLTYFNGTDPTKRQHIPKQKSSKKFARIISYIDRIILPEHLNDTTTFENFQNIIYSAAWTAAKSNGAKININSGDNRYQNRGNRKPKWQIRLEEKVKDLRAKIGRLTQFINGNRSKKIQQHINYITETYQLHSVHEEANTQLSHFLDTLKQKLIVVSSRLKRYKACTLRKTQNKHFITNEKQFYRGLKNIYNNENTNNNLTLRHSNITPQHNTPTSEDLYNFWSSIWDNKINHKTDAEWIKDERLRNITTSEMQFQDISVETLNNVLNKLQNWKSPGSDCIQNFWYKKFTHIHPYLLKYINNFIQNPYVLPKYILAGTTYMIPKDTTDQNNPAKYRPITCLQTIYKIITSCLADNIYEHLQTNNILTEEQKGCRKLSQGCKEQLTIDAVIMKQVQEKKKNLYSMYIDYQKAYDSVPHSWLIEVLKIYKIHPQIISFLSNIMENWTTRLKLTTTHGSTETPSINIKRGIYQGDALSPLWFCLALNPLSNMLNKSRAGYILNYLDIECDNQTNRPETRVSHLLYMDDIKLYADTKNDLHCLANITENFSRDIHMQFGIEKCKINSVLAGNAQQHTYRMESGEYIDPLDQHSGYKYLGYIQSKLIHHKEIKTKLTTQFKHRMNTIFRSQLNSKNLFKAVNTFAIPILTYSFGIINWTKTELKGLQRNINTSLTKQRKHHPRSCVQRMTLPRKEGGRGVIDIMNLHNKQIKNLRTYFHHKTFTSNLHKAIVQNDLKLTPLNLSDRTTQKNEELQNIQTKILEWAQKSLHGRHRHDLSQANVDKIASNEWLRRGDLFPETEGFMIAIQDQVIETRNYQKYIMKSAISTDLCRRCSSSSESIQHITGACKAIVQSDYKHRHDQVAQIIHQKLANKHNLISTPLKPYYEYKPDAILDSRTHKLYFDRAILTDKTIHYNRPDITLIDKINKSAYIIDIAIPNSHNVQNTIAEKISKYTDLKDEITRMWQLRKAVIVPIVLSTTGIIPLQLKQSLSTLNLPLHTISYLQKAVILNTCRIVRKFLQIEKDSNTTDSITTTT

SEQ ID NO: 25015 - protein, 1434 aa, Pyrgus malvae
MRLRSRVIPQAGTREGESRPEPSSSGSPAYSGVGTASHSTAQSSIVTVDFSNNNNNSSNVLLIPQPVTEQVDSSTPTSPSGSLFESPASSPYSYEEISTPLSRSTTPSPLSIADRLVRRGRSVRCNTNKCLVNSTSNQAKGDRMLKNFVQETIEVNEPVPIISSSQKRFKWSNNVNEYILRTYYQITKLESENKTCYLPILYEKFLNQFPHIQVSRQRIGDQRRAIIRNNLIKKQERDRIYAEVKEELEKNIDHQTQTLNTVIDVNQRMRWTTEHNEAIIRTYYKITELETNMTTYRSRLHQEFINLFPQLSHLTVQRIADQRRAIVNNRQISQKRLESIKQEVATELQMSQDRAAQDNNINSSENISCVGIENNDNFLNQIEINCLIDDQVESTGTKRNIKLDSTFKEALTFFTGTDPTNRQYIPRQKTSKKLASIIHYINDIILPEELDKSASFETFQTIIYSAAWTTAKINGAKISLSPKVSLQFKKRDRKPKWQIRLEKKIEDLRCKIGRLTQFIKGNRGKKLEKHINQILVQYKIHSIHEEPNKQLSHFLDTLKQKLIVASSRLRRYKACTLRKIQNKLFASNEKQFYRSLRLMDVNGLKYPKPNTDSCEPTQPTAEELHKFWSSIWNHDVSHNKQAEWIKDQACRNEGTPEMEFDQVSLETLQKVIGKLQNWKAPGSDFIQNFWYKRFTHSQPYLLHHINNFLNDPLLLPEYITAGITHMISKDTNDTRNPSKYRPITCLQSIYKIITSCLAETIYTHLNTNNILTEEQKGCRKLSQGCKEQLTIDSVLINKVQERKKSLYSMYIDYQKAYDSIPHSWLIEVLKIYKIHPKVINFLQNIMINWTTRLRISTVNGPIETSPINIKRGLYQGDALSPLWFCLALNPLSKMLNLTDAGYPLKYKHNTGTSSETSIEDSIHEKRINHLMYMDDIKLYANTIDDLHRLTKITELFSQDIGMKFGIEKCKINSIEAGKIIQLNRYQTAAGEFIDPLDPNSGYKYLGYTQSRQIHHKEIKVKLKSQFTHRLNTILKSQLNSKHITKAVNTFAVPILTYSFGIINWTKTELKQLQRKMNTLLTKHRKHHPRACVQRMTLPRTERGRGFIDIVHLHSSQIKNLRHYFHAKATKSILHKAIVYNDNKLTPLNLNNNIPESNEEQTNRQTKILEWAQKSLHGRHRNDLCQINVDKMASNEWLRRGELFPETEGFMVAIQDQVVETRNYQKFIMKVPIPTDTCRRCSSSSETIQHITSACKSIAQSDYKHRHDQVANIIHQKLAIKHTLTSQPIKPYYEYRPDSVLENNTHKLYFDRANLTDKTIHYNRPDIMLIDKCNKSAYIIDIAIPNTHNIQNTISEKLTKYTELKEEICRMWRIQKATIVPIVLSATGIIPKQLKQALTTLDLPAITSVSLQKAVILNTCRIVRKFLQTDKDKTS

SEQ ID NO: 25016 - protein, 1434 aa, Pyrgus malvae
MRLRSRVIPQAGTREGESRPEPSSSGSPAYSGVGTASHSTAQSSIVTVDFSNNNNNSSNVMLIPQPVTEQADSSTPTSPSGSLFESPASSPHSYEEISTPSSRSTTPSPLSNADRPVRRGRSVRCNTNKCLVNSTCNQAKGDRMLKNVVQETIEVNEPVPIISSSQKRFKWSNNVNEYILRTYYQITKLESENKTCYLPILYEKFLNQFPHIQVSRQRIGDQRRAIIRNNLIKKQERDRIYTEVKEELEKNIEHQTQTLNTVIDVNKRMRWTTEHNEAIIRTYYKITELETNMTTYRSRLHQEFINLFPQLSHLTVQRIADQRRVIVNNRQISQKRLETIKQEVATELQMSQDRAAQDNNINSSENISCVGIENNDNFLNQIEINCLIDDQVESTGTKRNIKLDSTFKEALTFFTGTDPTNRQYIPRQKTSKKLASIIHYINDIILPEELEKSASFETFQTIIYSAAWTTAKINGAKISLPPKVSLQFKKRDRKPKWQIRLEKKIDDLRCKIGRLTQFIKGNRGRKLEKHINQILVQYKIHSIHEEPNKQLSHFLDTLKQKLIVASSRLRRYKACTLRKIQNKQFASNEKQFYRSLRLMDVNGLKYPKLNTDSCEPTQPTAEELHKFWSSIWNHDVSHNKQAEWIKDEACRNEGTPEMEFDQVSLETLQKVIGKLQNWKAPGSDFIQNFWYKRFTHSQPYLLHHINNFLNDPLLLPEYITAGITHMISKDTNDTKNPSKYRPITCLQSIYKIITSCLAENIYTHLNTNNILTEEQKGCRKLSQGCKEQLTIDSVIINKVQERKKSLYSMYIDYQKAYDSIPHSWLIEVLKIYKIHPKVINFLQNIMINWTTRLRISTVNGPIETSPINIKRGIYQGDALSPLWFCLALNPLSKMLNLTDAGYPLKYNHNTGTSTETSIEDSIHEKRINHLMYMDDIKLYANTIDDLHRLTKITEVFSQDIGMKFGIEKCKINSIEAGKIIQLNRYQTAAGEFIDPLDPNSGYKYLGYTQSRQIHHKEIKVKLKSQFTHRLNNILKSQLNSKHITKAVNTFAVPILTYSFGIINWTKTELKQLQRKMNTLLTKHRKHHPRACVQRMTLPRTEGGRGFIDIVHLHSSQIKNLRHYFHAKATKSILHKAIVYNDNKLTPLNLNNNIPQSNEEQTNRQTKILEWAQKSLHGRHRNDLCQINVDKMASNEWLRRGELFPETEGFMVAIQDQVVETRNYQKFIMKVPIPTDTCRRCSSSSETIQHITSACKSIAQSDYKHRHDQVANIIHQKLAIKHTLTSQPIKPYYEYRPDSVLENNTHKLYFDRAILTDKTIHYNRPDIMLIDKCNKSAYIIDIAIPNSHNIQNTISEKLTKYTELKEEICRMWRIQKATIVQIVLSATGIIPKQLKQALTTLDLPAITSVSLQKAVILNTCRIVRKFLQTDKDKTS

SEQ ID NO: 25017 - protein, 1382 aa, Clito sp.
MERETNRYNLRSLLGGRRGASGAGAGCFSMRDTGDGKLNRRAPVTQDATAGRRELNKRARGVEATAETTEEDDDATTTSSLFQSTPSTRPSYMTRSKSAMSSTTTAESVVQDVNLDEELVPTTAAPGTRRRWTPEMNMFILRTYLQLTSLDTDTNTYLEPLHVKFIEKFPDMDVSRQRVGDQRRAIIRNKLLPQNTIDRIYKEVEEEINRLQDSLLTATHNAHTTHNTNITHTTQTQPKPSKTQNSQTQSRMRWTNEQNETIIRSYYLITHLETNRTAYRQQLHEAFITAFPSLAHLGEQRIADQRRTIIHNKYISDTRLNEIKQQVTEELSQSLNNLNNYTSITHSTQSTLDTQPSNNNDNDMQFLNSIQLNLPEKAPCNIQLEREQLIDQTFEQSFQYFKNLSPVSRSYIPKQKSSKSLTKIVRYLNEKIIPEKVNMDTEFTTLQTVIYSAAWTAAKCNGAKISIPVREPQKQYKTERKPKWQIRLEKKVEDLRKKIGRLTQFMTGNRDNKLQNYINEIRANYKIHTTHEEPNTELTHFLDTLKQKLSVVASRLKRYKNCTLRKSQNTYFTSNEKQFYRSLKTTTSNNINKTPPIDTQNNIEPEELQRFWASIWEDGTNHDTQAHWIKEEKAHYSTIKEMDFQCISADTFKNVINKLQNWKSPGSDCIHNFWYKKFTHIHPYLLYHINNFVENPQQLPKYVTAGTTFMIPKDLTDYKNPAKYRPITCLQTIYKIISACLTENIYKHLNINNILAEEQKGCRKQSQGCKEQLTIDAIIMKQVIEKRKNLYSTYIDYQKAYDSVPHSWLVETLNIHKIHPKIINFLEFAMKNWTTRLKLNLTDVAIETTPINIKRGIYQGDTLSPLWFCLALNPLSRILNSTNIGYILPYTDNGNLVRSSVGEKRLNHLMYMDDIKLYADTEKDLHNLIDITQKFSTQICMKFGIEKCKINSIESGKIIQNAYKIESGEHIEPIDPDGGYKYLGYVQSKLIHHKEIKTTLIKQFKHRLNIILKSQLNSRNITKAVNSFAIPILTYSFGIINWNKGELKNLQRIINTSHTKHRKHHPRSCIQRMTLPRAEGGRGYIDIFNLHNKQIENLRSYFHQKSTESDLHKAITQNDKKLTPLNLSNETLQNNTDRQTDIQNKILEWTQKSLHGRHRKDLCQSNVDKIASNEWLRRGELFPETEGFMIAIQDQVIETRNYQKYIMKSHIPTDSCRRCGSSSETIQHITSACKLLTQTDYKHRHDQVAKIIHQKLVIKHNLTSQPSKPYYEYKPETVLENNNYRIYFDRAILTDKTVHYNRPDITLIDKRNKLAYLIDIAVPNSHNIQNTISEKLTKYIELKEEICRMWQIQKAVIVPIVISTTGIIPIQLKQSLDTLNLP

SEQ ID NO: 25018 - protein, 1428 aa, Myrinia binoculus
MERDINRYNLRSLLGGRRGASGAGAGCFSMRDTGDGKLNRRAPVTQDATAGRRELNKRAHGVEATAETTEDDDATTTSSLFSSIPSTRRSYMTRSKSALSSTTTAESVVQDVPDDELVPTTAAPGTRRRWTPEMNMFILRTYLQLTSLDMDTNTYLEPLHVKFIEKFPNMNVSRQRVGDQRRAIIRNNLLPQNTIDRIYKEVEEELNKLQASLLSSTHTTHTTHNTHTTHTTHNTHTTHTTHTTHTTHTTHNTQTKPKPTKIQKSQAQNKMRWTNEQNETIIRSYYLITHLETNKTAYRQQLHEAFVTAFPSLAHLSQQRIADQRRSIIHNKYISDIRLNEIKRQVTEELSQNLNNLNNYASITQSSQPTLDTHSNTDNDMQFLNSIQLNLPEKASCSTQLEREQLIDQTFEQSFQYFKDLCPVSRSYIPKQKPSKTLAKIVHYLNEIIIPEKVNIDTEFTTLQTVIYSAAWTAAKCNGAKISIPVREIQNQYKTERKPKWQIRLEKKIEDLRKKIGRLTQFVKGNRGNKLQNYINEIRTNYKIHSTHEEPNTELTHFLDTLKQKLSVVASRLKRYKTCTLRKSQNKYFTSNEKQFYRSLKTTTGNDINKSSSTTTTQNDIAPEDLQRFWSSIWEDGTSHDKQAQWINDEKTHYSTIKEMDFQCISAETFKNVMNKLQNWKSPGSDCIHNFWYKKFTHTHPYLLYHINNFIKNPQQLPRYITAGTTFMIPKDTTDYKNPAKYRPITCLQTIYKIITACLTENIYKHLNINNILAEEQKGCRKQSQGCKEQLTIDAIIMKQVIEKRKNLYSIYIDYQKAYDSVPHSWLIETLNIYKIHPKIINFLEFAMKNWTTRLKVTSTNVAIETTPINIKRGIYQGDTLSPLWFCLALNPLSKMLNSTKTGYLLPYTDNGNLVGSPVGEKRLNHLMYMDDIKLYADTEKDLHSLIDITEKFSTEICMKFGIEKCKINSIEGGKILQNAYQIESGEHIEPIDPDDGYKYLGYTQSKLIHHKEIKTTLTKQFKHRLNIILKSQLNSRNITKAVNSFAIPILTYSFGIIKWNKAELKSLQRSINTSHTKHRKHHPRSCVQRMTLPRVEGGRGYIDILNLHNKQIENLRSYFHRKSAESDLHKAIAQNDIGLTPLNLSNETLQSNTDKQTDIQTKILEWTQKSLHGRHRKDLCRSNVDKIASNEWLRRGELFPETEGFMIAIQDQVIETRNYQKYIMKSPIPTDSCRRCGNSSETIQHITSACKSIAQTDYKHRHDQVAKIIHQKLAIKHNLASQPPKPYYEYKPETVLENSNHRLYFDRAILTDKTVHYNRPDITLIDKHNKLAYLIDIAIPNSHNVQNTISEKLTKYIELKEEICRMWQLQKAVIVPIVVSATGIVPTQLKQSLDTLNLPSHIIIFLQKAVILNTCRIVRKFLQEKTL

SEQ ID NO: 25019 - protein, 1338 aa, Azonax typhaon
MRLRNRQLPQAGTLTGESRPGPSGPGCPTYSGGGNVSHVTIQSCTAVVNSSRSPSHTTSNSLSSSSSTSDLSPHSSQFQQSSSQSCTAITLSCDNVQEAHGSNNTTVLGDVVQETSQVKEPVPITSISNKRKKWSKNMNEYILRTYLQITKLESENKNSYLPTLHEMFTNKFPQMQVSRQRVGDQRRAIIRKNLIQQQETDRIYAEVKTQLQKEGDMQIINQNISIIGQRMRWTAEHNEAIIRAYFKITKLETDMTSYRTLLHQDFIDLFPHLAHVTVQRIADQRRIIINNNLISNERLRIIKQEVAKEISIAEECTATYNSINLIETNSEELENNENFLNSIDVNCLHNNFPESSATKINLDLEETFKEALTFFTDINPTSRHYIPKQKSSKRLGSIIHYINKTILPKYLDKEVCFETFQTVIYSAAWTAAKNNGARISIPTREFQHIQGNNRKPKWQIRLEKKINDLRQKIGRLTQFINGNKGVKLQQHINYILKQYKIHSTHEEPNTQLSHYLDTLKQKLTVAASRLRRYKTCTLRKTQNKQFTSNEKQFYRTLRIDRSNLTMQQNLNNDTSAQNPPPLDDLHKFWSAIWNDNTTHNKEAEWIEDDKVRNTAIEDMDFEQISADTLKNVLNKLQNWKTPGSDFIQNFWYKKFTTTHPHLLYHINKFINNPQTLPKYITAGTTYMIPKDTTDCGNPAKYRPITCLQTVYKIITSCITENIYKHLSINKILTEEQKGCRKLSQGCKEQLTIDSVIMKQVCEKSRNLYSMYIDYQKAYDSVPHSWLLDVLNIYKIHPKIIHFLQNIMTNWTTRLKITTLNGTTETKPINIRRGIYQGDALSPLWFCLALNPLSKMLNLTNLGYTIKYTNNEAVEEELNQEKKVSHLLYMDDIKLYADTKDDLNHLINITERFSQDIGMKFGIEKCKINCIEAGKLQQYSYRMASGDLIDSLDSKNGYKYLGYIQSTLMHHKEIKSALTTQFIHRINIILKTQLNSKNITKAINTFAISILTYSFGIINWTKTELKSLQRKINVLLSKHRKHHPRSCVQRMTLPRIEGGRGFIDITNLHKKQIENLRNYFHGKTDGSDLHKAVVLGDKKLTPLNLSNKTSQNIEEQTDRQTKILEWTQKSLHGRHRQDLCQTTVDKIASNEWLRRGELFPETEGFMIAIQDQVIETRNYQKHIMKIPIPTDMCRRCNSSSETIQHITSACKSIAQSDYKHRHDQVAKIIHQKLAIKYNLISRPLKPYYQYKPESILENDTHKLYFDRAILTDKTIHFNRPDITLVDKQNKSAYIIDIAIPNTHNIQNTISEKMTKYIELKEEICRMWKVQKATIVPIVL

SEQ ID NO: 25020 - protein, 1400 aa, Morvina fissimacula
MTNGAIVSTNNAMRLRNRQIPQVGTRKGESRPESSGSGSPAYSGEGNASPTITQSRTVGVDQSTSSSSNPSSPVSSIKSFQSPSSSSYSYQYNHHSSRSTTISPSSCDIAYNAHVHSPVIVNKTMLGNVVQETTQVKEPVPITGQARKRIKWNNDMNEYILRTYLHITKLESENKNSYLPILFEKFSSKYPQIQVSRQRIGDQRRAIVRNNLIKPHERDRIYTEVRTELQKGSNLQPKTKNTTQGLRMRWTSELNETIIRAYFKITKLETDMTSYRTLLHKDFINSFPHLAHLSVQRIADQRRIIFNNKHISAERLQAIKQEVAKEVALQDRIASHSNLNLPEHNNIEIVNSVNYLNDIDIHSLNDNEIEPREEINLYLEKTFQETLTYFIDTDPTKRHYIPKQKSSKKLGKIIHYINNKILPKQLNKEISFDKFQTIIYSAAWAAAKNNGAKINIPTKEQQREQPRQDRKPKWQIRLEKKIEDLRRKIGRLTQFINGNRGDKLEKQINYILKQYKIHSTHEEPNTKLPHFIDTLKQKLTVAASRLKRYKTCTLRKIQNKQFSSNEKQFYRSLRTNRDNQKPLTNNSIPTSNQPSQEDLHKFWSTIWDDDTNHNTQAEWIKDEKDRNTTIKEMEFEQISPETFKNVIYKLQNWKTPGSDFIHNFWYKKFTYSHPFLLNHINIFINQPQLLPKYVTNGTAYMIPKVTNLCHSPANYRPITCLQTIYKIITSCITENVHKHLEINNILTEEQKGCRKFSQGCKEQLTIDSIVMKEVNIKRKNLYSMYIDYQKAYDSIPHSWLLEVLKIYKVHPKIINFLSNTMTNWTTQLKTNTLDGATNTSSIRIKRGIYQGDALSPLWFCLALNPLSKMLNLSNTGHLLKYTYNKATEEPMQDKRLSHLLYMDDIKLYADTKDDLDRLTNITELFSKDVCMKFGIEKCKLNCIEAGKIVENKYEMASGEQIDSVDSNKGYKYLGYAQSKFIHQKEIKSTLTTQFIHRVNIILRSQLNSKNITKAVNTFAIPILTYSFGIISWTKKELKSLQRKINILLTKHRKHHPRSCVQRMTLPSIEGGRGFIDVINLHNKQIKNLRTYFHKKTTESDLHKTIVQNDTKLTPLNLSNTVSHNNESQTDRKAKILEWAKKSLHGRHRHDLCQTTVDKNASNEWLRRGELFPETEGFMIAIQDQVIETRNYQKYIMKAKIPTDICRRCSSSPETIQHITSACKSIAQSDYKHRHDQVAKIIHQKLAIKHNLTSHMARPYYDYTPETILENNTHKLYFDRAILTDKTIHHNRPDITLIDKLNKSAYIIDIAVPNSHNIQNTISEKLTKYTELKAEICRMWKVQTATIVPIVLSATGVIPTQMKQSLNTLDLPFHTVINIQKAVILNTCRIVRKFLQTDKDS

SEQ ID NO: 25021 - protein, 1275 aa, Codatractus imalena
MTNGALVFRNYAMRLRSRQIPQAGTREGESRPEPSGPGSSTYSGGSTASHMTTQASTAVVDTSYHESHSSSSSSSTHSLFSSPGSSPFSYQTQSSSKTSNTLTPVSSECAQGSNSKSVRTIDCMLRGNVVQDAVQAEVSVPISNQSRKRNKWSKDMNEYILRTYFQITKLETENKNSYLPILYTKFSAKFPHIQVSRQRVGDQRRAIIRNKLLKQQDIDKIYAEVQTKFQNTNIASNQKQNTLIDQRMRWTSEHNESIIRSYLKITKLETDMTGYRTLLHHNFITLFPHLSHITIQRIADQRRVIINNQLISKERFEFIKNEVTTELEMSHQNAILHNNISSSETNDNKESNSNETFLNNIHVNCLDDHDQLEPNNEVRNLEIDQTFQKCLTYFTDTDPTKRQHIPKQKSSKKFASIVYYIDKIILPEHLTEATSFKNFQTVIYSASWTAAKSNGAKINIPTSENQNPNRSSQKPKWQIRLEEKVKDLRSKIGRLTQFMKGNRSSKLQQHINYIIETYKLHTIHEEVNTQLSHFLDTLKQKLIVVSSRLKRYKACTLRKTQNKQFNTNEKQFYRNLKNTCTNETPFRNLINSSRIQITPTPHDLYNFWSSIWDNEVIHKVDAEWIKDEKLRNMATGEMEFQAISIETLKNVLNKLKNWKAPGSDCIQNFWFKKFTQAHTHLLRYINNFIQNPQSLPKYITSGITYMIAKDTTDQINPAKYRPITCLQTIYKIITSCLAENIYEHLNTNKILTEEQKGCRKLSQGCKEQLTIDSVIMKQVQEKRKDLYSMYIDYQKAYDSVPHSWLIEVLHIYKIHPQIISFLCNIMKNWTTQLKLRTTNGTTETPSINIKRGIYQGDTLSPLWFCLALNPLSKLLSLTNTGYLLKYLDNEPNHSETNIRETRVNHLLYMDDIKLYADTKDDLHRLANITERFSHDIYMQFGIEKCKINSVQAGKIQQHIHQLESGENIDSLDQNSGYKYLGYIQSKFIHHKDIKTTLTTQFKHRMNTILRSQLNSKNLVKAINTFAIPSLTYSFGIINWTKTELKSLQRSINTSLTKHRKHHPRSCVQRMTLPRTEGGRGFIEIVNLHNKQIKNLRMYFHNKTKTSNLHKAIAQNDKKLTPLNLSEKSIQKNEVVIDIQAKILEWTQKSLHGRHRQDLCQTNVDKIASNEWLKRGDLFPETEGFIIAIQDQVIETRNYQKHIMKTPIHTDSCRRCKSAPETIQHITGACKAIVQSDYKHRHDQVAKIIHQKLAAKHNLIAQPLKPYYEYNPETIL

SEQ ID NO: 25022 - protein, 1404 aa, Codatractus alcaeus
MTNGALVFRNYAMRLRSRQIPQAGTREGESRPGPSGPGSSTYSGGGTASHMTTQSSTAVVDKSYHESHSSSPTSSTHSLFPSPESSPFSYQTQSSSETSKTLTPVSNECAQGSNSKSVRTIEYMLRGNVVQDAVQAELSVPISNQPRKRNKWSKDMNEYILRTYFQITKLETENKNSYLPILYTKFSDKFPHIQVSRQRIGDQRRAIIRNKLLKQQDIDKIYAEVQTEFQNTNIALNQNQNTLSDQRMRWTSEHNESIIRSYLKITKLETDMTAYRTLLHHNFITQFPYLSHITIQRIADQRRVIIKNQLISKERFEVIKKEVTTELKMSHENAILHNNISTAETNDNNISNSNENFLNNIHVNCLDDHDQLEPNNVERNPEIDQTFKKCLTYFTDTDPTKRQHIPKQKSSKNFASIMYYIDKIILPEYLTETTTFKNFQTVIYSASWTAAKSNGAKINIPILDNQYQSRSRQKPKWQIRLEEKVKDLRCKIGRLTQFMRGNRSNKLQQHINYIIETYKLHTIHEEVNTQLSHFLDTLKQKLIVVSSRLKRYKACTLRKIQNKQFNTNEKQFYRNLKNTSNNETTFHNLINSSRIQITPTSHDLYNFWSSIWDNEVIHKVDAEWIKDEKLSNMATQEMEFQAISMETLKNVLNKLKNWKAPGSDCIQNFWYKKFTQAHTHLLKYINNFLQNPQSLPKYITSGITYMIAKDNTDQINPAKYRPITCLQTIYKIITSCLADNIYKHLNANKILTEEQKGCRKLSKGCKEQLTIDSVIMKQVQEKRKDLYSMYIDYQKAYDSVPHSWLIEVLHIYKIHPKIISFLCNIMKSWTTQLKLKTTNGTTETSSINIKRGIYQGDTLSPLWFCLALNPLSKLLSLTSTGYILKYLDNEAIRTETNIRETRVNHLLYMDDIKLYADTKDDLHRLANITEMFSHDIHMQFGIEKCKVNSVQAGKIQQHIHQLESGEHIDSLDQNSGYKYLGYIQSKFIHHKEIKTTLTTQFKYRMNAILRSQLNSKNLVKAVNTFAIPSLTYSFGIINWTKTELKSLQRNINTSLTKHRKHHPRSCVQRMTLPRREGGRGFIEIVNLHNKQIKNLRTYFHNKTTTSNLHKAIAQNDKKLTPLNLSEKSTQKNEVVIDIQAKILEWTQKSLHGRHRQNLCQNNVDKIASNEWLKRGDLFPETEGFIIAIQDQVIETRNYQKHIMKSPIHTDSCRRCNSAPETIQHITGACKAIVQSDYKHRHDQVAKIIHQKLAEKYNLIAQPLKPYYEYSPETILDSSTHKLYFDRAILTDKTIHYNRPDITLIDKANKLAYIIDIAIPNAHNVQNTISEKLLKYTDLKDEVIRMWQLRKAIIVPIVLSTTGIIPIQLKQSLNTLNLPLYTIANLQKAVILNTCRLVRKFLHIE

SEQ ID NO: 25023 - protein, 1381 aa, Erynnis tages
MRLRNRVIPQAGTGANRTGESGPGPSSPGSPTYSGGGIVSHMASQRNAAGAISPSQSSSSSKSSMNINESPVSYSHSHEDPAFSPSPSPPSSLNDRLLDDVAQEANQAEQLVPTASKSYKRIKWNNDMNEFILRTYLQITKLETENRNSYLPILYEKFCSKFPQVNVSRQRIGDQRRAIVRNKLVKQPEIDRIYAEVKTQLQQGDDQTIQNLTQSLHSHRMKWTSEQNEAIIRAYFRITKLETDMTTYRLLLHQDFITLFPHLSHLSVQRIADQRRVIINNKQISTERLEAIKEEVAVELQITQESTNRYNVNVVETNNENLGNNDDFINNIDPSSINDNYSESHRDDRNIGLENMFRDAVAYFTNTSPTERQYIPKQKSSKRLGRIIHYINKTILPEKLNKDLNFETLQTLIYSAAWTAAKSNGAKIYIPVRDTHNRKVRNYRKPKWQIRLERKIEDLRRKIGRLMQFMRGNRSVTLQKHINNIKRQYKIHSSHEEPNTQLSHFLDTIKQKLAVACSRLKRYKNCTLRKTQNKEFIGNEKQFYRGLKTSDNQRPFQNFNNNTPNQNQPTLENFHTFWSSKWNNSISHNKQASWIEDERASNNNTESMVFEHISAETFKSVVNKLNNWKTPGSDFIQNFWYKKFTYTHPYLLYHINNFIDNPQLLPTYITAGTTYMLPKDMKDHQNPAKYRPITCLQTIYKIITSCLTENIYKHLSQNNILTEEQKGCRKLSQGCKEQLTIDAVIMKHVVEKRKNLYSMYIDYQKAYDSVPHSWLVEVLDIYKINSKIINFLRNTMTNWTTRLRVNTIDGSIESQPIKISRGIYQGDALSPLWFCLALNPLSKMLHQTDFGFPLKYKQNDADVASIQENRLSHLLYMDDIKLYADTEENLHCLANITEKFSEDICMQFGIDKCKINSIQAGEKYLHTYCMQSGEQIDPLDLNSGYKYLGYMQSKLIHHKDIKNNLTTQFKHRLNSILKTQLNSKNMTKAINAFAIPILTYSFGIISWTKTELKSLQRTINTSLTKHRKHHPRSCVQRITLPRSEGGRGVIDISNLHGKQVENLRSYFHLKATESILHKAIIFNDNKLTPLNLCNKTQQMNEQQTDRQTKILEWTKKSLHGRHRQDLCQSTVDKLASNEWLRRGELFPETEGFMIAIQDQVIETRNYQKYIMKSPIPTDTCRRCCSASETIQHITSACKMLAQSDYKHRHDQVAKIIHQKLAIKHNLIDNTSHQIEPYYKYNPEPILENDSHRLYFDRAIFTDKTIHYNRPDITLIDKHRKLAYLIDIAIPNTHNLQNTISEKLSKYIELKEEICRNWKVQKATIVPIVLSSTGIIPSQLKQSLHTIDLPFNTFVGLQKAVVLNTCRIVRKFLQTDNEVLLH

SEQ ID NO: 25024 - protein, 1319 aa, Potamanaxas melicertes
MRLRSRVIPQAGTEANCDGEPCPGPSSTGCPTYSGGGNVSHMASQYIAVGATSSSQSSSNVITVTSSSSLESSTYIAKAPISLSQSYGHPQQSTSYSISSSSSLSDRKLDDVVQETSQVEPPVPTTSKLHKRIKWSNNMNEFILRTYFEITKLETENRNSYLPVLHDKFSNKFPEVSVSRQRVGDQRRAIVRNKLVKQHDIDRIYAEVQCQLKQGETQLTQNISVSQRMRWTSEQNEAIIRSYLRITKLETDMTTYRTLLHQDFITLFPHLSHLSVQRIADQRRVIINNKQISSERLEAIKQEVAVELQITQESTQHKSIAETNNIGLENNENLLNDINISSINENQIESNRDDRNLGLEKVFQEAVTYFTNTCPTKRQYIPKQKSSKRLGRIIHYINHTILPEKLSKDLSYQALQTLIYSAAWTAAKSNGAKINIPIKDIQKVRNIRKPKWQIRLERKIEDLRRKIGRLTQFIKGNRSSTLVNHINNIRHQYKIHTLHEEPNTQLSQFLDTIKQKLTVACSRLKRYKTCTLRKTQNKDFCTNEKQFYRALKISHTNQTSHTNLDTTIKDQPTLDSLHSYWSSIWANSINHNAQAKWIEDERASNIDIEMMDFQHISAETLKNVINRLNNWKTPGSDFIQNFWYKKFTCIHSYLLYHINNFINNPQLLPKYITAGTTYMLPKDMSDSQNPAKYRPITCLQTIYKIITSCLTDNIYKHLSQNNILTEEQKGCRKLSQGCKEQLTIDAVIMNQVVGKKGDLYSMYIDYQKAYDSVPHSWLIEVLNIYKIHPKIITFLHNTMTNWTTRLRIKTINATIESPLIEIKRGIYQGDALSPLWFCLALNPLSKMLHLSKYGYPLKYSETEADVVSIRENRLSHLLYMDDIKLYADTKDDLHYLANITEQFSEDICMQFGIEKCRINSIKNGQKHQHTHHMQSGDQIDPLDLSGGYKYLGYLQSKCIHQKDIKITLITQFKHRLNCILKTQLNSKNITKAINTFAIPILTYSFGIINWTKKELKSLQRTINTSLTKHRKHHPRSCVQRMTLPRLEGGRGFIDIGNLYGKQIQNLRTYFHQKATESILHKAVVLNDNKLTPLNLSSNTPQNNENQTDIQTKIVEWTQKSLHGRHRQDLSQTTVDKLASNEWLRRGELFPETEGFMIAIQDQVIETRNYQKHIMKSRVSTDTCRRCSSASETIQHITSACKSLAQSDYKHRHDQVAKIIHQKLAIKHNLVDITSHPIKPYYEYDPETILENDRYKLYFDRAILTDKTIHYNRPDITLLDKNNKSAYIIDIAIPNSHNVQNTISEKLSKYIELKEEICRI

SEQ ID NO: 25025 - protein, 1381 aa, Erynnis tages
MRLRNRVIPQAGTGANRTGESGPGPSSPGSPTYSGGGIVSHMASQRNAAGAISPSQSSSSSKSSMNINESPVSYSHSHEDPAFSPSPSSPSSLNDRLLDDVAQEANQAEQLVPTASKSYKRIKWNNDMNEFILRTYFQITKLETENRNSYLPILYEKFCSKFPQVNVSRQRIGDQRRAIVRNKLVKQPEIDRIYAEVKTQLQQGDDQTIQNLTQSLHSHRMKWTSEQNEAIIRAYFRITKLETDMTTYRLLLHQDFITLFPHLSHLSVQRIADQRRVIINNKQISTERLEAIKEEVAVELQITQESTNRYNVNVVETNNENLENNDDFINNIDPSSINDNYSESHRDDSNIGLENMFRDAVAYFTNTSPTERQYIPKQKSSKRLGRIIHYINKTILPEKLNKDLNFETLQTLIYSAAWTAAKSNGAKIYIPVRDTHNRKVRNYRKPKWQIRLERKIEDLRRKIGRLMQFMRGNRSVTLQKHINNIKRQYKIHSSHEEPNTQLSHFLDTIKQKLAVACSRLKRYKNCTLRKTQNKEFIGNEKQFYRGLKTSDNQRPFQNFNNNTPNQNQPTLENFHTFWSSKWNNSISHNKQASWIEDERASNNNIESMVFEHISAETFKSVVNKLNNWKTPGSDFIQNFWYKKFTYTHPYLIYHINNFIDNPQLLPTYITAGTTYMLPKDMKDHQNPAKYRPITCLQTIYKIITSCLTENIYKHLSQNNILTEEQKGCRKLSQGCKEQLTIDAVIMKHVVEKRKNLYSMYIDYQKAYDSVPHSWLVELLDIYKINSKIINFLRNTMTNWTTRLRVNTIDGSIESQPIKISRGIYQGDALSPLWFCLALNPLSKMLHQTDFGFPLKYKQNDADVASIQENRLSHLLYMDDIKLYADTEENLHCLANITEKFSEDICMQFGIDKCKINSIQAGEKYLHTYRMQSGEQIDPLDLNSGYKYLGYMQSKLIHHKDIKHNLTTQFKHRLNSILKTQLNSKNMTKAINAFAIPILTYSFGIISWTKTELKSLQRTINTSLTKHRKHHPRSCVQRITLPRSEGGRGVIDISNLHGKQVENLRSYFHLKATESILHKAIIFNDNKLTPLNLCNKTQQINEQQTDRQTKILEWTKKSLHGRHRQDLCQSTVDKLASNEWLRRGELFPETEGFMIAIQDQVIETRNYQKYIMKSPIPTDTCRRCCSASETIQHITSACKLLAQSDYKHRHDQVAKIIHQKLAIKHNLIDNTSHQIEPYYKYNPEPILENDSHRLYFDRAIFTDKTIHYNRPDITLIDKHRKLAYLIDIAIPNTHNIQNTISEKLSKYIELKEEICRNWKVQKATIVPIVLSSTGIIPSQLKQSLHTIDLPFNTFVGLQKAVVLNTCRIVRKFLQTDNEVLLH

SEQ ID NO: 25026 - protein, 1374 aa, Cycloglypha thrasibulus
MRLRNRVIPQAGTSPTSGEESGPEPSSSGCPTYSGGGTVSHMASQCSAVGANSSPHSSSFNSTITSSSNLSSMPINQVTFTLAQPHDHHSHFSSPSSSLGDRMLDDVVQKTHVDQPVPTTNKSQKRIKWSNNMNEFILRTYYQITKLETENKNSYLPVLFEKFSNEFPDINVSRQRVGDQRRAILRNKLVKQHDIDRIYAEVKTQLGQGDTQTTENTPTGQRLRWTSEQNEAIIRSYYRITKLETDLTTYRQLLHQEFITLFPRLSHLTAQRIADQRRVIINNRQISEERLEAIRQEVTLELKMTQESTRQNSISIVETNNVELENNDNLVHVAELSNTYENQQGTDKEYINVELEEIFQETFTHFTNINPTDRQYIPKQKSSKKLGRIIHYINSTILPQKLSTDLNYETLQTLIYSAAWTAAKYNGARIYIPSRITKIDGNKRKPKWQIRLERKVEDLRRKIGRLTQFIKGNKSTTLIKHINNIKHQYKIHSSHEEPNTQLSHFLDTIKQKLSVACNRLKRYKTCTLRKTQNKEFSANEKQFYRLLKTSNTNQTLHQNSNTTNQDSPSLKNLHNYWSSMWAESVSHNAQAKWIEDEKASNRDIEMMEFQHVSADTLKGVINKLHNWKTPGSDFIQNFWYKKLTCLHPYLLYHINNFISNPQLLPKYITTGTTYMLPKDMSDRQNPAKYRPITCLQTIYKIITSCLTDNIYKHISTNNILTEEQKGCRKLSQGCKEQLTIDAVIMKQVIENKKNLYTMYIDYQKAYDSVPHSWLIEILDIYKIHPKIINFLQNTMSTWTTRLKINTTIETPSINIKRGIYQGDALSPLWFCLALNPLSKMLHRNNIGYPLQYTETEVEVPLKENRLSHLLYMDDIKLYADTKDNLHSLATITEQFSEDICMQFGIDKCKINSIQEGEKHQHTHHMRSGHNIDPIELDGGYKYLGYMQSTYIHHKDIKFTLTAQFKHRLNSILRTQLNSKNIIKAINTFAIPILTYSFGIINWSKTELKSLQRSINTSLTKHRKHHPRSCVQRMTLPRVEGGRGIIDIGNLHGKQVQNLRSYFHQKATESILHRAVVFNDNKLTPLNLNSRITQPNEKQTDRQTKILEWTQKSLHGRHRQVLSQSTVDKLASNEWLRRGELFPETEGFMIAIQDQVIETRNYQKHIIKSPIPTDTCRRCCSASETIQHITSACKSLAQSDYKHRHDQVAKIIHQKLALKHNLVDITSHPIKPYYEYDPESILENDSHRLYFDRAILTDKTIHYNRPDITLIDKHRKSAYIIDIAIPNSHNVQNTISEKLSKYIELKEEICRIWRIQKAIIVPIVLSSTGVIPTQLKQSLHTIDLPYYTFVSLQKAVILNTCRIVRKFQSDNQNCD

SEQ ID NO: 25027 - protein, 770 aa, Pholisora mejicanus
MEFQQISAEKFKSVINKLQNWKTPGSDHIQNFWYKKFSSAHPYLLNHINNFLNNPQLLPKYIVTGTTYMIPKDNNDFKNPAKYRPITCLQTIYKIITSCLTEHIYKHLNINNILTEEQKGCKKLSQGCKEQLTIDAVIMKQVQEKRKNIYCMYIDYQKAYDSVPHSWLIEVLKIYKIHPKIISFLQSTMANWTTQLKVNTLNGSVETTPINIRRGIYQGDALSPLWFCLALNPLSKMLNSTNLGYPLQYTNSISDDNVIRNKRVSHLLYMDDVKLYADTKDSLHSLANITEEFSQDICMKFGIDKCKINSIEVGKILQDSYQMESGENIESLDINSGYKYLGYTQSKVIHHKEIKVNLITQFKRRLNNILKSKLNSKNSTKAINSFAIPILTYSFGIINWTKTELKNLQRKINVSMTKHRKHHPRSCVQRMTLPRIEGGRGIVDIINLHNSQVKNLRTYFHEKSSKSDLHKAIIQNDRKLTPLNLNNTLQQGNEEQTDGQTKILEWARKSLHGRHRQDLCQSTVDKTASNEWLSRGELFPETEGFMIAIQDQVIETRNYQKFIMKMPIPTDKCRRCGSSSETIQHITSACKAIAQSDYKYRHDQVVNIIHQKLAFQHKLIPLPLKPYYQYKPDTILENNTHRLYFDRAILTDKTIHYNRPDITLIDKLNKSAYIIDIAIPNSHNIQKTISEKLTKYTELKEEICRMWKIQNATIVPIVLSATGIIPTQLKQSLNKLNLPSYIQTSIQKAVILNTCRITRKFLETDKDRNF

SEQ ID NO: 25028 - protein, 1239 aa, Timochares trifasciata
MNEFILRTYYQITKLETENKNSYLPVLYEKFVNKFPQISVNRQRIGDQRRAIVRNNLVKQHDIDRIYAEVKAELQIGDAQPTQNITTGLRMRWTTEQNEAIIRSYYRITKLETDMTTYRTRLHQDFILTFPHLSHLTIQRIADQRRIIINNKQISAERLEAIKQEIAVELQITQESSIHNSMNIAETSIDSENNGNLMNSVDSNSIKDNVSVLNKESINVDLEKTFQEALAYFSNTSPTERQYIPKQKSSKRLGRIIQHINNILLPQKLSKDLNYDSFQTLVYSAAWTAAKCNGARIYISARNTQKVRNNWKPKWQIRLERRVEDLRKKIGRLTQFIKGNRSKALYKHINNIRHQYKIHTSHEEPNTQLSHFLDTIKQKLTVACSRLKRYKTCTLRKTQNKAFYTNEKLFYRSLKTSDQILNTSTQNQPTVENLHQYWSSIWANSVNHNAQAKWIQDERVSNKNIETMEFQLISGETLKSVINKLNNWKTPGSDFIQNFWYKKFSCIHPYLLHHINNFINNPELLPKYITAGTTYMLPKDISDAKNPVKYRPITCLQTIYKIITSCLTDNIYKHLSRNNILTEEQKGCRKFSQGCKEQLTIDAIIMKKVVEKRKNLYSMYIDYQKAYDSVPHSWLLEVLDIYKIHPKIITFLHSTMANWTTRLRINTNTDAETPPINIRRGIYQGDALSPLWFCLALNPLSKMLHLNNYGYPLEYTDTETNVVSIKENRLSHLLYMDDIKLYATTKDDLHSLANITEQFSNDICMKFGIEKCKINSIEGGEKHQHTHHMQSGDHIDSLGPDSGYKYLGYVQSKCIHHKDVKLSLITQFKHRLNSIFRTQLNSKNITKAINTFAIPILTYSFGIINWTKTELKSLQRSINTLLTKHRKHHPRSCVQRLTLPRIEGGRGIIDVGNMHGKQIQNLRTYFHKKTTESILHRAVVFNDTKLTPLNLSNRTQETNEKQTDRQTKILEWTQKSLHGRHRQDLCQNTVDKLASNEWLRHGELFPETEGFMIAIQDQVIETRNYQKHIMKVPIPTDSCRRCCSASETIQHITSACKSLAQSDYKHRHDQVAKIIHQKLAVKHNLVDTTSHPIKPYYEYNPETILENESHRLYFDRAILTDKTIHYNRPDITLIDKQNKVAYIIDIAIPNSHNIQNTISEKLSKYIELKEEICRIWKIQKATVVPIVLSSTGIIPTQLKMSLNAIDLPFHTFRSLQKAVILNTCRIVRKFLQTDNDSHN

SEQ ID NO: 25029 - protein, 1185 aa, Timochares trifasciata
MRLRNRVIPQAGTSLDIQQTQNTPIGQRMRWTSEQNEAIMRLYFKITKLETDLTAYRPLLHKEFIILYPHLSHLPVQRIADQRRVIINNRQISEERLEAIKQEVTLEFKKSQESTRQKSISAVQSNNVDLESNENVVYDTEISNVNENQPGTNKVDRNLELEEIFKEAFAYFTNTNPTERQYIPKQKSSKRLGYILHYINSTILPQKLSRDLNYETLQTLIYSAAWTAAKYNGARIYLPSRVSSQKVGNGRKPKWQIRLERKVEDLRRKIGRLTQFIKGNRSSTLSRHISDIKRQYKIHSTHEEPNTQLSHFLDTIKQKLSVACNRLKRYKTCTLRKTQNKEFSVNEKQFYRSLKTSNTHQTPHLNSNMTNQNHPSLDNLHNYWSSLWANTVTHNTKAKWIEDERASNKDIETMEFQQVSAETLKSVINKLHNWKTPGSDFIQNFWYKKLTCLHSYLLYHINNFINNPQVLPEYITTGTTYMLPKDMSDRQNPAKYRPITCLQTIYKIITSCLTNNIYKHLSRNNILTEEQKGCRKLTQGCKEQLTIDAVIMKQVIENRKNLYSMYIDYQKAYDSVPHSWLIEVLNIYKIHPKIITFLQNTMATWTTRLKINTINATSQTPPINIRRGIYQGDALSPLWFCLALNPLSKMLHWNNYGYPLKYTDNEAEVSIEEYKLSHLLYMDDIKLYADTKDDLHSLANITEQFSEDVCMQFGIDKCKTNSIEDGEKYQHAHHMRSGDNIDPIELDSGYKYLGYMQSKYIHHKEIKLTLTAQFKYRLNSILRTQLNSKNITKAINTFAIPILTYSFGIIKWSKTELKGLQRSINTLLTKHRKHHPRSCVQRITLPRVEGGRGIIDIGNLHGKQVQNLRSYFHQKATESVLHKAVVFNDKKLTPLNLSSKIPQPNEKQTDRQTKILEWTQKSLHGRHRQVLCQSTVDKLASNEWLRRGDLFPETEGFMIAIQDQVIETRNYQKHIIKRSLPTDTCRQCYSASETIQHITSACKSLAQTDYKHRHDQVAKIIHQKLALKHNLLNITSHSMKPYYEYDPESILENDSHRLYFDRAILTDKTIHYNRPDITLIDKHRKLAYIIDIAIPNSHNMQNVISEKLSKYTELKEEICRIWKVQKATIVPIVLSSTGIIPIQLKQSLHTLDLPFYTFVSLQKAVILNTCRIVRKFLQGDSHNQD

SEQ ID NO: 25030 - protein, 1382 aa, Chiomara georgina
MRLRNRVIPQAGTSLTGEEESGPEPSSSGCPAYSGGGIVSHSASQSSAVGANSSSFPSSSPSSLNAITITSSSLGSSAYIKHTAIPLSPSHEHRSHSISPSSLFSERTLDDVVRETQVEQPVPTTNKSHKRIKWSYHMNEFILRTYYHITKLETENSNSYLPLLYEKFLNRFPQVNVSRQRIGDQRRAIIRNKLVKQHDIDRIIADVKTQLEQDGVQPIQSISTGQRMRWTSEQNEAIIRAYYRITKLETDMTTYRSLLHQEFSNLFPHLSHLTVQRIADQRRVIINNKQISAERLEAIKQEVRLELQISQGNTEQNSISIAETNNDDSQNNVNLTNSIALSTDNENRTETNRQDRNLGLEKTFDEAVTYFMNTNPTDRQYIPKQKSSKRLGRILYYINNTILPQKLSRDLNFETFQTLIYCAAWTIAKANGAKIFIPSRTINKIGSVRKPKWQIRLERRVEELRRNIGRLTQYIKGNRSSTLNKHISNIKHQYKIHTLHEEPNSQLSHFLDTIKQKLTVTSSRLKRYKTCTLRKTQNKEFSTNEKQFYRLLKTSHPNETWFENSNTTNQNYPSLENFNEYWSSVWSNVVNHNAQANWIHDERHSNRDIEMMDFQHVSAETLQSVINKLSNWKTPGSDFIQNFWYKKLTCLHPYLLYHINNFIDSPELLPKYITAGTTYMLPKDMSDTQNPAKYRPITCLQTIYKIISSCLTDNIYKHLCRNNILTEEQKGCRKFRQGCKEQLTIDAVVMKQVVEKRKNLYSIYIDYQKAYDSVPHSWLLEVLDIYKIHPKIITFLRNTMANWTTRLRINTTNDTTETPSIDIKRGIYQGDALSPLWFCLALNPLSKMLHLCNHGYPLEYSNSEEDVSINENKLSHLLYMDDIKLYADTKEGLQSLANTTELFSEDICMQFGIEKCKVNSIECGEKHQHTHHMQSGEHIEPIEVDGGYKYLGYMQSKNIHHKNIKLNLTTQFKHRLNSILRTQLNSKNLTKAINTFAIPILTYSFGIINWTTTELKGLQRTVNTSLTRHRKHHPRSCVQRITLPRLEGGRGIIDIGNLHGKQVQNLRTYFHQKATESILHRAVVFNDRKLTPLNLSNKIPQTNEKQTDRQTKILEWTQKSLHGRHRQDLCQSTVDKLASNEWLRRGELFPETEGFIIAIQDQVIETRNYQKHIIKSTIPTDTCRRCCSASETIQHITSACKSLAQSDYKHRHDQVAKIIHQKLAIKHNLIDTTSRQIKPYYEYTPQTILENGSHRLYFDRAILTDKTIHYNRPDITLIDKHNKAAYIIDIAIPNSHNIQNTISEKLSKYIELKEEICRIWQIKKATIVPIVLSSTGIIPIQLKKSLHTLDLPFYTFVNLQKAVILNTCRIVRKFLQTDSNAE

SEQ ID NO: 25031 - protein, 1432 aa, Ebrietas anacreon
MRLRSGYKLPQASTGAIRTGESGPEPTSSGCPTYSGGDTVSQTSAQSRTVAVNNPSSTHTLSHSSSPASSTHSLFPSPVSSPRSYEFIHLLSYSSSISPMSCDVAQGATASFPEPIPDTTNNITTVTSTSFESSTFTNQILPISLAQSRTPSSSLSDRALGDVVQEASQVKQPAPTTSISKKRIKWSNNMNEFILRTYFRVTKLETENMNSYLPELYEKFMNKFPQISVSRQRIGDQRRAIVRNKLVKQDSINRIYKEVKAELQLGDPHPTQNISTGQRMRWTSEQNEAIIRSYYRITKLEKDMTTYRTLLHQDFITTFPHLSHLTAQRIADQRRTIINNKQISVERLEVIKQEIAVELQITQETLAHDSMSDTEASSVELESYENVVNNINLSSLNENVSQLNVEDRNLELEKIFEEALTYFTNTSPTDRQFIPKQKSSKRLGRIIHNINNTILPQRLSQDLSYDSLQTLIYSAAWTAAKYNGATIYIPPKNNQKVKNNWKPKWQIRLERKVEDLRRKIGRLTQFIKGNRSSVLQKHINNIKHQYKIHTSHEDPNTQLAHFLDTIKQKLTVACSRLKRYKTCTLRKTQNKEFSTNEKLFYRSLKTSNTKQTFNITSENQPAIENLRKYWSSIWANSVNHKAQAKWIEDERASNRHIKTMDFQHISADTLNNVINKLNNWKTPGSDFIQNFWYKKFSCIHPYLLCHINNFINHPELLPKYITAGITYMLPKDMSDPLNPAKYRPITCLQTIYKIITSCLTDNIYKHLSRNNILTEEQKGCRKFSQGCKEQLTIDAVIMKQVVEKRKNLYSMYIDYKKAYDSVPHSWLIEVLDIYKIHPTIISFLHNTMANWTTQLRINTSNATIVTPPIDIRRGIYQGDALSPLWFCLALNPLSKMLNLINYGYPLKYTSTVDDVASTGENRLSHLLYMDDIKLYADTKDDLHYLANITEQFSEDICMQFGIEKCKINSIIDGEKYQHIHHMQSGDQIDPLDLDNGYKYLGYMQSKGIHHKDIKHTLTTQFKHRLNSIFKSQLNSKNITKAINAFAIPILTYSFGIINWTKTELKGLQRSINTSLTKHRKHHPRSCVQRLTLPRIEGGRGIIDIGNMHGKQIQNLRTYFHQKTTESILHRAVVFNDTKLTPLNLNNETPETNNKQTDRQAKILEWTQKSLHGRHRQDLCQNTVDKLASNEWLRRGELFPETEGFMIAIQDQVIETRNYQKHIMKIPIPTDRSCRRCCSASETIQHITSACKSLAQSDYKHRHDQVAKIIHQKLAVKYNLLDITSHPIKPYYEYIPETVLENETHRLYFDRAILTDKTIHYNRPDITLIDKHDKAAYIIDIAIPNSHNIQNTISEKLSKYIELKEEICRIWKLQKATVVPIVLSSTGIIPIQLKKSLHTIDLPYYTFATLQKAVILNTCRIVRKFLQTDNNHD

SEQ ID NO: 25032 - protein, 776 aa, Heliopetes ericetorum
MEFDQVSADTLKNVIHKTQNWKTPGSDYIQNFWYKKFTYTHPYLLHHINTFIQNPRQLPTYITAGTTYMIPKDNTDLKNPAKYRPITCLQTIYKIITSCITEKIYEHLKINNILTEEQKGCRKLSKGCKEQLTIDSVIMRQVQEKRKNLYSMYIDYQKAYDSVPHSWLVETLNIYKINSKIVKFLSTIMKNWTTKLKMKTTKGHIETSTINIRRGIYQGDSLSPLWFCLALNPLSKLLNSTNVGYSLKYRNESEETSVLLPVEEIKLNHLLYMDDIKLYAETIDDLNYLANITDTFSKDVCMKFGIEKCKINSFEAGNALQHRYQIESGEYIDALDPNSGYKYLGYIQSNLLHDKEIKSYLTAQFKHRINIILRTQLNSRNIIKAINTFAIPILTYSFGIINWTKTEIKSLQRIINTSLTKHRKHHPRSCVQRLTLPRTEEGRAVIDLTNLYYSLIHNLRTYFHDKLTESILHRAIVFNDIKLTPLQLNNKSLQIKDKQTDRQTKLLQWAQKSLHGRHRHVLCQTNVDMIASNEWLRRGELFPETEGFMIAIQDQVIETRNYQKHIMKIPISTDTCRRCSSSSETIQHVTSACKSIAQSDYKHRHDQVTNIIHQKLAIKHKLISQPFKPYYEYKPDSVLENRSYKLYYDRAILTDKTIHYNRPDIVLVDKLNHLAYIIDIAIPNSHNIQNTISEKLTKYVELKEEICRMWKVDKASIVPIVLSTTGIIPKQLKQSLSTLDLPSNTLISLQKAVILNTCRIVRKFLQTTNDSSTQFK

SEQ ID NO: 25033 - protein, 1159 aa, Pyrgus malvae
MRWTSEQNEAIVRAYYKITKLETDMSAYRSLLHQSFISTFPHLAHLSVQRIADQRRAIINNKQIPDERLEIIKLEVAAEIPMTQQYLPTKNTDMNTSISNNVEFEENENFIYNIDTNCLTQNDTESNREERNLKIDNTFQEAFKFFTGTEPTSRYYIPRQKSSKKLGSILHYINETILPEQLNKELNFESVQTIIYCAAWTAAKSNGSKMVIPSGEIFHNNRSTRKPKWQIRLEKKIEDLRRKIGRLTQFIKGNRSNKLHKYVQQILTSYKIHSSHEEPNSQLPHFLDTLKQKLNVAASRLKRYTVCSLRKSQNTQFITNEKCFYRSLNTIRNSKTSQQNCTNEHNQVTPEELHEFWSSIWNCDVSHNAQANWIDDEKTRNATLKAMEFDQVSAETLKNVINKLQNWKTPGSDYIQNFWYKRFTHTHPYLLQHINTFIQHPQQIPKYITAGTTYMIPKDTNDLKNPTKYRPITCLQTIYKIITSCLTEKIYEHLKINNILTEEQKGCRKISKGCKEQLTIDSVIMKQAQEKRKNVFSMYIDYQKAYDSVPHSWLLETLNIYKINPKIVFFLSNIMKNWTTRLKITSSTGPVETSIINIRRGIYQGDALSPLWFCLALNPLSKLLNSTKVGYILKYKNETEETSNVALVQEIRLNHLLYMDDIKLYAETKEDLNYLANITDTFSKDICMKFGIEKCKINAFEAGNVVQHTYQIKSGECIDSLDPNSGYKYLGYIQSNLLHHKEIKSYLTTHFKHRINIILRTQLNSRNIIKAINTFAIPILTYSFGIINWTKTEIKSLQRIINTSLTKHRKHHPRSCVQRLTLPRTEGGRGLIDLTNLYFSQIHNLRSYFHDKVAESILHKAIVSNDIKLTPLDLNNKLLQTDDKQTDRQSKLLQWAQKSLHGRHRHDLCQTNVDKIASNEWLRRGELFPETEGFMVAIQDQVIETRNYQKHIMKIPIATDSCRRCSSSSETIQHITSACKSIAQSDYKHRHDQVAKIIHQKLAIKHKLTTQPFKPYYEYKPDIVLENRSYRLYYDRAILTDKTIHYNRPDIVLVDKLNQSAYIIDIAIPNSHNIQNTISEKLTKYVELKEEICRMWKIQKATIEPIVLSATGIIPKQLKQSLNTLGLPAITSVSLQKAVILNTCRIVRKFLQTDRDKTS

SEQ ID NO: 25034 - protein, 1037 aa, Heliopetes sublinea
MSAYRSLLHQSFINTFPHLRHLSIQRIADQRRVIINNKQITDERLQAIKLEVAAEIHIPQEHLSIHNNRNTSRKNSIEENESHIDNIDVSYLIQKDTDSSRKERNIDIDKTFQEALNFFSGTDPTNRHYIPRQKSCKKLGSILSYINKIILPEHLNKELSFESVQTIIYCAAWTAAKSNGAKIFITSGESTHKINSIRKLKWQVRLEKKIEDLRRKIGRLTQFIRGNTNFKLQKHMKEILAAHKIHSRHEEPNSQLSHFLDTLKQKLTVAASRLKRYTICSLRKSQNTEFITNEKCFYRSLKTINTNGSTISQRNNTNIQNQVTLKELHEFWGSLWNNDICHNTQANWISDEKTRNATLETMEFDQVSADTLKNVIDKLQNWKTPGSDHIQNFWYKKFTHTHPYLLHHINIFIKNPRQLPKYITAGTTYMIPKDTTDLQNPAKYRPITCLQTIYKIITSCITEKIYEHIKIHNILTEEQKGCRKLSKGCKEQLTIDSVIMRQVQEKRKNLNSMYIDYQKAYDSVPHSWLIETLNIYKINSKIVLFLSTIMKNWTTKLKLKTSKGHFETPSINIRRGIYQGDSLSPLWFCLALNPLSKLLNSTNIGYALKYKNETEETSVLSSVEEIKLNHLLYMDDIKLYAETIDDLNYLANITDTFSKDVCMKFGIEKCKINSYEAGNALQHTYQIESGEYIDALDPNSGYKYLGYIQSNLLHDKEIKSYLTAQFKHRINIILRTQLNSRNIIKAINTFAIPILTYSFGIINWTKTEIKSLQRIINTSLTKHRKHHPRSCVQRLTLPRTEGGRGLIDLTNLYYSQIHNLRTYFHDKITESILHRAIVVNDIKLTPLHLNNKSLQIKDKQTDRQTKLLQWAQKSLHGRHRYDLCQTNVDKIASNEWLRRGELFPETEGFMIGIQDQVIETRNYQKHIMKIPIATDTCRRCSSSSETIQHITSACKSIVQSDYKHRHDQVANIIYQKLAIKHKLISPPFKPYYEYKPDTVLENRSYKLYYDRAILTNKTIHYNRPDIVLVIIIIIVSL

SEQ ID NO: 25035 - protein, 1395 aa, Achlyodes mithridates
MTNGALASTKYAMRLRNRQIPQAGTREGESRPGPSDSGSPSYSGGGNVSRMTIQSCTAVVNPSLHTISNPSSPISSTQSLFRSPSSSPHSFQYQQSSSRTTTISPASDSVQDAHMHSSVPMINTVPGDVVQETTFVNEPVPINGVSRKRIKWSNIMNEYILRTYLQITKLETENKNSYLAIMHEKFTNKFPEIQVSRQRIGDQRRAIIRNNLIRQQDRDRISAEVKLQLGGEGNEVQPTNQDVNTTGQRMRWTSEYNESIMRAYFRITKLETDMTSYRTLLHQDFINSFPHLAHVTPQRVADQRRAIINNKQISDARLQIIKQEVAKELPILHESLTATSLSGSNNLEARDNENLIDNINLNYLNVNPEELGSTDTNTNLDKTFQEALTYFTGTNPTNRHYIPKQKSSKKLCRIINYINDTILPKQLQKELSFETFQTIIYSAAWTAAKSNGAKIYIPAKVTEDVRSDNRKPKWQIRLEKKVEDLRKNIGRLTQFIKGNRGNKLQQNINNILNNYKIHSTHEEPNSQLSHFLDTLKQKLSVAASRLKRYKACTLRKTQNKLFALNEKQFYRKFRIAENNHTVNKENTTRNQPTLENLHKFWSAIWDDNTCHNTEAVWISDEKIRNNSIKEMDFEHITVDTFKIVINRLQNWKTPGSDFLHNFWYKKFTHAHPYLLYHINNFINNPHQLPHYITAGTTYMIPKDTTDYQNPAKYRPITCLQTIYKIITSCLTENIYRHLDKNDILTEEQKGCRKFSQGCKEQLIIDSVIMKEVAKNRSNLYSIYIDYQKAYDSVPHSWLIEVLNIYKIHPKIIHFLQNTMVHWTTRLKISTTKGPIETMPINIKRGIYQGDALSPLWFCIALNPLSKMLNLSNMGYNLNFINEETAVKEEKRISHLLYMDDLKLYANKKEDLESLSNVTEVFSQDICMQFGMEKCKVNSIEAGKALQNTHQLASGDLIDPLDPNNGYKYLGYTQSKLIHHKEIKHNLTRQFEHRVNNILKSQLNSKNISKAINTFAIPILTYSFGVINWTKIELKSLQRKINTLLTKYRKHHPRTCVQRMTLPRIEGGRGFIDIINLHNKQIKNLRTYFYEKSAKSNLHRAIVLTDTKFTPLNLSNKSSQNNEIGKDKQTSILEWTQKSLHGRHRHDLCQTNVDKVASNEWLRRGELFPETEGFMIAIQDQVIETRNYQKHIIKIPIPTDKCRRCNSSSETIQHITSACKSLAQSDYKHRHDQVAKIIHQKLSIKHNLISQPSEPYYKYKPETVLENDTHRIYFDRTIITDKTIHFNRPDITLIDKVTKSAYIIDIAIPNSHNIQNTISEKLTKYIELKEEICRLWQVQKATIVPIVLSATGIIPKQLKQSLNTLDLSFYTSFSLQKAVILNTCRIVRKFLQTDKD

SEQ ID NO: 25036 - protein, 1390 aa, Aethilla lavochrea
MRLRNRQIPQVGTREGESRPESSGSGSPAYSGGGNVSRMTTQSCTVVVNKPSFHPVSNPSSPVSSTQTLFSSPNSSPYSFQFQQYSSQSSTTSPLLSDIAQDAYTHFSVPINSLVLGDVVQETTLVTKPVPITSLPGKRIKWSNNMNEYILRTYLQITKLETENKNNYLTTLHETFSSKFTEIKVSRQRIGDQRRAIIRNNLIPLQERDRIFAEVKLQLERQGDLQPKSQYTNANTTGQRMRWTTEQNEAIIRAYFRITKLETDMTSYRTLLHQDFINLFPHLTHVTAQRVADQRRAVVNNKQISDERLQFIKQEVAKELSIPQEPLTMCNIKNNSSNTNNIEIGNNADFLNNIDINCLTDNYQEQGREGINSILDKTFQEALTYFTDTHPTNRHYIPKQKTSKNLGYIIHYINNTILPKQLNKELSFETFQTIIYSAAWTAAKSNGAKIFISTREIQNIGRENRKPKWQIRLEKKVEDLRRKIGRLTQFIKGNRGNKLQHNINYILNHYKIHSTHEEPNTQLSHYLDTLKQKLAVAASRLKRYKTCTLRKTQNKQFVSNEKQFYRTLRTTRHNQNLDNENTTQNSPSMEDLHKFWSTIWDDNTSHNTQAGWIEDEKTRNNSTQEMEFEHVTAETFTIVINKLQNWKTPGSDFVQNFWYKKFSYAHPYLLYHINNFINNPQQLPKYITAGITYMIPKGTTHCNNPAKYRPITCLQTIYKIITSCLTENIYKHIDINNILTEEQKGCRKFSQGCKEQLIIDSVIMKQVSKKRSNLYSMYIDYQKAYDSVPHSWLLEVLNIYKIHPKIIHFLRNTMTNWTTRLKITTTKGAVETIPISIKRGIYQGDALSPLWFCLALNPLSKMLNLTNMGYQLKYTNTETAIDEEKRLCHLLYMDDIKLYADKKEDLESMSNITELFSQDIRMKFGIDKCKINSIEAGKTLQHTHQLASGDQIDSLDPKSGYKYLGYTQSQLIHHKEIKSNLTRQFEHRIGCILKSQLNSKNISKAINTFAIPILTYSFGVINWTKIELKSLQRKINTLLTKHRKHHPRACVQRMTLPRIEGGRGFIDVFNLHNRQIQNLRAYFQEKTTESDLHRAIVLNDIKFTPLNLSNITSQNNEIPMDKQTKILEWTQKSLHGRHRHDLCQTNVDKVASNEWLRRGELFPETEGFMIAIQDQVIETRNYQKYIIKMSIPTDKCRRCNSSSETIQHITSACKSIAQSDYKYRHDQVAKIIHQKLSIKHKFISQPYEPYYKYKPETVLENETHRIYFDRTIITDKTIHFNRPDITLIDKLNESAYIIDIAIPNSHNIQNTISEKLTKYTELKEEICRMWQVRKATIVPIVLSATGIIPTQLKQSLNTLGLPFHTTFSLQKAVILNTCRIVRKFLQTHNS

SEQ ID NO: 25037 - protein, 1365 aa, Apostictopterus fuliginosus
MENSTTFNKNNKTIKYNLRSFSRAQRNNPEYQKTQTPNKDSENQITTWNLTESPKSVTTFDDDSSNFTLSSSKSLTSLSIDCRLLEDAVQETFQVVDPVPITNQIRKRNKWTKDMNEYILRTYFQITKLETENKYSYLSLLYTKFSDKFPQMHVTRQRIGDQRRAIIRIKLLHQKEIDKIYAEVKAELQKGGMQAPNNNHDILTGHRMRWSSEQKEGIIRSFFRVTKLETDMTAYRTLLHEDFITSFPHLSHLSIQRIADQRRSIIKNKHISAERLQAIKEEIAIELGSIQDTPAFTNANVSETNIAQIDTNDNSLNNIDVSIAIDNQPELSNNYIRNSKLDQTFRDTLIYFSGTDPVSRQHIPRQKTSKKLSTIIHYINNKLLPENLNEDINYENLQTVIYCAAWTAVKCNGAKINTNPNEKLPVYAKNGKPKWQFRLENKVENLRKKIGRLTQFINGSRSSKLQKHINHIIEEYKIHSVHEEPNTHLTHFLDTLKQKLIVVSSRLKRYKTCTLRKTQNKQFISNEKHFYRTLRNTDTNQSSDFNFPSNDTSVRLTPTPEDLHTFWSSIWDNNVHHNTNAEWIKDQKVNNSAIREMDFQHISLETLHKVINKLQNWKAPGSDNIQNFWYKKFTYTHTYIIKHINNFIINPQTLPKYITAGTTYMIPKDATDRQNPAKYRPITCLQTIYKIITSCLADNIYEHLIKNNVLTEEQKGCRKLSQGCKEQLTIDSIIMKQVQEKRKNLYSMYIDYQKAFDSVPHSWLLEVLDLYKIHPQIIRFLHEAMMNWTTRLKLSTPHGTTKTALINIKRGIYQGDALSPLWFCLALNPLSSMLNLTNTGYLLKYRDIETNKHANSQIKRLNHLLYMDDIKLYADTKDDLYQLANITETFSQDICMQFGIEKCKINSIQAGITHQHTYQMESGMHIDPLDEGSVYKYLGYIQSKLIHHKEIKSMLTIQFKHRVNTILRSQLNSKNITKAVNTFAIPILTYSFGIINWTKTELNNLQRYINTALTKNRKHHPRSCMQRMILPRIEGGRGFIDIPNMHSKQIKNLRTYFHEKTARSNLHKAIVENDIKLTPLNLHNTATQRNEKQIDRQTRITEWMQKSLHGRHRKDLCHTNVDKVASNEWLRRGDLFPETEGFMVAIQDQVIETRNYQKHIMKIPIPTDRCRRCNSSSETIQHITGACKSIVQTDYKYRHDQVAKIIHQKLAIKHSLISQPIKPYYEYNPEVVLENKTHKLYFDRALLTDKTIHYNRPDITLIDKINKCAYIIDIAVPNSHNIQSTISEKLTKYTDLKDEINRMWHLRKTTIVPIVLSTTGIIPIQLQHSLKSLDIPTQTFINLQKAVILNTCRIVRKFLQKDEDH

SEQ ID NO: 25038 - protein, 1367 aa, Cycloglypha thrasibulus
MRLRNRVIPQAGTSPSGEEESSPEHSSSGCPTYSGGGIVSHMASQFPAVGANSSSSQSSSSTVTSSFKSSEFTNQTPSIPLVQSRSSSASLSDRALGDVVQETSQVEQPAPTTSKSHKRIKWSNIMNEFILRTYFQVTKLETENMNSYLPELYEKFMNKFPQISVSRQRIGDQRRAIVRNRLVKQDSIDRIYQEVKAELQLGEVQPTQTISLGQRMRWTSEQNEAIIRSYYRITKLERDMTTYRTLLHQDFITTFPHLSHLTVQRIADQRRVIINNKQISEERLEVIKQDIAAELQITQESLTNSSMSVTKTSSVGLEKCETVVNSDNLSSLNENISQLNMEERNLELETIFQEALTYFTNTSPTDRQYIPKQKSSKRLGRIIHYLNKTILPQKLSKDLNYDSLQTLIYSAAWTAAKYNGSRICIPVKNTQKVKKNWKPKWQIRLERKVEDLRRKIGRLTQYMKGNRSSVLQKHINNIRHQYKIHTSHEEPNTQLSHFLDTIKQKLTVVCGRLKRYKTCTLRKTQNKEFSTNEKLFYRSLNTSNTNKTFTLPTDNQPAVDNLHKYWSSIWANSVNHNAQAKWIEDERASNEHIETMNFQHISADTLNNVINKLNNWKTPGSDFIQNFWYKKFSCIHPYLLYHINNFVNNPELLPKYITAGTTYMLPKDMSDPQNPAKYRPITCLQTIYKIITSCLTDDIYKHLNRNNILTEEQKGCRKFSQGCKEQLTLDAVIMNQVVEKRKNLYSMYIDYKKAYDSVPHSWLIEVLDIYKIHPTIITFLHNTMANWTTQLRINTSNATILTPPIDIRRGIYQGDALSPLWFCLALNPLSKMLHLNNYGYPLEYTSTVNDAVSNEVHRLSHLLYMDDIKLYADHKDELHCLANITEQFSVDICMQFGIEKCKVNSIEDGEKQQHIHHMQSGEQIDPLDLDDGYKYLGYMQSKGIHHKDIKRTLTTQFKHRLNSIFKSQLNSKNITKAINAFSIPILTYSFGIINWTKTELKGLQRSINTSLTKHRKHHPRSCVQRLTLPRIEGGRGIIDIGNLHSKQIQNLRTYFHQKTTESTLHRAAVFNDTKLTPLNLSNQTPETNNKQTDRQAKILEWTQKSLHGRHRQDLCQSTVDKLASNEWLRRGELFPETEGFMIAIQDQVIETRNYQKHIMKISIPTDTCRRCSSASETIQHVTSACKSLAQSDYKHRHDQVAKIVHQKLAVKYNLLDTTAHPIKPYYEYIPETVLENHTHRLYFDRAILTDKTIHYNRPDITLIDKHNRAGYIIDIAIPNSHNIQNTISEKLSKYIELKEEICRIWKIQKATVVPIVLSSTGIIPTQLKKSLHTIDLPYNTFIGLQKAVILNTCRTVRKFLQTDNNHN

SEQ ID NO: 25039 - protein, 931 aa, Camptopleura auxo
MRKPKWQIRLERKVEDLRRKIGRLTQFIKGNRSSVLHKHINNIRHQYKIHTSHEEPNTELSHFLDTIKQKLTVACSRLKRYKTCTLRKTQNKEFSINEKLFYRSLKTSHTNTTDSTIQNQCTIENLHQYWSSIWANSVNHNAQAEWIEDEKTSNRYIEPMNFELISADTLSNVINKLNNWKTPGSDFIQNFWYKKFSCTHPYLLYHINNFINNPELLPKYITAGTTYMLPKDMSDPQNPAKYRPITCLQTIYKIITSCLTDNIYKHLSCNNILTEEQKGCRKFSQGCKEQLTIDAVIMEQVIKKKKNLYSMYIDYQKAYDSVPHSWLIEVLNLYKIHPKIITFLHNTMANWTTQLRINTLNATAITPPIDIRRGIYQGDALSPLWFCLALNPLSKMLHLNNYGYPLEYKSTEDNVVSIKENRVSHLLYMDDIKLYADTKDDLHCLANITEQFSEDICMKFGIEKCKINSIEDGEKHQHIHHMQSGDIIDPLDLDSGYKYLGYVQSKCIHHKNIKHTLITQFKHRLNSILKTQLNSKNITKAINSFAIPILIYSFGIINWTKTELNGLQRSINTSLTKHRKHHPRSCVQRLTLPRIEGGRGIIDLGSMHSKQIQNLRNYFHQKSTESILHRTVVFNDTKLTPLNLSNQTPETNKKQTDRQTKILEWTQKSLHGRFRQDLCQNTVDKLASNEWLRRGELFPETEGFMIAIQDQVVETRNYQKHIMKIPVPTDTCRRCCSASETIQHITSACKSLAQSDYKHRHDQVAKIIHQKLAAKHNLIDITSHPIKPYYEYSPETILENDSHRLYFDRAILTDKTIHYNRPDITLIDKHNRAAYIIDIAIPNSHNIQNTISEKLSKYIELKEEICRIWKIQKAIVVPIVLSSTGIIPTQLKKSLHVIDLPYYTFVSLQKAVILNTCRIVRKFLQNDNNHD

SEQ ID NO: 25040 - protein, 1429 aa, Heliopetes ericetorum
MRLRSRVIPQAGTREGESRPGPSSSGSPAYSGVGTASHLTAQSRIVAVNNITKTTNNRRTNASHDALISKQEQTYSSTHTSPSGDSLASSFHPYEDISTPSSRSMSSSPLFTSYHTFSETRSVNYNTKKCLVAPICDQAIDFRMLENVVQETIEVEEPVPINSSSQKRIKWNNNVNEFILRTYYQITKLESVNKNCYLPILYAKFSNQFPHMQVSRQRIGDQRRAIVRNNLIKKQERDRIYAEVKENLEKNEEVQTQTLNIMTDVNQRMRWTTEHNEAIIRTYFKITHLETNLTTYRSQLHQEFINLFPHLSHLTAQRIADQRRVIIKNRQISHERIEIIKQEVATELQMLQDRMDSDNDTHASENVSQAGIENTDDFLSHIDTNCLTDNQVEPIRNNRNFNLDKTFKEALIFFTDTDPTNRQYIPKQKTSKKLASIIQYINATILPEQLSKESSFDTFQTIIYTAAWTTAKVNGAKISLTPTITLQRQKRNRKPKWEIRLEKRVEDLRCKIGRLTQFIKGNRGNKLEKHINKILVQYKIHSTHEEPNTQLSQFLDTLKQKLTVASSRLKRYKACTLRKTQNKQFASNEKQFYRSLRLMDVNEIAKPNTNTHAINESTAEQLHDFWSSVWNDDISHNKHAEWIKDETSRNNDTPSMDFEQVSLETLQKVISKLQNWKAPGSDFIQNFWYKRFTYAHTYLLHHINHFINNPLLLPKFITAGKTYMISKDTNNTRDPSKYRPITCLQSIYKIITSCLADNIYTHLDKNNILTEEQKGCRKLSQGCKEQLTIDSVLINQVQERKKSLYSMFIDYQKAYDSVPHSWLIEVLNIYKINSKIINFFQNIMINWTTRLTITTLNGPIETSPINIKRGLYQGDALSPLWFCLALNPLSKMLNLTDAGYLLKCKHSTEPSSETAIDFLQEKRINHLMYMDDIKLYASTIADLHQLTKITETFSQDIGMKFGLEKCKINSVEAGKIMLNKYKTASGEYIDPLDPNSGYKYLGYTQSRQIHHKEIKGKLKSQFAHRLNTILKSKLNSKNMTKAINTFAIPVLTYSFGIISWSKAELKQLQRKINTSLTKHRKHHPRSCVQRMTLPRTEGGRGLIDISHLHFTQIKNLRHYFHEKATKSVLHKAIVDNDKKLTPLNLNNNISQNEGQTDKQTKILEWTQKSLHGRHRNDLCQNNVDKMASNEWLRRGELFPETEGFMIAIQDQVVETRNYQKFIMKVPIPTDMCRRCSSSSETIQHIISACKSIAQSDYKHRHDQVAKIIHQKLAIKHSLTSQPFKPYYEYKPDTVLENNFYKLYFDRAILTDKTIHYNRPDLMLLDKSNKVAYIIDIAIPNSHNIQSTISEKLTKYTELKEEICRMWKIQKATIVPIVLSATGIIPKHLKQALTTLDLPIITSVSLQKAVILNTCRIVRKFLQTDKDMRF

SEQ ID NO: 25041 - protein, 1309 aa, Pholisora mejicanus
MKMQKTNKITYNLRSLSRGQAEGPTSVRTFHRKNVKDKNIERVESPTPDDDTSSTVIFSSHRSSSSLSTNSRLLADVVQETTQVKQPTPITSIPRKRNKWTKDMNEYIMRTYFQITKLETENKNCYLSLLYEKFSSKYPQIQVSRQRIGDQRRAIVRNNLIPQQERERIYEEVKFEIQEGKELPTTHFIENSNQRMRWTSEQNEAIIRSYFRITKLETDLTTYRTLLHKEFITTFPHLAHLTAQKIADQRRVIINNKLIPEGRIQDIKQEVAKEIQFLTEHIQSQNNVCLFENNNFLNSIDINCLHDGTTDTNKDKRNLELDETFKEALQYFDNIHPTKRHYIPKQKSSKKLGSIVHYMNTIVLPEQLNDKLSFEKFQTVIYSAAWAAAKYNGAKIFITDEKTQHRKNHNRKPKWLVRLENKVEDLRRKIARLTQFINGNRGIKLQQQIKDIKEHYKIHSSHEEPNQHLSHFLDTLKQKLAVVASRLRRYKTCTLRKTQNSQFASNEKQFYRYLRTIDTLQNTQQNTNKISTQNLPAPEDLHRFWSSIWDNEIRHNTQAHWIEEEKIQNATNNTMQFEQISEDTFKRVIHKLQNWKTPGSDHIQNFWYKKFTFAHPYLLNHINNFISNPQLLPKYITAGITYMIPKDTNDCKNPAKYRPITCLQTIYKIITSCLTENIYKHLNINNILTEEQKGCKKLSRGCKEQLTIDSVILKQVQEKRQNLYSMYIDYQKAYDSVPHSWLIEVFQIYKINPKIISFLHNTMTNWTTQLKVNTANESVETTPINIRRGIYQGDALSPLWFCLALNPLSRMLNSTNTGYLLQYENSTSDDEVIENKRVNHLLYMDDVKLYADTKDSLHILTNITEEFSQDICMQFGIDKCKVNSIEGGRTVYDSYQMESGENIECLDINNGYKYLGYIQSKVIHHKEIKINLITQFKHRLNKIFKSKLNSKNTTKAINSFAIPILTYSFGIIKWTKTELKNLQRKINVTMTKHRKHHPRSCVQRMTLPRTEGGRGIIDIISLHNKQVKNLRTYFHEKSNKSELHKAITQNDRKLTPLNLYTKSNEEIEVHTDSQAKIFEWAQKSLHGRHRQDLCQPNVDKLASNEWLRRGELFPETEGFMIAIQDQVIETRNYQKFIMKKSIPTDRCRRCSSSPETIQHITSACKAIAQSDYKYRHDQVANIIHQKLAFQHKLISPPLKPYYQYKPDTILENNTHRLYFDRAILTDKTIHYNRPDITLIDKHNKLAYIIDIAIPNSHNVQNTISEKLTKYTELKEEICRMWKVQSATIVPIVLSTTGIIPKQLKQSLNK

SEQ ID NO: 25042 - protein, 1323 aa, Muschampia proteides
MEIKKINKIKYNLRSLSKTQVKEPNARSVRTLHENENRDDTEMSESPTSTDDSSSTLTCSSHRSSSSLSISSRLLEDVVQETIQVEQPVPTTSKSQKRNKWSKDMNEYIVRSYLQITKLETENKNSYLPLLHEKFSCKFPQMQVSRQRIGDQRRAIIRNNLLTQHERDTIFEEVKSELQTGKEFQPTTINKNTISSQRMRWTTKQNESILRSYFKITKLETDKTAYRVLLHQDFITSFPHLAYLTVQRIADQRRTIINNKLISDERLLAIKQEVSVELIQLAPKCTETHSNACTKEDENLGLLNKENSIDKLDTNCLNDNYSEINRNKRNFSIDETFHDSLTYFSNKSPTDRQYIPKQKTSRRLGSIIHYVNSTILPDQLTEELSFEKFQTIIYSAAWTVAKINGAKIVIPVKEIEKVKKSNSRKPKWQIRLERMVEHLRRNIARLTQFINGNREKKLQQHINFIKNQYKIHSTHEEPNTQLSHFLDTLKQKLTVVASRLKRYKTSALRKTHNKQFLSNEKSFYRHLKIHDQHQNLKKDTCIQNQLTAEELHKFWSSIWADNINHNTQAKWIKDEKERNTAIREMDFLDINAETFTIVINKLQNWKTPGSDYIQNFWYKKFTYAHQFLLKYINNFINNPQQLPKYVTAGITYMIPKDVTDCNNPAKYRPITCLQTIYKIITSCITENIYSHLNMHSILTEEQKGCRKLSQGCKEQLIIDSVIMKQVKEAKKNLYSMYIDYEKAYDSVPHSWLIEVLKIYKIHPKIINFLLNTMDNWTTRLRMTTDNGTIETIPINIRRGIYQGDALSPLWFCLALNPLSNMLNLSQKGYLLKYTNDELNNKTLSGQKRVGHLLYMDDVKLYADSKDDLYYLTSVTEGFSQDISMNFGIQKCKINSIEAGKLLKDNYEMESGNFIGPIDLDSGYKYLGFTQTKLIHHKEIKLTLTRQFIQRLTAILKSKLNSKNTTKAINSFAIPILTYSFGVIKWTKTELKNLQRKINTLMTKHRKHHPKSCMQRMTLPRIEGGRGFIDITNLHNTQIKNLRIYFHEKSFKSNLHKAIVQNDIKLTPLNLGNRTSQDNEQVTDRQTKIIEWTQKSLHGRHRRDLCQSTVDKIASNEWLRHGQLYPETEGFMVAIQDQVVETRNYQKHIMKISIPTDICRRCCSSSETIQHITSACKSIVQTDYKHRHDQVAKIIHQKLVTQHKLTTQPLKPYYEYIPESIIENNTHKLYFDRAILTDKTIHYNRPDIILIDKLNKTAFIIDIAIPNSHNIQNTISEKLNKYTDLKTEICRMWKIQKATIVPIVLSATGVIPIQLKQSLSILNL

SEQ ID NO: 25043 - protein, 778 aa, Hypermnestra helios
MEAEWIAEEKLRVQNVEEMKYDNIDLVELREVLNRTQNWKTPGIDGVHNFWFKKLTAVHEILAKQINDIIIGRANFPDFLTKGITYMLQKSMKTEDPSQYRPITCLPTLYKIFTACLTKRINRHIEQNKIIAEEQKGCRRHHMGCKEQLLIDSTVLKHAYNRKNNLYVAYIDYKKAFDSIPHSWLIHILEIYKINPLIINVLKNIMATWRTSLKIKTDSTDITTNEIYIRRGIYQGDSLSPLWFCLALNPLSHQLNKSNNGYDIKNNRRVLCQLTHLLYMDDLKLYSSNNLRINKLLEITTAFSQDIKMDLGLDKCRKLNIKKGKIIDGDYKISDGHSIVGMECNDLYKYLGYKQSQTLQNKLIKQELEKEYYRRVNNICKTQLNSKYLFKAINTYAVPVLIYSFGVIKWTKTELNKVEIKTRTTLTQYRYHHPKSAKERLTLSRKEGGRGLIDLSHLRDRQIQKLKQFFQHKKTESSLHEAITVIDDNYTPLNLKELNLTELANSTIYKQEKYNQWKIKELHGRHPQELEQEYIHKEASNRWLDSAQLFPETEGFIIAIQDQVIATKNYRKHILKDRTILNDYCRKCHKKPETIQHITGACSSLSQNDYTHRHNQLVNIIHQKLSNKYKLSKDNGKPYYQYIPQPVSENQTHKLYYDRTLLTDRTIHSNRPDITLVDKIKKQAYLIDVAVPNTNNIQKTITEKIRKYTELQEEIKSIWRLNKVTIIPIIISSTGVVPKQTIENFKKLDISKYTYITLQKAAILNTCRIVRKFLQNDI

SEQ ID NO: 25044 - protein, 912 aa, Papilio phestus
MNRDWACHVCCELHSSSTKLEDHVRRIHQIQFLVGCNTCSRVDFKSMKNALIHSHHCARKNSNVTESSPPRPPARAMEATFTNFTVLANCERNLCLNFSQCEHHTRVLFVPTRAAESRRANQWFCWKCSKRLDSCKKLLNHLHVDHQMSLKVSCKYCSRAFASLAALSAHQRSCFPMPTIFTIEPSYAKPMIWPINIEELKFCIDELPDSEFKVCASNALQHCDQSMMNTLYDSLCQKLPKKEKRARRSRGSRRKNNNNASKTKHKRHKEKRAIFACHQTEYKNDRRRLMLRLLNKYHEAAADDATSAFSTFRDIFTNETFIHPNPSLASNSFSILSDAHEWQVERFLKSKKGSSPGVDLLEASDLLDFTAEISVLYNLCQLWTVIPDDWRRARTSLIPKDFEARSYRPITISSLLYRGLSSCLARNLSGYNFALSQKGFVSGDGIFEAITLAKHLALETDCHLVSLDVKKAFDSVGHKALLQSCANAGFTEQSLAMISELYRDCTTTLKLQKFESEELELKRGVKQGDPLSPLLFNLCLDPLISKLEESDLGYTLGARQVTVIGYADDILLASSTLSGMQAVINQVCSHLASIGLSCNINKTTYLGGRTNLHINHLPILSNCEIKYLGTMISRTSRSCFPKATLNTVLTAIRKGRLKPFQKIVMLKYYGLPRVSFAAVNSHIRGDDLIDADVSIREFIKDTLHLPMPTPNSFIHLKTSYGGLYVPELRREVPTLFLKRANNLCHSQWWPSRVVANSSSFKSNTKRISQLAPPHLDSQRRLMEDLRNIPNCRGFSLFSHGGMLCNDFLKMNYSYPFSKLRRRILMRSDTVIAYSSNDHGTCTCGMALNQFHVLSSCPLRRLLYTDRHNKALDPIVDYLKTRGDVFREPTIKHEDSTIKPDIILVEPSKPDTA

SEQ ID NO: 25045 - protein, 1037 aa, Papilio phestus
MILFESSDYSLRMEDVGLVYFPLLTDQDRDWACHVCCELHSSSSKLEDHVRTVHQILFLVGCNICHRVDFKSMRNALIHTHHCTRKNLPNEAPPERRPPARAMEAMFTNFSVLANCARNLCLNFTECKHHISILFVPTRAAAERRANQWFCWICSTRKDSCKKLLTHLSDDHHLSLKVSCRFCSRMFDSLAALSAHQRSCFPLPRVETIAPSHTKPMIWPINIDELKRCIEELPSSTFKDIASRAVQHCDQLTMNKMYEALLEKLPRREKRLRRSRGRKRKKNSNNSKARRHRNKRVEFGCQQTEYNNDRRRLMLRLLNKYHDAAPDDATDAFATFRQIFTSETHVHPTPQLSQVPFSILGDVSEWCVENFLRVKKGSSPGVDLIEASDLLDFIPNICVLYNLCQLWTLIPDDWRKARTSLIPKDFEARTYRPITISSILYRGLSSCLARNLSRFDFALSQKGFISGDGIFEAISLAKHLASRTNCHIVSLDVSKAFDSVGHRALIQACANAGLTEQSLSMVKELYRDCTTKLKLQKFESEEMELKRGVKQGDPLSPLLFNLCLNPIIAKLEDNRLGFPLGARNITIIGYADDLLLVSNSIYDMQTMLNEVCGYLSTIGLSCNIGKTVYLGAESNLSIDNFPIATTETLRYLGTDISRTKKTSFPIHILEKVQSAIRKARLKPFQKMVMLKYYGLPRITFAAVNSNIYGDDLSKADRIIRSFVRDTLHLPTSTPNSFFYLKNCHGGLYVPELRRDVPVLFLKRAERMKHSIWWPSKVVVQCPNHQSLLKRVAQLAPPQLDSQLRLLNDIRSIPSCRGFNLFSHCGMLGNGFLQLNHSYPFGKLRRRIMMRTDTIIAYNTTEHDQCTCGESLNQSHILSSCRLRRLLYTDRHNKALALIYDKLKGRGDLFKEPTIRHAGSTIKPDLILVEPSKPDTAIVMDLQVVYESSEDSFEAASLSKTNKYLTCFRSIRWFLRQNGWPDMRRIKCKALIFGARGSLFRKTLSLLKDRFEIPKTNISTICDNIFDYSSYILSHSPS

SEQ ID NO: 25046 - protein, 1084 aa, Phalangium opilio
MSTAPHPISTAIFEYPILDVANCPTCVRVFVDHASWRAHVFSHGFAPSALKYVCRSCRASFTSIFGVSVHSHSCKPSASANCGASTDLSTSTVISPLPHSCEWCPLSFATARGLGVHQHSRHPSEYSLKHEHTGTSRYWHSDEIHALASLESSLPLTTVNMNQRLAALFTDRPIASIKAKRRDTHYKTLVTTLRANITPPTSSPTAPPIPITRTAPITHPINPLQLPLGALTLDARPEEEFLAYFQSYANDPETPADLRVVATSVLQANPTALQDLGNYISNLFPVKTMVNLHGSDSRVNGRTKKRRRYAQFQTLYKKNKKKLSKLILDPYDESTATPGASDIADTFGSLFSSASPADSASFTPKKAITPAYFPVRPADVAHALSRQKSSTPGPDQVTIKHIRSIRVNDLTFIFNVFLYLKDLPLQLKLCRTVLIPKSGNLSHATNWRPITILSLIVRLFHGILASRLRAALNLHPSQQAFIPADGAMSNTLLLDFLIQNAKKKKRPLSLVSIDLAKAFDSIGHHSLERALSRLGLEPELSKYIINTYAFASTTISCGKTTCGPFEMTRGVKQGDPLSPILFNAVLDELLDELPPNIGVPVKTNRLNVLAFADDLFLVSESEFGMRTLLDHATRFFHARGLHINAAKCHSLVFRKHGKSGKLVIPTAPVFALSGLDIQSSGTTDLFKYLGVGFGHNGKTSPVIVKLQRHLENLRTSCLKPQQKIIMLRVFVLSRYSHLLTLSRLSKCILTRLDANVRDFCKKVLRLPHYTPTGFFYTAAKDGGLGLPKFALNMPLNAINRITSLVDNPSPIVRDLLESDFVAHQLEHCKSLIGSSGATKASLKADHLSSFTASVYGLGLNQGNGRVSNHWLGNTARIADARMHSKKLKFRLNLLACRGMPANRGDRSCRAGCGRVESLSHISQQCTSVLDKRIERHNKVLSFLVNSISDLTFTKLKEPVLNAVCSVTGARQTFKPDLVLVTAADIIVVDVGICWETPTPITRANALKAKTYDTPLFRAHLLGLFPGRQFKFHAFTISGRGIFASENDALCAVLGLGLGFKIKTVDIVLECGVYLYQHFMSRVFN

SEQ ID NO: 25047 - protein, 1084 aa, Phalangium opilio
MATNTNPITFANFNYPISGVATCPACPTMFTDHTSWRAHMLSHGLAPNALFYICRSCQASYNSIFGVSSHARSCKPPAFIPPAAANNTSSTSLISIPRHSCEWCPFTCPTLRGLGVHQHALHPSEHTFKHQHAGQYRYWHADETNALAELECSFPVDTRDINQQLAAKFLERPLTAIKAKRRNPAYKLLVASLRDAQTSQPRTTSPITHPLSNDDQQLRSRIHLPNSDLPTDANPELEFKSFFRSYATSEDANPTLRDIAASILDGDPNCLQKLERHLALRFPVKPITPRPPSTTTTNSRTKKRRRYARLQSLYKVNKKKLSKVILTPFDNNPDTPSESDIRDTYGRLFSSVSPADDAPFVKKPLNAPTYYPILTTEVSNALSRQSATSPGPDQLTLANVRTISLTDLTFIFNAFFYTTDLPSTLKLSRTVLIPKSGDLTLATNWRPITIPSIIVRILHTILANRLRVALNLHPAQQAFIAADGATSNTLLLDYVLNTAKKRRRPLAIMSIDLAKAFDSVGHHSLSRALKRLSLEPGTSSYILNTYASAATSITCGSTSCGPFAMTRGVKQGDPLSPILFNAVLDELLESLPDNIGAAVGSYRLNVLAFADDLFLVAESEFGLRTLLDHASGFFFARGLSINAAKCHSLVFRKHGKSGKLTVPSSSIFTLCNVAVRSISTTDFFKYLGITYGHNGKSAPIVATLEKDLELLRTSCLKPQQKVIMLRIFVLSRYSHVLTLSRLSKCLLSRLDATVRSFCKQVLRLPHYTPTGFFYTATKDGGLGLPNFTLNMPLNALNRITALSKNPSPIVREVLKSDFVIGQLEHCRSLIGSFDATKSSLKAGFLTSFTATVYGAGLNQGNARVSNHWLGNSARISDARMHLKKLKFRLNLLACRGMPANRGERSCRAGCGRVESLSHISQQCSSVLDKRIERHNNVLSFLTNSVTDPQFLKIREPVYNATCSTTGARQTFKPDLVLINATTIIIVDVGICWDTPHPIANAYAAKAKTYDNPLFRAHLLNLFPNRDFQFYAYTISARGLFANENTAMCLALGLGLGFQIKTVEIVLECGVYLYQHFMSRAFAKT

SEQ ID NO: 25048 - protein, 1011 aa, Phalangium opilio
MTLLSPDMSACPEPYICEWCAFSCTTLRGLGVHQHSKHPTEYALTHQRTANYRFWHEDEIRALASLEASLADTTRNVNQCLAELFPARPITAIKAKRREITYKTLVADLRAQASAVTNFDYSRSAASPYLANTDADSSESNTPPPSAIAGSATPPPATPESLFTSFFESYVANASTPADFRAVGIMVIEGDPRALPGLNACLTSRFPTKPVPASRRAAGQVNARTKKRHRFAQFQSLYKLNQKKLSKLILDPHDDTTVQPSAEDIAGTFGDLFSSPSPPDSKPFIRKPSNGRTYFPVSVAEISQTLLRQKSSSPGPDQLTLKDIRSIRVEDLAFIFNVFFYLKNLPLSLKQCRTVLIPKTGDLSHATNWRPITILSLLVRLFHNILAGRLRFALNLNPAQQAFVSADGAMANTLLLDYVINSSKKRRRPLSVVSIDLAKAFDSVGHHSLTRALSRLSLDPETISYIINTYASSSTTISCGSLKCGPYLMSRGVKQGDPLSPLLFNAVLDEFLDSLPGDIGVPIDGARLNVLAFADDLFLVSESEFGMRSLLDLATTFFSARGLRVNAAKCSSLVLRKIGKTGKIVTSPNPAFTLCDVAVRAISAGDLFKYLGICFGHNGKTSPVLDKLRRHLELLRKSCLKPQQKIVMLRVFVLSRYSHILTLSRLSKGLLKSLDASVRNFCKLVLRLPHYTPTGFFYTSAKDGGLGLPSFASNIPLNAINRLKALTTNPSPIVRSVLGSDFVAKQVEHCNNILGSTGVTKSGLRAEFLASFTASVYGSGLNQGNTTASNHWLGNRAQITDARMHLKKLKFRLNLLACRGMPANKGDRSCRAGCGRVESLSHISQQCSSVLDKRIERHNKVLTFLTNSIKDPQYSKLREPVFNAICPTTGVRETFKPDLVLVSDTEILIVDVGICWETPLTLSQSYTLKAKTYDTPLFRAHLLTLFPNRNFKFFAFTVSGRGVFAAENSTMCAILGLGPGFQIKTVDIVLEQGVYLYQNFMSRAYNRSARG

SEQ ID NO: 25049 - protein, 962 aa, Leucinodes orbonalis
MSHSLPIDSATSSGPIDEAQSISLDGFEKCVQCAPPRYFKGKRGLKVHLGKAHKACQNLIPEVHITSPQQDLETFGETLARYKNTRPVIKRIPRGARLAVADSLRETIDQILVNNNLDSWIEFLTFSYRVLHISKADNSSLSLTNRIKNNCSLFSKDILANNEYRYRNDKVNKIKLIENKFNDGDLKGAAQLLFSCDTIAPNNSETLYALQTKHPNPRAPINLPVPPASPTSNNIISVDIVSAAIKSFKSGSASGLDGLTPQHFKDLVFVNGNGSSNSLLSKIADLVNLMLCGRVPNEITSILYGANLCALVKKEGGIRPIAVGNTIRRIASKACNKILLPELNQVLQPFQVGVGTKGGCESTVHAVRTLLDKGQYDVLLKVDIKNAFNSIDREAFLKQVSFHAPLIYPYLWQCYNLPSKLIYQNHCLSSATGCQQGDPLGPAIFSLGIHPIIKDLMSPFNIWYLDDGTLAGDVSTVLSDLISLKTSFGNIGLELNLSKCELFLNKNINPNRRSNIISDFKLAAPDIKIINEDSLCVLGAPILSDSLPNFVDKQINKFNECTKLLFEINAHMAYHIIKFCLFIPKFTYVLRCTQLWKHDNLTYKLDEIIQKTISNVLNCKMDDLAWQQASLPIRFGGIGVRKMSAISLPAFLSSTHASSLLVRKMLNPLMGSTFEVSGLVEAKTAWSSICNEDFPISTHSQRLWDHPLCKDVYNKLLERCITTADKSRLLAVTQKESNHWLRAYPSFNIGTLLDNTTLSIAVGLRLGTKLNEPHRCCGAWVDSLAHHGLSCQRSAGRFARHAAVNDIIRRALSSAHVPCLLEPSGVLRSDGKRPDGMTLIPWKMGKCLVWDATCVDTLAPCHIDGTSRNPAAAATAAENSKFRKYKDIGNKYIFVPVAIETMGPWANEAKLFLKDLSVRLTEATGDSRAGSFLGQRISIAIQRGCCQCFGNPASVRRTFRFC

SEQ ID NO: 25050 - protein, 1195 aa, Cirrhinus cirrhosus
MKRSDRNSIEVPRGRVPSISPRPPRGSRAESHGAGCGPTGVQTFGEEHGLRECSVVLHRLGEGNAEGCTISVRASEDHLGGTSSARESPSTGQPGAASRVEMVHNNPLAGEGSGGAPGVVVLLPLRDFSCALCGVSAGAVTWVHNHFASRHGNALVRYSCRSCGKTSHLWKSIVGHVPKCKGPRAAAPAGAVRCEACPLSFSTKRACSIHEMHVHPAIRNRKRILEGRKRGSSAISQTEEEAGAQATSVAEGEDDSGERIPPKRPRRVRAGTSGGPSEPLASPSVPPDQPNLPEGGLLDSLQEEARKMVGEVEGDGTELSRILAAWLEGCDQLPALVEAATQRMLQGLHSGRRRGPALPSGRALRRPGIRQRCRHKFLAKRRAYHHCQFLFRKNPARLAKEILDGKGEGRCPISLGTVYNAYKDKWGTPPPFGGLGRFQANGRADNAQLYGPLSTGEIQHSLQRALNASAPGPDGIEKQDILKWDPECETLTQLFNMWWFTGVIPTRLKKSRTVLIPKSSDPGAEMEIGNWRPITIGSMVLRLFTRVVARRLTEACPLHPRQRGFRPSPGCAENLEVLQGLIRHSKEERSQLAVVFVDFAQAFDTVSHEHILSALEEIKVDPHVVGLIQQAYTDSCTSVEIGGRLTPDIQVRVGVKQGDPMSPLLFNLALDPLIHGLERFGRGYTVAGHPVTSLAFADDLVLIGGSWSDMAHNLGLLEEFCQSTGLRVQPKKCHSFLVRPCSGSFSVNDCAPWVLGGKALRLTNIDEAIKYLGVKVNPWGGIDRPDLAVSLDRWCHNLGKAPLKPSQRVTLLNQYAIPRLFYQADHCEVSDGVLRNLDGTIRRTVKKWLRLSPSTCDGLLYARNRDGGLGICKLARHIPSVQARRIFRLVHSSDALVQAVMRNSRVESKFKKVWLRAGGTKESLPSLGGVASNERGDAAGSLPRTIPVPSDWRREEFLRWTGLPIQGVGIAGFRGSKVSNAWLRNPVGFKERHYIAALQLRAGVYPTLEFRYRGRSKTVAGCRRCSRGLESCSHILGQCPAVQGARIVRHNKLCRLLATEAEDLGWEVRREWPFVTLQGDSRRLDLVLVRDSLALVVDVTVRYEYAPDTLACAGKEKVDYYGPHKSVIARELGVREVQVYGFPLGARGLWPAENDTVLKAMGLSVARMKSFSRLLSRRAILYSVDILRGFSSSLG

SEQ ID NO: 25051 - protein, 1188 aa, Sinocyclocheilus grahami
MSVQNKRNSSRMAGRPVKQAAIEEPRGRVPSIRARPPRGSRAENRGAGCGPSGIRTLRKAYGIRDCSVVLTRLQEGQAGERRKPDSSNARHGRPGSTSSVRESTRSGQPGAAPSRDPAQINPEANEGPGEALGVVVLLPLRDFSCVLCGMSAGAVAWVQRHFAVRHSNALVRYSCRTCRKTSPLWQSILCHVPKCKGPKTAAPVGAVQCESCPARFATRRACSIHEMHVHPAIRNQKRITESRKRGSSAMTQTEEETGTQPASGLIKESSPTRAAAPKRPREERVAPNEGLLVRLQEEARKMVREKEGEGTELLQVLAAWLEGCDQVPALVEAATQRILQGLVPGGRIGLAGRSSGALQRSRNRWRSRQSILAKRRAYHNYQFLLRKDPARLAEEILEENSSERCPIPVDKIHGVFKAKWENPSPFGGLGRFRVEEKAENEHLSGPISTGEIQSSLQHALNATAPGPDGVEKRDVLDWDPTCETLTQLFNMWWFTGVVPTRLKKSRTILIPKTSDAGTAMEVGNWRPITIGSMILRLFTRVITKRLADACPLHPRQRGFRPSPGCAENLEVLQGLIRHCKEESSPLAVVFIDFAQAFDTVSHEHILSALGQIEVDPHVVGLIQQTYANSCTSVEVGGLCTPDIKVRVGVKQGDPLSPLLFNLAVDPLIHGLERFGKGYTVAGHQITTLAFADDLVLIGGSWRDMAHNLALLEEFCRNTGLRVQPKKCHSFLVRPCSGSFSVNDCTPWVLGGKALQLTPINEAIRYLGIKFNPWGGVERPDLSVSLDRWCRNIGKAPLKPSQRVTLLNQYAIPRLFYQADLCEVSDGVLRNLDGTIRRMVKKWLHLPSSTCDGLLYSRHRDGGLGICKLSRHIPLMRVRRIFQLAHSSDTLVRAIMQNSRVESSFRRFWLRAGGTEENLPSLRGVASNEGGNTAGSVTPHPVPCDWRLVEFQKWMGLATQGVGISGFLGSKASNSWLRKPVGFKERHYIAALQLRAGVYPTLEFRCRGRSKTVANCRLCSLRLETSSHILGQCPAMQRARIARHNKLCRLLGTEAEALGWEVRREWEFRTPKGELRRLDLVLTRESLALVLDVTVRYEYAPDTLARAGKEKVDYYGPYKSVIARKLGVGEVRVYGFPLGARGLWPPSNNKILEDMGLSTARVRSFSRLLSRRTILYSVDILRGFLLSLG

SEQ ID NO: 25052 - protein, 1218 aa, Poropuntius huangchuchieni
MSDNSIGKFIPDGRSPGQTSCHRGPRGRVSSIRARPPHDSRAEDRGAGCGPQVEQTLRRKYGLRECSVVLTPCEVERIEGEGTLDLSSGLRECSVVLTRLEDGRSEDGRALNALNVLSDNLDDIGPGGEPHSLEDQGTDQRVDDRQVSPTADEGQGDALGVVVLLPLRDFSCVLCGVSGTALNWVAKHFSRRHGGVPIRYSCRSCRKTSDSGHSIACHVPKCRGKKKVAPPAGEVRCEGCEARFATRRACSIHEMHVHPNIRNRKRIAESRKEDTEEGSPGEGVPPERPRRKTAKYSGGLTEPMTAAGNSRIRNETPAGGLRVLLQEEARKKVREPGSENAEVLQVLKAWLAGSDQLPELVGAATQRILQGLIPGGRVGPARGRTGALPRPKTWHRHRLKRLAKRRAYSRCQFLFQKDPVRLAEEILDEKENKQCPILVDTIYEFYKAKWEVPTPFGGLGRFRVEVSADNAHLSGPISTGEIQDSLQHALNASAPGPDGVVKQDIRNWDPGCETLTQLFNMWWFTGVIPTRLKKSRTILLPKTSDAGAEVEIGNWRPITIGSMILRLFTRVVAKRLAEACPLHPRQRGFRPTPGCPENLEVLQGLIRHCKEESSQLAVVFVDFAQAFDTVSHEHILSALGRINVDPHVVGLIQQTYADSCTSVEVGGRCTPDITVRVGVKQGDPLSPLLFNLALDPLIHGLERYGKGCSVAGHQVTSLAFADDLVLVGGSWDDMAHNLLLLEEFCRNTGLQIQPKKCHGFLVRPCSGSFSVNDCDPWVLGGKALQLTSIEDAIKYLGVKINPWGGIVTPDLAVSLNRWCRNIKSAPLKPSQRVTLLNQYAIPRLFYQADLGEVGDVALQSLDGKIRKEVKEWLHLPPSTCDGLLYARNRDGGLGICKLSRHIPSMQARRILRLAGSSDTLVRALMRNPRTKSKLKKVWLRAGGTRHNLPALGARVQIGTVGSGQDTMCPVPSDWRQDEFLRWAGLPTQGVGILGFGNSRESNSWLGKPTGFKERHYITALQLRANVYPTLEFLHRGRSKTVAACRHCSRGLESCSHILGQCPAVQTDRIARHNKLCRLLGDAAEDLDWEVRREWEFRTPSGDIRRLDLVLTRGTRALAIDLTVRYEYAPDTLTRAGQQKVEYYGPHAETIGRKLGVRQVQVYGFPLGARGLWPASNYKVLKAIGLSKNRTKSFARLLSRRALLYSVDILRSFYRSLGQ

SEQ ID NO: 25053 - protein, 978 aa, Danio kyathit
MHVHPALRNRKRIAQERRKGGPLEEGEGRAGIEGADAGEGPSGEGVPPKRPKTARTPREPSEPPATPPAPASNPAEGGLRELLREEARKRVEAAGEGDTAIKSVLAAWLDGDDRLPELVEAATQRMMQGLPAGRSVGRPGTSVPLVRGRSRWGRRLKRLAKRRAYHECQFRFRTDPARLAETILDGKGEAKCPIARAEVYEHFRDKWATPKPFGGLGLFGTDERADNAHLLGPISQGEIQNSLRQASNASAPGPDGVGKRDILNWDPECETLTQLFNMWWFTGVVPTRLKKSRTVLLPKTSDPRAMMEIGNWRPITIGSTLLRLFTRVLTKRMTDACPLHPRQRGFRQSPGCSENLEVLQCLLRHAKEKRSQLAVVFVDFAQAFDTVSHEHLLSVLEQMNVDPHVVNLIREIYTNSCTSVEIGRNKGPEIPVRVGVKQGDPLSPLLFNIALDPLIRGLERTGEGYEVAGHKVSALAFADDLVLVAGSWRGMARNLAVVDEFCQTTGLRVQPRKCHSFLVRPCSGAFTVNNCPPWVLGGSALQLTSIGDSIKYLGVKINPWGGIEKPDLGTSLAKWCECIGKASLKPSQKVHMLNQFALPRLFYAADHGEAGDGVLQSLDGTVRKAVKKWLHLPPSTCNGLLYAKNCNGGLGIYKLTRHIPSMQARRIYRLANSSDPLVRALMLSPRAEAKFKSAWLRAGGEEGALPRLFGAGETREGGEVAGDDEAPRCPTPSDWRLEEFQRWAGLPTQGVGITGFYRNRVANDWLRKPVGFKQRHYIAGLQLRACVYPTLEFKRRGRSKTVASCRRCPSRLESASHILGQCPAVQAARIRRHNKLCDLLKAEAESQGWEARREWPFKTPEGEMRRLDLVLIHGDEAMVIDVTVRYEFAPDTLRCAGERKVEYYGPHRETIARELGVSKLNIHGFPLGARGLWLASNEKVLDAMGLGRARVKVFSRLLSRRTLLYSIDILRTFYSSLS

SEQ ID NO: 25054 - protein, 1229 aa, Ctenopharyngodon idella
MIQRFPMARRNGTPWKGFILLTNMSGRNNRKLMPEGTSPGLTRCPAGTSGLGSCSRTRSPQSPLAKDVGGGGGHLVVGLEPGYRLRDCSVTLTRLHGVRVGDRVPSGESAVHGPLGRTSSAVEPPDTEELVIAPRGGPAQAITPASAARDGDTGVVVLLPLQDFTCALCGVPASAVAWVGRHFKSCHAKVLVRYSCRLCGKTSHSGHSIACHVPKCRGPRVAAPAGAVRCEGCEASFATERARSIHELHVHPDIRNRKRIQEGRKRGNSASQQTAGEAGARTALGTNRDSSPDGGGPAKRLRSLAARDSENPSEPVASSSLPPNQPNLPEGGLLTLLRKEARKMVGEVGDDGTDYSHVLKAWLDGCDQLPELVEAATQRMLQGCVPGRGRVPSRQPRTRSRQPSSSRWRRRYLARRRAFHTCQLKFKRDPARLAEEILDGKVYGRCTISPDTIYQSFRNKWELPPPYCGLGRFSAEVSANNTHLVGTISQGEIQESLRLTLNASAPGPDGIEKQDILDWDPRCETLTRLFNMWWFTGIVPTRLKKSRTVLIPKTSDPGAVMEIGNWRPITIGSMFLRLFTRVITKRMMETCPIHPRQRGFRPTPGCAENIEVLRGLIRHCKEERSPLAVAFIDFAQAFDSVSHEHILSALGQIKVDPHMVGLIQQIYKDSTTSVEVGAGTTPDINVRVGVKQGDPLSPLLFNLAMDPLIHGLERYGKGYTVAGHKLVSLAFADDLVLVGGSWGDMAHNLSLLDSFCQSTGLRVQPGKCRSFLLRPCSGSFSVNDCVPWVLGGRTLQLTTIDETVKYLGIKVNPWVGVVRPTMVEALDNWCRSIGKAPLKPSQRVVLLNQYALPRLFYQADMGEVSDGVLRAMDGKIKGTVKTWLHLPLSTCDGLIYARNRDGGLGICKFTRHIPSMQVRRLFRLAHSSDPVVRSVMRSSHAQSKFERAWRRAGGTAGNRPLLSDDVSNARGDTTDPLTPMCPVPCDWRAEEFQRWTGLPTQGVGIAGFRGSSASNAWLRKPACMTERQYIAALQVRAGVYPTQEFRCRGRSKIVAACRGCSYRIESASHILGQCPAIQGARIARHNKLCRLLVVEAESLGWEARREWSFRTPNGDLRRLDLVLIRGNFALAIDVTVRYEFRSPVAVQEKVDYYGPHVIQMARELGVGRVQVFGFPIGARGLWPSRNNTALAVMGLGKERVGTFSRLLSRRCLLYSLDMLRSFTSSLRSN

SEQ ID NO: 25055 - protein, 965 aa, Cyrtorhinus lividipennis
MMPEINCTVCGRSFSSQRALSQHLRLTHPDEFIRQQAQPSQGPGRHKYWSNEEMTIMARHELTVRAACATEGEISTRLAAIMQGRTYEMIRRQRRRPHYISIRQQLETEDTTRETAAPSGSIQPEESNDNVSTLPGPAAALTQAILEDLNACTNVDEIDERLFISKARAFLNGHRDIRFLEEWRIARFPEARSGPRGGSGPTRRPAGTTSPPDLQALWTRDRRAAVQEILQGNPSTRPSMTSHEDIHFWKTKMERRSAPWDPAIQVKHPQDAEMDDIWMPLSVEEISTYKPKNASPGPDGITTSTWNGIHPRIQRSLFHLVMLEGRAPMWMSAGRTTLIPKVPVPTGPHELRPITVPSVILRHFHRIIAARLSHRVRHCIDQRGLIPGIDGIGHNVVLVDTLLQSAKASLREMHLCVTDVAKAFDTVSHEAIHAILRARGWPPEIRGYLMALYADAKTTLGGRIPVRCAAGVRQGDPLSGLLFNVVMDHVLLSLPTRVGYMFRARRWTSIAFADDVVLLSSSSAGMHALVKSFEHSLQQCGLSLNRAKSLYLPLVPRDGKLTVPTSEYNLQDIPTASPTTTWTYLGIPFTVYGSIRPNFNTLHAEIVRTLTAPLKPLQIIEIIRTHIVPAWLHRLVLTASTRKSLGWLDLRIRRALRRFLGVPEDTPNAFFYAPVADGGLGLMELRTLIPELRLVRLASASAVLFETQMPELIPTSLQRKQRRIQAWLTTADGEGLEGARSTPVSTRWLKEDDSGAPAWRTRTAIKTLCGGIPVLARSLRGRPGSRRCRRGCPQDETVNHVLQCCPAVRLQRCGRHNAAVRLLAEYARRKGWSLWQEVLIQLGTRSLRPDIVIKTNDAAYIIDVAIVTGGSRFPRATPFQRKIDKYGGREMEEAVVELTGASVVSVIPAIVTWRGVWYPPSANLLRRLFPDFLLGWLTRRVVDGGGFIWAAFLRNLGRGPPDGPP

SEQ ID NO: 25056 - protein, 1905 aa, Oedothorax gibbosus
MEPPSDSVPVTHTASSPGPMNSPSSPPLDENWSLVFSRSLSQRANYSRSETPRLPSRSIPSSETEQAQKITLPTHVPGSPPLPATPPALLPVCPSSPSPSPATAPGINTSWSLAFSPSRNQSNPLLSFEATLELLLNETRPKGEKVSTTPLKIPTPPPPITHAQDEGTSMAPQTAPPDWRPILSPPLFQTMKCPREAPFFAPPTSLPPPPMKTQSPPLEESALEPPIATNTSPTPEESWTCDFCERKFTKAADCDAHLAEVHLFVMESDDSLSPPPTAPVAYPTNPSPSAGTRSDATPKATSSLGDTTPVDPPTFIARPKDKAFSCTVCGWKFSKYPAFRRHKATHKQGTPNAPPAVLHAPTNPGPSSATTFAGALSTHPKRHQAPPPNRKVFPCSVCKAAPFPDAMTRDLHLEFAHSGKTARVVIQRERIFTSKFHRDPNPDLGTLPARATGGAPNAPAFPPPPAAQGDIAAAAPDSQDLFQNRRAHSRNPPPNQPTTAPRRGRPPGRASGNHKLSAARCPEEDLDDAPVVCTRKGQSLHVSFPMARTLLCTEASCPSVFASGTWNTLLQSLKRHLRLDHHTPISHVKKWCAVCPAVCPERISFHPCFANRDPTFLPEVDLAFRCELCSFQCLNRRQLRNHSAAHRNEELRVPRRPFASADLHPNRRRRGRDLHSSLQPPVPPRPSGRSNQVRTARPDNPRSTTEWVRSNAASSQLDCVPDPLPLSTPEDSPPPATTSHPPPVPALAARTGTIDEMAEWIVEANLPPPPKRKKRRRRRARTTSYSDSNVDPAVIEEMRRKVTPNPSSASSVPHSPSQATSPSQLPSSMTDQVAGLVDLQHPSTHPPSPPREDDDPLPLDDFIPHLNDLLASATSLSDSRWSEFEALLDEITTRIGEVVNLPPPRDDTVTSQPSTTDAGDHRTIQRLYKRNRRRAIRLITEGEGTRCHLEGNTITNHFQKVFSPSEFDQSIFCQATGRSTVPMDPFSPDEVKARLFKFENSAPGPDRISYSHLKEADPSCTAIAKVLNVCLRAKRIPYQWKTSRTILIHKKGNLDDISNWRPISLCATLYKLLTGCLASRLTTWLSCEGVLSDAQKGFLPFDGTFEHHFLVSREIRRTKTSGEELCMAQIDLANAFGSVPHAAIDTALLTAGVGEDFTHLIHDLYSGTSTEFIAGDGLTDRLEVRNGVRQGCPLSGLLFNLVIDPLVRGIQDAAPPSEDFFSVLAFADDLLVLGRSPDELQSLLDLLPSLSRRLGLSINPAKCRSIHLSGTTPRGHRSTGFRIDDQPLEVIPDHVPASFLGTPIGFQLFQNTEEVEKILSLAKKIGESCLAPWQRIDALKSFFFPTLNFAMRTGQFSKEQLHQIDDEVRKFVKVTLNLVGPASAASNHYIYGASDAGCLGLPCLEDEHDVVLVDSAFKLLTSRDPRVRNIAWSDLADQIEARTSSFNSRPDATPGQVEAFLSGSCDPPFHRGRSDLSSTWSAARNASRRLSVTWSCPEWGSISATFQEKTLQPADRRMLQRSIKTAIRSERALKLHEYPSQGIAMECVANSKWGNQFIRTGENIRFCDWRFIHKARLNLCSLNAQRRSSHQEEIDKSCRRCGHHTENLHHVVSTCRPLLHLRTKRHDAVLDRLIKARRRGFRVMGRNQDVDGSSLRPDLVLTQGDTAILIDVAVPYENRLTAFANTRRDKAAKYVQVCNNLRRTFANVHNEAIIVGALGSWDRANDKVLRKFVNKRFANKLRRLICTDVLSHTCDIFHQHVRGSLPDQARFIHPSLRAADATTDLPAQAPCPTGTSAPHPRSHPSPCPAAETARPPRQTTVCHQVPPAPDREDDGPPSSFDARFQRIMDEAIHNPTPQTLDLPHFPPCIDSPSDFSPPSDGPMPGLPPVCAFLPTGERAPPQSSM

SEQ ID NO: 25057 - protein, 1853 aa, Oedothorax gibbosus
MPVPRPPPGTHLKQILSPSQFQAARTPPEAPLFAPPTSPPPAPLLAPGNTETTLVPVKNEQLPSPPASTSPKAASVIKPTMGWRCGLCERPFPSELECDQHVRTIHLIGSTSPVGSSPPSPDTPIASPTTNHDSPTSRPTEENPLFTIFNTPVARPKENCFTCKTCGLSLKSLPDYRRHCNTHQAPPQAPPQPSQSGPKNKEFVCQTCERRFRKHGDFRRHMATHRESPHPIFQPTAAAHGSGSNPLPSTSEPPAEPARPSPTTRPLFAEIVQGAATPRTTSASTAHDPTRPVNHHTHTDPPNSPIMCHICKAGPFRNIPLKDLHVEFAHSRKVPRVILQREKIFTNSNLPPTHLPPNDHPVRVKSGPSSLPGFLSPAPPTADSQELFQENRPRRRGRPPASSGTTPTIMTHPPHTASRSRPLGGRNQNHKPSSARCPEEDLDDAPLSCDRKGQTLHVSFPMARALQCPEQGCPNTFASGSWTSILQSIKRHLKQDHQTPILKVKKWCSICPGVCPDRITFHPCFSGRDPTFIPSTDQTFTCDKCEFQCSARRQLRNHAALHRNEALRVPRRPFKSADLHPNRTRRNRDLHLVPPPPTQNPPPRQPPGNSNTRPQGPRSKLDWIRSNLPSNPTNLHGPATQPTQASSPVDPLMPPTSTMSPPSPSPQEQPARDTRMGTIDEMAEWIAAADLPAPPTKKRRRRGRRRISSSSDSDIDPAALEELRRNNTPNPSTQSSIQHSPSIPASSAPFLASGLDSASAIDYDVPPSHQSPSPPCDDDSSPLDDFTSPLGAFLSCNSTFDDTLWSDFEDLLGELTTRIADLVKLPPIRDDSGKPPPTSIDAGDHRTIQRLYKRNRRRAIRLITEGEGSRCHLESHAILQHFEEVFKPSTYDPAMFPQTTGRSTVPMDPFTPDEVKARLYRFENSAPGPDRLSYAHLKEVDPSCLILAKIINICLRARRIPSQWKTSKTILIHKKGDPEVVSNWRPISLCSTMYKLLTGCLATRLTNWLSAEEVLSTAQKGFMPFDGTFEHHFLVSREIRRTKTKGEELCLAQIDLANAFGSVPHAAIDTALLAAGAGEDFTQLVHDLYAGTSTSFIAGDGTTDLMDVRNGVRQGCPLSGPLFNMAIDPLVRAIQESTTQDDDTYNILAFADDLLLIAKSQEELQTLLDLLPPITKRLGLLVNPAKCRSIHLSGITPRGHRPTPFNIGGQPLEIIPDHIPASFLGTPIGFQLCQNTEEIERLLALAKQIGESCLAPWQRIDALKSFFFPSLNFAMRTGEYSKEQLRQIDVEVRKFVKVTLNLVGPASSASNHYLYGASDAGCLGLPCLEDEHDVVLVDSAFKLLTSRDPRVRHIAWMDLADQIQARTATHDSRPEATPADVAAFLSGSCDAPFHRGRSDLSSVWSAARNASRRLGVSWSCPEWSLISISYQEKTIQPPDRRILQKSIKSLIRTDRALQLQAYPSQGVAMECVAGSKWGNQFLRTGENIRFCDWRFIHKARLNLCSLNAQRHSSPQEEVDRSCRRCDHQYENLHHVVSSCRPLLHLRTKRHDAVLERLVRARRRGLRVMGRNQDVDGSGLRPDLVLTQGDTAILIDVAVPYENRISAFSTTRRDKAAKYTQVCNNLRRSFANVHNESIIVGALGSWDRANDSVLRKFVNKRYANKLRRLICTDVLSHTCDIFHQHVRGQLPDQARLSSQRGRLPHEANPVDPPAPPPMRIASPGPSTDQATALHGNHHARSPTTPSHATKDTHTIQVTFQPQASPTSEPDPDEPPSSFEARFQRIIADTITRSPPQPDDCLLLPSSRTDTVRLPPLPASESLNFDFPISGHMPGPPTVCAFLPTGERAPPHSPL

SEQ ID NO: 25058 - protein, 1761 aa, Oedothorax gibbosus
MVSTTPLKIPTPPPPITHAQDEGTSMAPQTAPPDWRPILSPPLFQTMKCPREAPFFAPPTSLPPPPMKTQSPPLEESALEPRIATNTSPTPEESWTCDFCERKFTKAADCDAHLAEVHLFVMESDDSLSPPPTAPVASPTNPSSSSGTRSDATPKATSSLGDTTPVDPPTFIARPKDKAFSCSVCGWKFSKYPAFRRHKATHKQGTPNAPPAILHAPTNPGPSSATTFAGALSTHPKRHQAPPPNKKVFPCSVCKATPFPDAMTRDLHLEFAHSGKTARVVIQRERIFTSKFHRDPNPDLGTLPARATGGAPNAPAFPPPPAAHGDVAAAAPDSQDLFQSRRAHSRNPPPNQPTTAPRRGRPPGRASGNHKLSAARCPEEDLDDAPVVCTRKGQSLHVSFPMARTLLCTEASCPSVFASGTWNTLLQSLKRHLRLDHHTPISHVKKWCAVCPAVCPERISFHPCFANRDPTFLPEVDLAFRCELCSFQCLNRRQLRNHSAAHRNEELRVPRRPFASADLHPNRRRRGRDLHSSLQPPVPPRPSGRSNQVRTARPDNPRSTTEWVRSNAASSQLDCVPDPLPLSTHEDSPPPAATSHPPPVPALAARTGTIDEMAEWIVEANLPPPPKRKKRRRRRARTTSYSDSDVDPAVIEEMRRNVTPNPSSASSVPHSPSQATSPSQLPSSMTDQVAGLVDLQHPSTHPPSPPREDDDPLPLDDFIPHLNDLLASATSLSDSRWSEFEALLDEITTRIGEVVNLPPPRDDTVTSQPSTTDAGDHRTIQRLYKRNRRRAIRLITEGEGTRCHLEGNTITNHFQKVFSPSEFDQSIFCQATGRSTVPMDPFSPDEVKARLFKFENSAPGPDRISYSHLKEADPSCTAIAKVLNVCLRAKRIPYQWKTSRTILIHKKGNLDDISNWRPISLCATLYKLLTGCLASRLTTWLSCEGVLSDAQKGFLPFDGTFEHHFLVSREIRRTKTSGEELCMAQIDLANAFGSVPHAAIDTALLTAGVGEDFTHLIHDLYSGTSTEFIAGDGLTDRLEVRNGVRQGCPLSGLLFNLVIDPLVRGIQDAAPPSEDFFSVLAFADDLLVLGRSPDELQSLLDLLPSLSRRLGLSINPAKCRSIHLSGTTPRGHRSTGFRIDDQPLEVIPDHVPASFLGTPIGFQLFQNTEEVEKILSLAKKIGESCLAPWQRIDALKSFFFPTLNFAMRTGQFSKEQLHQIDDEVRKFVKVTLNLVGPASAASNHYIYGASDAGCLGLPCLEDEHDVVLVDSAFKLLTSRDPRVRNIAWSDLADQIEARTSSFNSRPDATPGQVEAFLSGSCDPPFHRGRSDLSSTWSAARNASRRLAVTWSCPEWGSISATFQEKTLQPADRRMLQRSIKTVIRSERALKLHEYPSQGIAMECVANSKWGNQFIRTGENIRFCDWRFIHKARLNLCSLNAQRRSSHQEEIDKSCRRCGHHTENLHHVVSTCRPLLHLRTKRHDAVLDRLIKARRRGFRVMGRNQDVDGSSLRPDLVLTQGDTAILIDVAVPYENRLTAFANTRRDKAAKYVQVCNNLRRTFANVHNEAIIVGALGSWDRANDKVLRKFVNKRFANKLRRLICTDVLSHTCDIFHQHVRGSLPDQARYIHPSLRAADATTDLPAQAPCPTGTSAPHPRSHPSPCPAAETARPPRQTTVCHQVPPAPDREDDGPPSSFDARFQRIMDEAIHNPTPQTLDLPHFPPCIDSPSDFSPPSDGPMPGLPPVCAFLPTGERAPPQSSM

SEQ ID NO: 25059 - protein, 1095 aa, Ceratina japonica
MDSQDGRYVRVMEGAGSGDPPEPNRAPQGDAPNSGRALTSRDISIICQSASFRGSTAGTNTTLNTVLPNAMAIATASGGPSGKGAGRDEATAEAEEDRARLIEDPGDPVDPDEFRCPDCMTSFQSKIGLGVHRRRKHAEAVNEEINVGRRKERWTEEEINIMAHAEAGADPSTGAMNMHLKSITGSGRTIEAIKSLRKQARYRTKLQEAREMQQTKEVRPANPTCETIQGSEGQHDSSDVRLDRWLVNARGRIVLGMPGASSVAKAIDKVLVGNDPTNDLIIWYDEVFPKTTTRSRMKAAVDPPCLSRKLKRREEYKAVQKLWRRNITKAAKKILDGDTDKADHPDLACQLAFWKDVIEGESDDGMGGSSIVNEVTGGEYGIMYPVSEREVVESKVPRGSASGPDGVRADVWNRDIPVLLKAVILNILLKWGRIPKMWSDSRTVLIPKVLGSKDPSMYRPISIASVILRHLHKILAKRLLAYDLFDARQKAFINQDGLAENVFALSALLEESLANGIPMHVATLDVKKAFDTVARKQMIQAVANKGLETKFCTYLANLYEDSCTVLEVDGKSSEDLRPTRGVRQGDPLSPLLFNVVIDEVLKVIPDHIGCKINGFHCNALAFADDLVLVASTRLGLQEVLQVVTDKLATFGLQVMPAKCHVLSLEPDGKNKKIKVITESTFRLGEHALRQIQVGEVWRYLGVDFSCKGPAEITEHLQESLQRITSGPLKPQQRLKILTTYLLPRFVHSMVFGKCSYTTLRRLDRMVRRYVRRWLFLPDDVPTAFFHAPVSEGGLGVCALESWIPEIKGKRIGNLSMSKWEGAKAISESTALLRVRRWIRMARYKSKDWSGLLHASVDGFELRETRRSKASYGWFHDPFVKIPARDWVQHIRTRINALPSAMRTTRGNRREGRNVKCRAGCDREETTAHIIQECHRTHEGRILRHDAIAKCVADLLVAEGFRVERERVFPTRQGARKPDIVAVKDGKAVVLDVQIVSAYGGLAAAGKRKTEYYRENSDLVTGIASWMNVPTADIVFKDVTISWRGVWSAESAECLSDLGIAVYKLFGLTTRVLQGWHTNFMRFNRMTTMHPRRGIG

SEQ ID NO: 25060 - protein, 1093 aa, Ceratina japonica
MDSREIRYSRVIHGAGDGTPPDPSREPQGLGPQSGRSKPSSDSQIIRHSASVRGTTAGTGFLQKTNEHAVASVTASGGPSGSGGPEEDNAEEVSQICGSPDGHVPRPTMEGPNELFECPDCSASFQTKIGLGVHRRKKHESTVNNEINIERKKERWTEEEIDMLVHAELGLDPSTPAVNVRLKEAASSTRSIEAIKGLRKQPRYRDKITAARERASGTNMRPASTAPPVAGQYEPTNNRLNVWLTKHREDIVPEMPGASSILKAIDLVIGDGDPTNDLVAWHNEVFPVSIARYRVESVRAPTNLSRKKRRRQEYKAMQKLWRRSMTKAANKILDGDADRAPHPDLQTQWEFWRQIIEGDGTEGPEPPSAEGTTNEGKYYIMYPITNKEVVDCKVAKGSAPGPDGVRADAWNNNVPVVVKATILNILLRWGKIPKIWSDSRTILIPKVLGSMDPAMYRPISIASVVLRHLHKILAKRLLELDLFDARQKAFINQDGLAENVFTLAALLEESRNNRTPIHIATLDIKKAFDTVARKQLLQAVERKGLEGRFSTYLDHLFRESRTVLEVDGTLSPDLRSTRGVRQGDPLSPLLFNVVTDEVLDAIPQYIGCKINGYQCNALAFADDLVLVASTQQGLQEMLQIVAEKTETFGLQVMPSKCHALSLVPDGKNKKMKTLTESSFHVNGCPIRQTQVGEVWKYLGVHFSSKGPARIREHLDEMLLRVTAGPLKPQQRMKVLVTYLIPRLVHSLVFETMRYTTLRKLDKKIRRAIRGWLFLPKDVPTAFYHAPVHEGGLGVVALESWVPSIKLKRLRNLENSKWEGAKAIRDSKYLKAIDKWCSTARYKMKDWTDLLHKSVDGFELREVKNAKPSHSWFHDPYVSIPSRDWIQYVRTRINALPSAMRTSRGARREGMDPKCRAGCSSDETTAHIIQQCHRTHGGRILRHDAIAETIAKKLITLDFNLIREQVFPTRQGARKPDIVAVKNGKAVVLDVQIVSAYGSLENTGKKKVLYYKNNTDLIAGVANWAGVSSENVTVKDVTISWRGVWSAASAGYLTDLGISKAVQRGLTTRVLQGSHMNFMQFNRMTTIRPRTGVG

SEQ ID NO: 25061 - protein, 1081 aa, Ceratina japonica
MGCWMDPSREPQGLGPQSGRSTPSSDSQTIRHSASVRGTTAGTGFLQKTNEHAVASVTVSGGPSGSGGPEKDDAKEVSQNYGSPDGHSPRRTMEGPDEQFGCPDCSASFRTKIGLGVHRRKKRESTVNSEINIERKKERWTEEEIDMMVHAEVEMDPSTLAVNVRLKEATASIRSIEAIKGLRKQQRYRDKIIAARERGSGMNMRPASAVEAAAPPVAGQYEPTNNRLNGWLIKYREDIVPEMPGASLIQRAIDLVIGDGDPTNDLVAWHKEVFPVSTVRSRVESERALTNLSRKKRRRQEYKAMQKLWRRSMTKAANKILDGDADRAPHPDLQKQWEFWKQIIEGDGTEGPEPPSTESTGNEGKYYIMYPITNKEVVDCKVAKGSAPGPDGVRADAWNNNVPVVVKAAIMNILLRWGKIPKIWSDSRTILIPKVLGSMDPAMYRPISIASVVLRHLHKILAKRLLELDLFDVRQKAFINQDGLAENVFTLAALLEESRNNRTPIQIATLDIKKAFDTVARRQLLQAVERKGLEGRFSTYLDHLFRESCTVLEVDGTLSPDLRSTRGVRQGDPLSPLLFNVVIDEVLDAIPQYIGCKIKGYHCNALAFADDLVLVASTQQGLQEMLQIVAEKTETFGLQVMPSKCHALSLVPDGKNKKMKTITQSSFHVNGCPIHQTQVGEVWKYLGVHFSNKGPARIREHLDEMLLHVTARPLKPQQRLKVLDTYLIPRLVHSLVFETMRYTTLRKLDKKIRRAIRGWLFLPKDVPTAFFHAPVHEGGLGVVALESWVPSIKLKRLRNLENSEWEGAKAITESKYLKAIDKWCSTARYKMKDWTDLLHKSVDGFELKEVKNAKASHSWFHDPYVNIPSRDWIQYVRTRINALPSAMRTSRGARREGMDPRCRAGCNSDETTAHIIQQCHRTHGGRILRHDAIAETIAKKLITLDFNVIRERVFPTRQGARKPDIVAAKNGRAVVLDVQIVSAHGSLENTGKMKVSYYKNNTDLIAGVANWAGVRSEDVAVRDVTISWRGVWSAASAGYLTDLGISKAVQRGRTTRVLQGSHTNFMQFNRMTTIRPRTGVG

SEQ ID NO: 25062 - protein, 1318 aa, Oesophagostomum dentatum
MVQMFPRVKRSYARSVTAHSRETASWLDVTSPGGATTASTEPGGRLVLSTTQSATESSYHDGDPTYGPRVQRESRGNRRLWLPRERSALQSMIEEFKEGDGRIRWSSLALAWEQKRDPQDPQRTVAALKAAYAKLRRSCNFQDVTGTRGEQPVAQNSQPNCNLNEVEGEQTLPAQSQPERDTLHQNNLTVGEEPELAAQSQPDGDTPQSNSNCNEVTGSTDDRLDVNNSAFSVGVDVIQGSRNTPADAANTSCAVERRELLLSNFKKYLKVARSSQDRVPIRRPRCDKIPRDLLEMGNELLADYASRHLGPVSKGKRYLSRLSEGVYAIARAIAATADSLSFHLEDPIANLKKTLSDLVESRRYLLRTISTLSDEVARRKRARGHRGPPKIKFLELEKRLDSLRKNKKNRGEIYRVLVHFKDRLNVTQKKIKRIEESMQRQKCRRGGASRVVRESVDPSDVPVHLLREYWKPIVGLRKPFDERKLEEWSRDQGSLSCPVRSEELTEEDWKEILQKVKPWKATGPDGIQGFWWKHLPVAFLSLRAWCIRALVFPRKMVPSWLCSGRVFLIPKAVRGNPGTRDLGDYRPITCLNTCYKILTSFVSLHISRTVGERFPREQVAMRKGMWGCTHAQVLDQTAVRDAHLHGRVLSMIWFDLTKAFDSLSRGAILWSLKKWAIPSDIRRLYSVLGSLLTVRYCGRAGGRMLASSPLKVRNGLIQGDTLSPLLFCLTLAPVSHWIRTHVKPYRTSTGGGNSTNDVLELSHIFYMDDLKIFTTGQDELELARDGVQRQFAALGLTINARKCATFSLNCNPIQLDSIPVLGMSECYKYLGAEQRGLVSIGELWSRVETAAKERARKLFSSDLTVRQKVDGYNQMVLPKLMYAFSCVIFGVNKLSMLRKRANQFDVDIRKLMEESQLRFRSNCVPRLYVERELGGLGLKSVEEGLERSITYTWCYLTSKADLRTSFQLAETLRKRGKRSITSDFQKVLVANGIEGRVERTERATIRVDSREFFNATDAARAITKLIRAKWSKDFLSCWKSKEVASRILSERGRWPERPNGLCLKDSFLWSAKGWVSSVVLRNIWAVQEGSLLTRGSAAGRACMPHAKGVCRMRCSPNAVETAEHIVSACSHWRTNIMVERHDDVARVLYAAIRRKYAITDEVNTHVPHAIQTANVVLHWNDVIWTSEGLAHNRPDILVWDKVCNRIWIIEISVSWFTRVQTQESRKLLKYGMNSTLPEDTPVSEFFPGPSLKACLQKDRTCRVDVIPIVLGTCGEVSSRLRGYVEALELPESVDSLIERMERAAIMGTHRLVKCHLSN

SEQ ID NO: 25063 - protein, 1279 aa, Adineta vaga
MPRHLISDAHEGAMQTPPRGAPGKLKGTKFPTQQLIICTNEAEARRKLRSDRLVHPTVASDDSKRTVGIRAASPMLTHQSDQSPLGQKGLGDGVSAEQRRPGHWNDEEIEELRRLVSSNIGPQGKISWVAVEKAWKDLNLGERSKGSLCAKWRDIKNRSATHLVPDDSKESQGSDNVTSSDSVTTDTTAPTQVQVDSSSTADKDNKDKQSSGTVDAETVNIDIKRIFNKYMKISKKIGCKPNKRKPPFRISGRMVQPIIKEVDGLIDDELDMESRGRPSWEKLSIVVYAGAMTVSEVANQRNNDKKNKSKEWFRSTSKEVNSLCVTIGKATAELNRQKEHNSKKPTVQQTLNIRMLNRKYKAETFAEITSLVEKLKNRLQLLRSRIALRKADEKRYRARHLPTKMLFRGNGEQTSDKVPDVQRVRNFWKTIVGKDKPFNSKDKDLTAWEQSLKGAPEEDNLKSRLNRDLWQGITRKAKPWKAHGPDGLQSFWWKAFKTANAALYQLARFHLTTGTSLENWTTVGRIVLIHKSGSHEDPANYRPIACLNTCYKMLTSFITAYLQKYVTERCILPGEQIALREGVWGCTHALTQDQSLIADALNQTQRPISVAWIDYAKAFDSLPHSYIKWLISAVQVPKALATFIKKLICKWKVRYEARDPRGNILRSSYLKIKSGVLQGDSFSPLLFCIAMAPISHAINKMKCGYRTASGKLKNMQVELSHLFYMDDLKLYGSSSENLTKMVKKVESISTAINMKMNTKKCAVANFIPKRMRNKEEGVLPTQSDDCLGFPLLDSEGLYKYLGIEQSLGVKESEAWERVEEKCCKSATRVWSSELTFRQKVSSFNMTIIPALKYIITNTIKGSGKYISVLERGEKLDKKFRKQLTEMKVRYKASCVDRLYLTTELGGCGLKSVKDSLEEATIYSWAYLCTRKELKNSLNLFVSMNKRDKRSVISDAKNVLERYSITAELDPAQSTVKLDGIQYEDARLLARHVVGKIRLANNTRRRESWEAKVLAGRVLHSISNIDRITSFLWLREGKLSATAVRNIIAAQEGCLITRSHPCNINSSNKNCRACGKTTETIEHVTTGCSKWLPTLYIDRHDSVARNLHYRICEKYDLAPQHYSQRVDSVKENDRVKLYWNQPVQTKKIIRHNKPDIIVFDKATKVATIVEIAVSWFTGIGRQIEIKMNRYCVNGNYEHELDTPYPRGDSLSRELQTDGWSVVFVPVVIGACGEVVQGLSEQLANSLGISKEKTEDCIERMERSAALGTSRVIKNHLAMAS

SEQ ID NO: 25064 - protein, 1281 aa, Adineta vaga
MPRHLISDAHEGAMQTPPRGAPGKLNGTKLPTQQLIICTNEAEARRKLRSDRLVHPTVASDDSKLTVGFRASSPMLTHQSEQSPLGQKGSGEGVSALQRRPGHWNDEEIEELSRLVNSNIGPQGKISWVAVEKAWKDLNLGERSKGSLCAKWRDIKNRSATQMVPDDSKESQGNDNVTSSDSVTTDTTVPTQVQVDSSSTADKENEDKQSSGTVDAETVNVNIDIKQIFNKYMKISKKIGCKPNKRKPPFRISGRLVQPIIKEVDGLIDGELDMESRGRPSWEKLSTVVYAGAMTVSEVANRRNNDKKNKSKEWFRSTAKEVNSLCVTIGKATAELNRQKDRNSRKPTVQQTLNIRMLNRKYKAETFAEITSLVEKLKNRLQLLRSRIALRKADEKRYRARHLPTKMLFRGNGEQTSDKVPDVQRVRNFWKTIVGKDKPFNSKDKDLTAWEQSLKGAPEEDNLKSRLNWDLWQGITRKAKPWKAHGPDGLQSFWWKAFKTANAALYQLARFHLTTGTSLENWTTVGRIVLIHKSGSHEDPANYRPIACLNTCYKMLTSFITAYLQKYVTERCILPEEQIALREGVWGCTHALIQDQSLIADALNQTQRPISVAWIDYAKAFDSLPHSYIKWLISAVRVPKALARFIKNLICKWKVRYEARDPRGNILRSSYLKIKSGVLQGDSFSPLLFCIAMAPISHAIKKMKCGYRTASGKSKNMQVELSHLFYMDDLKLYGSSSENLTKMVKKVESISTAINMKMNTKKCAVANFIPKRMRNKEEGVLPIQSDDCLGFPSLDSEGLYKYLGIEQSLGVKESEAWERVEEKCCKSAARVWSSELTFRQKVSSFNMTIIPALKYIITNTIKGSGKYLSVLERGEKLDKKFRRQLTEMKVRYKASCVDRLYLTTELGGCGLKSVKDSLEEATIYSWAYLCTRKELKNSLNLFVSMNKRNKRSVISDAKNVLERYSITAELDPAQPSVKLDGIQYEDARLLARQVVGKIRLANNTRRRESWEAKVLAGRVLHSISNIDRTTSFLWLREGKLSATAVRNIIAAQEGCLITRSHPCNISLSNKNCRACGKTTETIEHVTAGCSKWLPTLYIDRHDSVARNIHYRICEKYDLASQHYSQRVDSVKENDRVKLYWNQPVQTKKIIRHNKPDIIVFDKATKVATIVEIAVSWFTGMERQIEIKMNRYCVNGNYEHELDTPYPRGDSLSRELQTDGWSVVFVPVVIGACGEVVQGLSEQLANSLGISKEKTEDCIERMERSAALGTSRVIKNHLAMAS

SEQ ID NO: 25065 - protein, 1038 aa, Microplitis demolitor
MPRMGDTGRLSGPSSDVAAPVNRDNENVPSSEIPAYICEFPGCNRPFTTKTGRGVHHQKAHKDWYDAQQNTNYKKARWTEEEMALLARQEARLTIDNVKNLNLELHRLFPDRSLESIKGQRRKNDHKNKVNQLIESIRSQTAGLDSSSSSSESENENERRVDNNPNTPDVDEYKYEDAICDYLDSLPACNNYYNTRSLKMILQSLRSSNKDRVFEDISIYLRQTFPKSHNHTPGNDYNNNNKNDQQGTGYSRRKTRKAEYSKIQNMWKKNRSNCIRHLLKDKKTNNNPTKEHMVPFWERLMTDCSRNTTPGVEAPDDKKKDDLKDLWSPVRPKEIELALPSLGTSPGPDGLSARTFKAIPINVWVRIFNIFLFCGKLPEHLLESKTTLIPKKDGASEPGDFRPITVSSIIARTFHKILANRMTKVVPLDPRQKGFRSVDGCSENIFLMDLVLRFSRAHHRPVYMATLDVAKAFDSVTHDTIIDTLKSFGVPNIMVDYIADVYRKSITHLQCGEWMSHAISPKRGVKQGDPLSPIIFNMVIDRLFSKIPEEIGCRLGDVTINALGYADDLILFASTPAGLQQLLDICSEYLDKCGLCVNAGKCATIALKSVIKEKKTIIDANQKFNCRGQPIPALKRSDEWKYLGVPFSPTGKLFCDPCHKLQQEIKTLKAAPLKPQQRLFILRTAVIPSLYHLLVLGNTTISTLNKLDVAVRAAVRSWLDLPNDVPNAYFHSGVSDGGLSIPSYRWTVPLQRFHRLGNLKLIENDRVPEVMLRFLGEERKRAELRLNDHGKNIRTLAECKARFAKLLHESNDGNPLSKSHSVPQQHHWITDGNLMVSGKDFIHMNKLRINAIPLRVRTSRGRVRDRHCRGGCNDTETLHHVLQLCHRTHDARIKRHNACLDYLLRQLPDGTSVEKEPHLRSPTGLLKPDAIIKLNDKAIVVDAIIAGERANLDKVYQDKIDHYKHLAGLIRKRNSVKEVVFTALTLSSRGVWSKKSFEHLYQLNLIKKSDAKIMSIRVLIGGLNELRIFNRRTDVRRH

SEQ ID NO: 25066 - protein, 2104 aa, Acanthoscurria geniculata
MASPRRVEMDAPPGVLATFDLTTDVADLDCVFSRQLVVCISPLPERTVVAAPLPVTPICDSSNSNSSSSQCLVIDFSRSSHDSSSDGMGSSAFQPYTPTQPPYAASQFNFTEESSTVIIQHQRVSMHGRPIGQLDILRPSPSDSTAPSPECSDPSLLGSHPRTAADFCPLLTSSPLQMILSQLQSGAHDINLGLLDCSQPRLVPPVPSPKIMYQAALPTLTDSDSEEDRTSSGTPSPPVTFIYDTDLPQLHAQASPPGLFVSTPEEDPAFPVCPSPPATFTCATDVLQPSSPALPHGLTESESEDDLAPPACPSSPVTLGNDTALLHHFGLNEFGPSASPALVTVAPSPSVPLAADCALTPSSHRATFGASDHSVVVPVETLPPTSFGAPPDFSRSVAMETSDMCDPSLIVTVDPSELFYSPSVSPASVDVPHVRVPVTSSGLCCSSSAAPQLGAVSVGSPEVLDLPCVPPVTVAIRAVVKDVLDSLVRQVVEAHEDSSSNPVVSTSLSDPPLCLPSAMGSFSTLWPLSGLNQSMIVDADLHCLFPRRNLLCCPFSYCSFVSRGNTWNRTVSSMVQHVENSHHQLIMKTTQWCASCRSTFIEFPTKHSCFSRRHHCFRPIPKSVKFTCFLCDFSCIGSADYTHHLRSSHCIEAPCVQLSTIPAPSGDETLLLSPSPDEELPAIAPLTPPVPVVPVCVPSSVATLDVSSTMGDPAGPLQAHQQLALQPMVSGDSVYMSLPLPIEVKCGFFECPAIFNASPWTARKNSFLRHLRNVHKRPMTNCVFTCRFCRERLGRTPLSHPCLVRHPADSTKPSKFRHRCFRCDYSSPSKVGLQNHIQAHRRRDAKWGIRHSPTISVTSSRMEIQVTAINQAGPSSAGPVLVHEERSASDHVSAPLPVSTPPPEPPLEPDDAVVSGDDVPPLTAKFYHQLSELCSAPPSTRTWDSFVGLLHDIYSDIAKLVHLPKRKPFSVQPATSEDCTNASVLQRSYRRNRRSTIRRINGEKRLSTSFTSDELVSHFSAEWDRKSFDASLFEDLPDFPSMLLPPFTRAEVSRKLSSAESTAPGADRITYNHWRNVDPHAAVLTQILNICLKHHKVPDDWKRTHTILIPKADGSPALGKMRPISLLSTTYKLLARCLVARVNTWISINGAISFPQKGFMPYDGVHEHNFVLERRIRQAREQASNLCIAWLDISNAFSSLPHGALLAALERYGFPQEFLDLIANVYSANSTTFFCKEGLTPPIDVCSGVRQGCPLSGTLFALVIDPVIRNLQSSHSEHKVLAYADDLVLLGSSPAELQMMIDSAMVDLAKLSLRLNPLKIHTLHLCGETPAGVRPTVFTLDGSPLPALGETDFTKMLGKPISIPTMTDVTSIESYQQLAENILSSRLAPWQRIEAVRDFFFPTMNFPLRCQTFSKKELGKLDDFVKKAVKQTLYFNPDTGPPDYLYGDRKKGSLGLPRLTVDHDIASVDGAFKLLSSPDELIANYAKDDLLQVVRHRIRRLPTFDDVASYLNGAMDDVTLTTTNKHMSTWTLARQASRRLKIKWQFDDEGLPSLLLGETTLSCSSRNKVMKTLRTIIKEQRSAQLLSSNWHGRSMECVAADKASSHFLYTGDYTAFSDWRFVHRARTGLLALNGCRPWVEDPALKKCRRCSGPNENVAHVLHHCMRYSREYTYRHNAVLKRVKEAAGPNWQVYSMDSVVGGTNLRPDLVLVSGQTAIVLDVAIVHDNRLDSFAAARALKIAKYEPVAQHLSSSFRRVLVDAIILGGTGSWDPRNDKIMLKLCGKRYLSLLKKLCVSDTISWSRRVYNEHLTDLRQYDDNDIVELPVVRPPSRRSTSGVPTSSSRAAWIPGSARFPTYRPSTSTAAGQAGVLTDPPRAPSPMPASSAAPSALPRMVTVPACSDATGLSSRKLLSSPAAVGQPVTLVDSSQPSSLLSASCLVGSSALPLIVDVTASHDTRRVVSSASSTLPPAGSRRGRRHPSSSAPHRGQRSVPVLTAAVTTCNDTRRVVSNASSTLPAVGSRRGQQDPSSSYPHHVQRGAPMTTSRSSVSNTFVSQVYHGSISSTGVFTHQPQRSLVFHNSSLSAAAGRRRTKKVTFSSPPANC

SEQ ID NO: 25067 - protein, 1032 aa, Schmidtea mediterranea
MAIITGEGDCHLLKKSLLKLKTMKNKTNKNVNKGNDLDVTFPCDFCGLSFPTKIGRGVHMSKAHRVERDAKLSGHASTKKAYYWSTEEETRMAKIHLQEESRGDSNHVLRAMHSACSTGRTLESIRLHMKAKRYVKIYTELRNEVQCQSSGVENILNNISDASPLTLPSETETLTSYLLNLPLKKGVSKWREQDLDFIIHSVSDSEEQKRLLDVYCKTVTEGYRKGKTGPLKKSTKVSPHHATTTKSKKFLKKKLKRELYGKVQQLWIKDRCEAAKLVLSGKVSTLICEEDRSARQGEYWKKIFERESEPDIRPVPEVYADPMLVRPISEDEIKKVVKDIKLNTSSGPDNISTEVLREIPVLVLVKLFNLIIFLSHLPSEFKSSRTTLIPKVETPKDPGDYRPISVSSVFVRALNKILASRVSNGNKGAHAQKGFKALDGCLENTVLLNCILGDAKINNKSIALSFIDMKKAFDSVNHDSILRAATIAGYPKLLLGYIKESYNGADTEVEKIKATFKRGVKQGDPLSPVLFNNIVELAIKKAYESGIGYRMNGTVFPIMAYADDIILLSESKEGLQDLLDIVLTELRHNGLEANADKCASIIAKKDGKQKKWVISSDSVLAAGKTMPCMNANSMYKYLGIYFGPLGITTERLTKIYSNQLYNIGIAPLKPQQRLEMINDFLLPGILHEAVLGNTNVGELKDLDKMTRVAIRKWLHLPKDTCSSFIYTGVKQGGLGVRSILAEVQFGKISRLESLNKSKDTRIQALTTCEVVKKAFRQWSKPIRVGDSIATSKVQFYEANRELLLSKCDGKGLREAGKIPFAHDWLRVRGKLMKGRSFINSIKVRGNLFGTPVRLNRLNKSGIPQIKCKMGCLMPCSLNHIAQTCPKVHGLRVERHNKVMHYIADVARKGKWKTLVEPIIPYGATIRKPDLVVIKDKKAMVLDIQVVSDVGNLNERNTLKSEVYNDKIIADWVKNTGADSVEFGAITLNWRGLWASDSWETVSKIGVNKSDAMIISLKVLNWTARMYCAWNKG

SEQ ID NO: 25068 - protein, 1011 aa, Schmidtea mediterranea
MMNKTNKLNENKGNDLDVIFPCDFCGLSFPTKIGRGVHISKAHRVERDAKLSGHASAKKAYYWSTEEETRMAKIHLQEESRGDSSHVLRAMHSACSTGRTLESIRLHMKAKRYVKIYTELRNEKQIQSSGVENILNNISDASPLTLPSETETLTSYLLNLPLKKGVSKWREQDLDFIIHSVSDSEEQKRLLDVYCKTVTEGYRKGKTGPLKKSTKVSPHHATTTKSKKFLKKKLKRELYGKVQQLWTKDRCEAAKLVLSGKVSTLICEEDRSARQGEYWKKIFERESEPDIRPVPEVYADPMLVRPISEDEIKKVVKDIKLKTSSGPDNISTEVLREIPVLVLVKLFNLIILLSHLPSEFKSSRTTLIPKVEPPKDPGDYRPISVSSVFVRALNKILASRVSNGNKGAHAQKGFKALDGCLENTVLLNCILGDAKINNKSIALSFIDMKKAFDSVNHDSILRAATIAGYPKLLLGYIKESYNGADTEVEKIKATFKRGVKQGDPLSPVLFNNIVELAIKKAYESGIGYRMNGTVFPIMAYADDIILLSESKEGLQDLLDIVLTELRHNGLEANADKCASIIAKKDGKQKKWVISSDSVLAAGKTMPCMNANSMYKYLGIYFGPLGITTERLTKIYSNQLYNIGIAPLKPQQRLEMINDFLLPGILHEAVLGNTNVGELKDLDKMTRVAIRKWLHLPKDTCSSFIYTGVKQGGLGVRSILAEVQFGKISRLESLNKSKDTRIQALTTCEVVKKAFRQWSKPIRVGDFIATSKVQFYEANRELLLSKCDGKGLREAGKIPFAHDWLKAKGKLMKGRSFINSIKIRGNLFGTPVRLNRLNKSGIPLIKCKMGCLMPCSLNHIAQTCPKVHGLRVERHNKVMNYIADVARKGEWKTLVEPIIPYGATIRKPDLVVIKDRKAMVLDIQVVSDVGNLNERNTLKSEVYNDKIITDWVKNAGADSVEFGAITLNWRGLWASDSWETVSKIGVNKSDVMILSLKVLNWTARMYCAWNKG

SEQ ID NO: 25069 - protein, 921 aa, Schmidtea mediterranea
MKAKRYVKIYTELRNEKQIQSSGVENILNNISDASPLTLPSETETLTSYLLNLPLKKGVSKWREQDLDFIIHSVSDSEEQKRLLDVYCKTVTEGYRKGKTGSLKKSTKVSPHHATTTKSKKFLKKKLKRELYGKIQQLWIKDRCEAAKLVLSGKVSTLICEEDRSAWQGEYWKKIFERESEPDIRPVPEVYADPMLVRPISEDEIKKVVKDIKLNTSSGPDNISTEVLREIPVLVLVKLFNLIILLSHLPSEFKSSRTTLIPKVETPKDPGDYRPISVSSVFVRALNKILASRVSNGNKGAHAQKGFKALDGCLENTVLLNCILGDAKINNKSIALSFIDMKKAFDSVNHDSILRAATIAGFPKLLLGYIKESYNGADTEVEKIKATFKRGVKQGDPLSPVLFNNIIELAIKKAYESGIGYRMNGTVFPIMAYADDIILLSESKEGLQDLLDIVLTELRHNGLEANADKCASIIAKKDGKQKKWVISSDSVLAAGKTMPCMNANSMYKYLGIYFGPLGITTERLTKIYSNQLYNIGIAPLKPQQRLEIINDFLLPGILHEAVLGNTNVGELKDLDKMTRVAIRKWLHLPKDTCSSFIYTGVKQGGLGVRSILAEVQFGKISRLESLNKSKDTRIQALTTCEVVKKAFRQWSKPIRVGDSIATSKVQFYEANRELLLSKCDGKGLREAGKIPFAHDWLRAKGKLMKGRSFINSIKVRGNLFGTPVRLNRLNKSGIPQIKCKMGCLMPCSLNHIAQTCPKVHGLRVERHNKVMHYIADVARKGEWKTLVEPIIPYGTTIRKPDLVVIKDKKAMVLDIQVVSDVGNLNERNTLKSEVYNDKIIADWAKNAGADSVEFGAITLNWRGLWASDSWETVRKIGVNKSDAMIISLKVLNWTARMYCLGQVSFDLINPPLRESRHSIKY

SEQ ID NO: 25070 - protein, 1032 aa, Schmidtea mediterranea
MHLELATYILKTILNVQNIFDDLHFSLTEMEYPICHEANLSAFYVCHFLKCLMSDIPIDIPDINMMKEAMRPIIRKYNCAKFPESDVRSCRILIEDLIYQLNLDTISCEELLNEIERINGRINPKRYFKDNKPKSDIIHLQKKKAAELLCVKRLKFQINQKIEIGKIWENNEIDHKPAMAKFLKTFASKDCPMSNTSPIKLPFYRDVDSDTYTDCENLSHIMKNLESSAPGMDLITGGDWKKISPKHELITAICNCVLRNKISPQRWKLYRTVMILKPGKLSESFKANSWRPLAIMDTAYRIFTTLINNRLLHWIRSGTLISQNQKAIGVPDGCAEHNATLHIVIDRAKLCKTELHIVWLDITDAFGSLPHDLIWYTLAGMGLRNETLTLIKELYKDVRTMFDCQGTLSEPVPITKGVKQGCPLSMTLFCLSIDYILKSILDNHPFLLHNLNISILAYADDLVLLSDSYQGIRKTLENTVKLAGFANLKFKPSKSGYLSINSASSVNKKLHLYDEEIPTISENNKYRYLEVDFSYKRNQDIDSRLNSALALTKSLFTSYLHPSQKLNAYKTFIHSKLIFSLRNCIIGHRILDCDRNRITQGREKQLGFDQKIKGLLKTMIGDKFQVLNNYFLITHCKMGGLGITATIDEYLIPSITGITRLFHSSNLGFRDMLIAELAHSRGSKSFEAGLKWMNCEISKEFHNTSFFVKFQKSALALKRKFSICISLKFVEDKFSLEMVYKKRTSYIDHRNLNTLSKELHDFVGLHYAEQWYKMKVQGRIAASIGDSITAKYLIASDTLNDAQYCFLVRARNNILNLNYSAYRLKYNLNTKCRLCHLDEETQTHVFNHCRAKPNARRVKHENVLVSIVAFLEKIGFEIDVEKSPKYVSIPTKLKPDMVIRSKRNKDIHVLDLKVPYDSVEGFEKARENNYVKYKDLSLQIGKAFNQNATISAIVIGCLGTWDKKNNAPLSKIGLTKTEIISLAKITCPNAVIACYHIQRKLFLHLLVLCKVCLRGNADISSALQFCESRIKN

SEQ ID NO: 25071 - protein, 1050 aa, Schmidtea mediterranea
MPIYGKNSSWSFFFFDKKRRIAMIIDPTADDSHNLHFDLANDILRTILNIENIFGKLKFGLTEIEYPICRELSLSSTYICHFMQCLMLNSTFTNPNISTMRILMKPIINKYNCTKFQDNDARKYRILIEDQVYQLDLDTITCDETLCEIERINGRLNPEKYFKKEKPRSDIIHLRLKKSAELPCVKRLRFQTNQKQEIAKIWEDDSVEHRPSLTAFLKTFASSECPISNTASITLPFYPDTESNSTTDNENMSHIMKQLDNTAPGMDLITITDWKIISPKHVLITAICNNVLRNGVCPKKWKLFRTVLILKPGKMDESFKTSSWRPLAIMDTAYRIFATLLNNRLLTWIKKGNLISQNQKAIGIPDGCAEHSATLHIAIDHAKRGKKELHIVWLDITDAFGSLPHDLIWYTLEGMGMKNETICLIKELYIDVSTFFDCHGMLSGSVNITKGVKQGCPLSMTLFCLSIDYILKSILNDCPFLLHDMNISILAYADDIVLISDSFMKIDKALKETVRLASYANLKFKPSKSEYLSINNKNPDTCKLYLYNEEVPIICNKNKYKYLGIDFSHKQNQDIDGRLQAALELTDSLFKSYLHPAQKLNAYKTFVHSKLIFSFRNCKIGHRILDCDRNRITQGREKQLGFDQKIKALLKTMVGDKFHALNNFFLYAHCKLGGLGISSSIDEYLIQSITGITRLFHSSNADFRKMMIKELAHARGEENFEAGLKWLNCEINKPFSNTSFFVKFQKSVFALKRKFSIGVKLKFEDDNFKLEMAYKNRISYISYRNLGTLSKDLHDFVGLHYAEKWYEKRVQGRIGNAIGDSITAKYLIASDILNDAQYCFLVRARNNLLKLNYSAYRLKFSLDTKCRLCHLDVETQANVFNHCLTKPNARRVKHENVLISIVGFLEKIGFEIDVEKSPKYISIPTKLKPDMVIRSNRNKEIHVLDLKVPYDSVEGFEKAREDNYVKYKDLALEIGNAFGEKATISAVVIGCLGTWDKKNNAPLSKIGLSKPEIVSLARIACSKAVIACYHIYREHISYTKSAMALPFSII

SEQ ID NO: 25072 - protein, 1050 aa, Schmidtea mediterranea
MPIYCGTSSWSFFFLDKKRRISLIIDPNAEDSHTLHFDFANDIMKTIISIENIFGNLHFQLTEIEYPIFHDTCLSSFYVCHFIKCLMTNSAITNPNITDMKNLMKPIIQKYNCTKFPNNDTRKYRMLVENLVFQINLDAITSEETLCEVERINGRLNPQKYFKIEKPKSDIIHLRIKKSAELLCVKRLKFQINQKHEIAKIWESDEIEHKPPMTKFLKAFASSECPTPITGLITLFQYSDSDTNCITDVENITCVMKQLDSTAPGMDLITIGDWKIISPKHDLITAICNHILRSGECPMRWKLYRTVLILKPGKHDESFKASSWRPLAIMDTAYRIFTTLLNNRLLTWIKNGNLISSNQKAIGIPDGCAEHNATLHLAIDQAKRNKTELHIVWLDIADAFGSVLHDLIWYTLSNMGLKKETILLIKEFYSNVKTFFDCDGVISKPVPITKGVKQGCPLSMTLFCLSIDYILKTILDNCPFFLHGLNISILAYADDIVLLADSFKGIENTLQMTVKLASYANLKFKPFKSGYLSINNINADIFKLYLYNEEIPMITNENRYKYLGVDFSLKRNQDIDGRLESALKLTTTLFKSYLHPAQKLNAYKTFIHSKLVFSLWNCVIGHRILDCDRNRISQGREKQLGFDQKIKRLLKTMIGDKFLAVSNVFLYAHCKLGGLGMTSTLDEYLIQSITGITRLFNSSNLKFREMLITELGLARGDKSFEAGLKWINGEVTNQFHNTSFFIKFQKSALALKRKFNICVKLGFVDDSFSLEMSYNKRTTYINKQNLKTLSKQLHDFIGLYYTEQWYEIHVRGHIAATIGDNITAKYLVTSDTLNDAQYTFLIRARNNLLDLNYNPYRLKNNIYTKCRLCHLENETQAYVFNHCQAKPNARRVKHENVLVNIVTFLEKIGFEIDVEKSPKYLKVPTKLKPDMTIKSKRNKEIHVLDLKVPYDSVNGFDKAREGNYEKYKDLAMEIGDAFNEKATVSAIVIGCLGTWDKKNNPALAKIGLTKTEIKSLARIACSKAVVACYHIYREHISYNKSAMVLPFSIT

SEQ ID NO: 25073 - protein, 988 aa, Schmidtea mediterranea
MIVMLCILIWQMTSLERYLTSKIFGRLKFGLTEIEYLMCREFGLSSLYVCHFIQCLILGFALTIPDVSAMRILMKPIINKYNCTKFQDNDARKYRILIDDLVYQLDLDTITCDETLCEIERINGRLNPEKYFKKEKPKSDIIHLRFKKSAELLCVKRLRFQANQRQEIAKIWEDDGIKHTPPIKAFLKTFASSECPISDTKSITLPFYSDNESNLTTDNENMSHVMKQLDNTAQGMDLITVADWKIISPKHILITAICNNVLRNGVCPKKWKLFRTVLILKPGKKDKSFKTSSWRPLAIMDTEYRIFATLLNNRLLTWIKKGNLISQNQKAIGIPDGCAEHSATLHLAIDHAKRRKKELHIVWLDITDAFGSLPHDLIWYTLEGMGMKKETICLIKELYRDVSTFFDCQGMISESVNITKGVKQGCPLSMTLFCLSIDYILKSVLNDCPFHLHDMNISILAYADDIVLVSDSFTKIEMALSRTVRLASHANLRFKPSKSGYLSINNMNHDICKLYLYNEEVPIISNENKYKYLGIDFSHKQYQDIDGRLQSALTLTNTLFKSYLHPAQKLNAYKTFIHSKLIFSFRNCIIGHRILDCDRNRITQGREKQLGYDQKIKALLKTMVGDKFHALNNYFLYTHCKLGGLGVSSSIDEYLIQSVTGITRLFHSYNTDFREMMKKELAHARGEENFEAALKWINCEIDKPFKNASFFVKFQKSVFALKRKFEIYIKLKFEDNSFKLEMRYKNRISYIGYRNLGTLSKDLHDFVGLHYAEKWYEMRVQGRIGNAIGDSITAKYLIASDILNDAQYCFLVKSRNNLLNLNYNAYRLKFSLDTMCRLCHLDAETQAHVFNHCLAKPNARRIKHENVLISIVAFLEKIGFEIDVEKSPKYISVPTKLKPDMVIRSNRNKEIHVLDLKVPYDSVEGFVKAREDNYVKYKDLAIEIGNAFGEKATISAVVIGCLGTWTRRTMPHYRRLACLNLRLCLLQG

SEQ ID NO: 25074 - protein, 1002 aa, Schmidtea mediterranea
MHLELATDILKTILNVQNIFGDLNFSLTEMEYPICHEANLSAFYVYHFLKCLMSDIPIDIPDINMMKEAMRPIIRKYNCAKFPESDVRSYRILIEDLIYQLNLDTISCEELLNEIERINGRINPKRYFKDNKPKSDIIHLQKKKAAEFLCVKRLKFQINQKIEIGKIWENNEIDHKPAMAKFLKTFASKDCPMSNTSPIKLPFYRDADTDTYTDCENLSHIMKNLDSSAPGMDLITVGDWKKISPKHELITAICNCVLRNKISPQKWKLYRTVMILKPGKLSESFKTNSWRPLAIMDTAYRLFTTLINNRLLHWIRSGNLISQNQKAIGVPDGCAEHNATLHIAIDGAKPCKTELHVVWLDITDAFGSVPHDLIWYTLAGMGLKNETLTLIKELYKDVRTMFDCHGTMSEPVPITKGVKQGCPLSMTLFCLSIDYILKSILDNHPFLLHNLNISILAYADDLVLLSDSYQGIRKTLENILKLAGFANLNFKPSKSGYLSINSAGSVNKKLHLYDEEIPTISENNKYRYLGVDFSYKGNQDIDGRLNSALALTRSLFMSYLHPSQKLNAYKTFIHPKLIFSLRNCIIGHRILDCDRNRITQGREKQLGFDQKIKGLLKTMIGDKFQALNNYFLYTHCKMGGLGITANIDEYLIQSITGITRLFHSSNLGFRDMLIAELAHSRGSKNFEAGLKWMNCEISKGLQNTSFFVKFQKSALALKRKFSICISLKFVEDKFSLEMIYKKRTSYIDHRNLNTLSKELHDFVGLHYAEQWYKMRVQERIAASIGDSITAKYLIASDTLNDAQYCFLVRARNNILNLNYNAYRLKYNLNTKCRLCHLDEETQTHVFNHCRAKPNARRVKHENVLVSIVAFLEKIGFEIDVEKSPKYVSIPTKLKPDMVIRSKRNKDIHVLDLKVPYDSVDGFEKAREDNYVKYKDLSLQIGKAFNQTATISAIVIGCLGTWDKKNNAPLSKIGLTKTEIVSLARIACPNAVIACYHIYREHV

SEQ ID NO: 25075 - protein, 1050 aa, Schmidtea mediterranea
MPIYGKNSSWSFFFFDKKRRIAMIIDPTADDSHNLHFDLANDILRTILNIENIFGNLKFGLTEMEYPICLELSLSSMYICHFMQCLILNSTFTIPNISNMRILMKPIINKYNCTKFQDNDARKYRILIEDQVYQLDLDTITCDETLCEIERINGRLHPEKYFKKEKPRSDIIHLRLKKSAELLCVKRLRFQTNQKQEIAKIWEDDSVEHKPSITAFLKTFASSECPISNTASITLPFYPDTESNSTTDNENMSHIMKQLDNTAPGMDLITITDWKIISPKHVLITAICNNVLRNGVCPKKWKLFRTVLILKPGKKDESFKTSSWRPLAIMDTAYRIFATLLNNRLLTWIKKGNLISQNQKAIGIPDGCAEHSATLHIAIDHAKRGKKELHIVWLDITDAFGSLPHDLIWYTLQGMGMKKETICLIKELYSDVSTFFDCQGILSGSVNITKGVKQGCPLSMTLFCLSIDYILKSILNDCPFLLHDMNISILAYADDIVLISDSFMKIDRALKETVRLASYANLKFKPSKSGYLSINNKNPDTCKLYLYGEEVPVISNENKYKYLGINFSHKQNQDIDGRLQAALELTDCLFKSYLHPAQKLNAYKTFVHSKLIFSFRNCKIGHRILDCDRNRITQGREKQLGFDQKIKALLKTMVGDKFHALNNFFLYAHCKLGGLGTSSSIDEYLIQSITGITRLFHSSNADFRKMMIKELAHARGEDNFEAGLKWLNCEINKPFSNTSFFVKFQKSVFALKRKFSIGVKLKFEDDNFKLEMTHKNRISYISYRNLGTLSKDLHDFVGLHYAEKWYEMRVQGRIGNAIGDSITAKYLIASDILNDSQYCFLVQARNNLLNLNYSAYRLKFSLDTKCRLCHLDVETQAHVFNHCLAKPNARRVKHENVLISIVGFLEKIGFEIDVEKSPKYISIPTKLKPDMVIRSNRNKEIHVLDLKVPYDSVEGFEKAREDNYVKYKDLALEIGNAFGEKATISAVVIGCLGTWDKKNNAPLSKIGLSKPEIVSLARMARSKWVIACYHIYREHISYTKSVMALPFSTV

SEQ ID NO: 25076 - protein, 946 aa, Schmidtea mediterranea
MKEAMRPIIRKYNCAKFPESDIRNYRVFIEDLIYQVNLDTITCEEILNEIERINGRLNPKKYFKENKPKSDLIHLQKKKAAELLCVKRLKFQINQKIEIEKIWENSEVDHRPPMAKFLKTFANQDCPISCTSLITLPFYKDEDSDVFTDCKTMSHIMINLDNSAPGMDLITGGDWKKISPKHELITAICNCVLRNKICPQRWKLYRTVMILKPGKLPESFRANSWRPLAIMDTAYRIFTTLLNNRLLQWIRNGNLISQNQKALGVPDGCAEHNTTIHIAIDKAKRCKSELHIVWLDITDAFGSLPHDLIWFTLAGMGLKNETLDLIKKLYMDVKTMFDCQGALSEPVNITKGVKQGCPLSMTLFCLSIDYILRTILNKCPFYLHDMNVSVLAYADDLVLLSDSYSGIKKSLESTVDLAAFANLKFKPSKSGYLSFNDINMDINRLYLYNEEIPMISENNKYRYLGVDFSNKRNQDIDGRLDSALALTKSLFGSYLHPSQKLSAYKIFIHSKLIFSLRNCVIGHRILDCDRNRVTQGREKQLGFDQKIKGLLKTMIGDKFQAMNNNFFYTHCKLGGLGITAAIDEYLIQSITGITRLFNSTNISFRKMLVSELAQSRGNGNFEAGLSWMNCEFNKIFPKSTFFVKFQKSVQSLKRKFCIYVCLKFVDDGFTLEITYKKRTSYINHQNLNTLSKELHNFVGLHYAEQWCKMRVQGHIAASIGDSITAKYLIASDTLNDAQYYFLVRARNNLLNLNYGAYRLKYNLSTKCRLCNLDEETQAHVFNHCKAKPNARRVKHENVLLGIVRFLEKIGFEIDVEKSPKYISIPTKLKPDMVIRSKRNKDIHVLDLKVPYDSMEGFEKAREDNYVKYKDLAMQIGKAFNQTATISAVVIGCLGTWDKKNNAPLSKIGLTKTEIIALARIACADAVIACYHIYREHISFTKSIPPG

SEQ ID NO: 25077 - protein, 946 aa, Schmidtea mediterranea
MKEAMRPIIRKYNCAKFPESDIRNYRVLIEDLIYQVNLDTITCEEILNEIERINGRLNPKKYFKENKPKSDLIHLQKKKAAELLCVKRLKFQINQKIEIEKIWENSEVDHRPPMAKFLKTFANQDCPISCTSLITLPFFKDEDSDVFTDCKTMSHIMINLDNSAPGMDLITGGDWKKISPKHELITAICNCVLRNKICPQRWKLYRTVMILKPGKLPESFRANSWRPLAIMDTAYRIFTTLLNNRLLQWIGNGNLISQNQKALGVPDGCAEHNATIHIAIDKAKRCKSELHIVWLDITDAFGSLPHDLIWFTLAGMGLKNETLELIKELYMDVKTMFDCQGALSEPVNITKGVKQGCPLSMTLFCLSIDYILRTILNKCPFYLHDMNVSILAYADDLVLLSDSYSGIKKSLESTVELAAFANLKFKPSKSGYLSFNDINMDINKLYLYNEQIPMISENNKYRYLGVDFSNKRNQDIDGRLDSALALTKSLFGSYLHPSQKLSAYKIFIHSKLIFSLRNCVIGHRILDCDRNRVTQGREKQLGFDQKIKSLLKTMIGDKFQAMNNNFFYTHCKLGGLGITAAIDEYLIQSITGITRLFNSTNISFRKMLVSELAQSRGNGNFEAGLSWMNCEFNKIFLKSTFFVKFQKSVQSLKRKFCIYVCLKFVDDGFTLEITYKKRTSYINHQNLNTLSKELHNFVGLHYAEQWCKMRVQGHIAASIGDSITAKYLIASDTLNDAQYYFLVCARNNMLNLNYGAYRLKYNLSTKCRLCNLDEETQAHVFNHCKAKPNARRVKHENVLIGIVSFLEKFGFEIDVEKSPKYVSIPTKLKPDMVIRSKRNKDIHVLDLKVPYDSMEGFEKAREDNYVKYKDLAMQIGKAFNQTATISAVVIGCLGTWDKKNNAPLSKIGLTKTEIIALARIACANAVIACYHIYREHISFTKSIPPG

SEQ ID NO: 25078 - protein, 946 aa, Schmidtea mediterranea
MKEAMRPIIRKYNCAKFPESDIRNYRVLIEDLIYQVNLDTITCEEILNEIERINGRLNPKKYFKENKPKSDLIHLQKKKAAELLCVKRLKFQINQKIEIGKIWENSEVNHRPPMAKFLKTFANQDCPISCTSLITLPFYKDEDSDVFTDCKTMSHIMINLDNSAPGMDLITGGDWKKISPKHELITAICNCVLRNKICPQRWKLYRTVMILKPGKLPESFRANSWRPLAIMDTAYRIFTTLLNNRLLQWIRNGNLFSQNQKALGVPDGCAEHNATIHIAIDKAKRCKSELHIVWLDITDAFGSLPHDLIWFTLAGMGLKNETLELIKELYMDVKTMFDCQGALSEPVNITKGVKQGCPLSMTLFCLSIDYILRTILNKCPFYLHDMNVSVLAYADDLVLLSDSYSGIKKSLESTVELAAFANMKFKPSKSGYLSFNDINMDINRLYLYNEEIPMISENNKYRYLGVDFSNKRNQDIDGRLDSALALTKSLFGSYLHPSQKLSAYKIFIHSKLIFSLRNCVIGHRILDCDRNRVTQGREKQLGFDQKIKGLLKTMIGDKFQAMNNNFFYTHCKLGGLGITAAIDEYLIQSITGITRLFNSTNISFRKMLVSELAQSRGNGNFEAGLSWMNCEFNKIFPKSTFFVKFQKSVQSLKRKFCIYVCLKFIDDGFTLEITYKKRTSYINHQNLNTLSKELHNFVGLHYAEQWCKMRVQGHIAASIGDSITAKYLIASDTLNDAQYYFLVRARNNLLNLNYGAYRLKYNLSTKCRLCNLDEETQAHVFNHCKAKPNARRVKHENVLLGIVSFLEKIGFEIDVEKSPKYVSIPTKLKPDMVIRSKRNKDIHVLDLKVPYDSMEGFEKAREDNYVKYKDLAMQIGKAFNQTATISAVVIGCLGPWDKKNNAPLSKIGLTKTEIIALARIACADAVIACYHIYREHISFTKSIPPG

SEQ ID NO: 25079 - protein, 1016 aa, Schmidtea mediterranea
MHLELATDILKTILNVQNIFDDLHFSLTEMEYPICHEANLSAFYVCHFLKCLMSDIPIDIPDINMMKEAMRPIIRKYNCAKFPESDVRSYRILIEDLIYQLNLDTISCEELLNEIERINGRINPKQYFKDNKPKSDIIHLQKKKAAELLCVKRLKFQINQKIEIEKIWENNEIDHKPAMAKFLKTFASKDCPMSNTSPIKLPFYRDVDSDTYTDCENLSHIMKNLDSSAPGMDLITGGDWKKISPKHELITATCNCVLRNKISPQRWKLYRTVMILKPGKLSESFKANSWRPLAIMDTAYRIFTTLINNRLLHWIRSGTLISQNQKAIGVPDGCAEHNATLHIAIDHAKRCKTELHIVWLDITDAFGSLPHDLIWYTLAGMGLRNETLTLIKELYKDVRTMFDCQGTLSEPVPITKGVKQGCPLSMTLFCLSIDYILKSILDNHPFLLHNLNISILAYADDLVLLSDSYQGIRKTLENTVKLAGFANLKFKPSKSGYLSINSASSVNKKLHLYDEEILTISENNKYRYLGVDFSYKRNQDIDSRLNSALALTKSLFTSYLHPSQKLNAYKTFIHSKLIFSLRNCIIGHRILDCDRNRITQRREKQLGFDQKSKGLLKTMIGDKFQALNNYFLYTHCKMGGLGITATIDEYLIQSITGITRLFHSSNLGFRDMVIAELAHSRGSKSFEAGLKWMNCEISKEFHNTSFFVKFQKSALALKRKFSICISLKFVEDKFSLEMVYKKRTSYIDHRNLNTLSKELHDFVGLHYAEQWYKMKVQGRIAASIGDSITAKYLIPSDTLNDAQYCFLVRARNNILNLNYSASRLKYNLNTKCRLCHLDEETQTHVFNHCRAKPNARRVKHENVLVSIVAFLEKIGFEIDVEKSPKYVSIPTKLKPDMVIRSKRNKDIHVLDLKVPYDSVEGFEKARENNYVKYKDLSLQIGKAFNQTATISAIVIGCLGTWDKKNNAPLSKIGLTKTEIISLAKITCPNAVIACYHIYREHVSYTKEAIPPPFSLV

SEQ ID NO: 25080 - protein, 1159 aa, Schmidtea mediterranea
MVKGLIYRSWALSSTFANSVKSVDKLVELLIKNGYSKSFLLLMIKETVDKLIKNPKDPCCGKSECNLSDGCELSVDLGDCKNGYKKIEPKYVLVLPYSEGFTNYKRKLGKLIGNLEYKIVSNSFLDKRRRMAMIIDPTADDSHALHFDLANDILRTIFNIENIFGRLKFGLTEIEYPICREFGLSSLYVCHFIQCLMLGSAVTIPDVSAMRILMRPIINKYNCTKFEDNDARKYRILIDDLVYQLDLDAITCDETLCEIERINGRLNPGRYFKKEKPKSDIIHLRFKKSAELLCVRRLRFQANQGQEIAKIWEDDGIKHTPPINAFLKTFASSECPISDTKSITLPFYSDNESNLTTDNENMSHVMKQLDNTAPGMDLITVADWKIISPKHILITAICNNVLRNGVCPKKWKLFRTVLILKPGKKDESFKTSSWRPLAIMDTAYRIFATLLNNRLLAWIKKGNLISQNQKAIGIPDGCAEHSATLHLAIDHARRMKKELHVVWLDITDAFGSLPHDLIWYTLEGMGMKKETVCLIKELYRDISTFFDCQGMISESVNITKGVKQGCPLSMTLFCLSIDYILKSVLIDCPFHLHDMNISILAYADDIVLVSDSFTKIEMALRMTVRLASHANLRFKPSKSGYLSINNNNHDIYKLYLYNEEVPIISNENKYKYLGIDFSHKQYQDIDGRLQSALALTNTLFKSYLHPAQKLNAYKTFIHSKLIFSFRNCIIGHRILDCDRNRITQGREKQLGYDQKVKALLKTMVGDKFHALNNYFLYTHCKLGGLGVSSSIDEYLIQSVTGITRLFHSYNTDFREMMKKELAHARGEENFEAALKWINCEIDKPFKNTSFFVKFQKSVYALKRKFEIYIKLKFEDNSFKLEMRYKNRISYIGYRNLGTLSKDLHDFVGLHYAEKWYEMRVQGHIGNAIGDSITAKYLTASDILNDAQYCFLIKARNNLLNLNYNAYRLKFSLDTMCRLCHLDAETQAHVFNHCLAKPNARRIKHENVLISIVAFLEKIGFEIDVEKSPKYISVPTKLKPDMVIRSNRNKEIHVLDLKVPYDSVEGFEKAREDNYVKYKDLAIEIGKAFGEKATISAVVIGCLGTWDKKNNAPLSKIGLSKPEIVSLAKIACSRAVIACYHIYREHISYTKSTMALPFSI

SEQ ID NO: 25081 - protein, 1687 aa, Schmidtea mediterranea
MPILTMRKTTEKETHQKMIQAPVYWDEKKTCAWISEPMSRMPYEEPSKLPRTKATTMGTKMIPTANIYPSLYNPDWEATNPINTRRSRSVDQDGEVRTIAALHTSTGPAITLIIEINGKETEAMIDTGANISAVHLSEIPRHHWKDIEPTGVHVIACSKETVNVMGRWWTTLKHQNNEVETYLAVIPQLSVPCIIGTDLMPELFKEIVIDLGTLCLKDKEGRICTMNTIVRCSEKIVVPAKSQMICYIKVDEGMTGEMIFEPSKKFEKRRELPLAREIIEINENGELPINITNFDEEDKIIYENERLGKLTPMIDIELIKMKEEGEEDKPLWTIDSELLNEDEKTQLQQLLTEYKDIFAASDLDFGTCDVTLHAIPLSDETPIALRPYKLAEAQKTVAEQEVQKMLDAKVIEPSCSPWQFPVVMVKKKDGTQRFCIDYRKLNAVTKRDTYPLPDINEMLLTLQGAAYFTSLDLKSGYWQIKMKEEDKEKTAFTIGRDLYQFKKMPFGLTNAPASFQRCMNFVTHGIKQCMVYIDDLLIYSSTFEQHLEDIRKVFIRLRQWKLKLKPSKCDWAKEKVTFLGHIVSAKGKEPDHRNIEKIKNCPAPKTVTQIQEFLGLCGYYRKFIKNYAGVAKPIQDLVKKDTSFVWGNEQQLAFETLRDKLIEAPILVHPDFKKPFLLATDASGYASGAILGQLDDEGKERVIGYYSKTFKKHEKNYSVTEREALAIIQAIKHFKYLLWGHEICITTDHQPLVWLGQHKEASSRLMRWAMQLQEYSPFIKFKAGRANANADCMSRFIFPDLMDEEVRRICMIIAEDIDFAQLMIDQQEDPELKLIIEYVKTGRPEVYENDPQLKEHMDKHRHRYVIEKKWLLIADGEQRLMVIPENRRKELLTQYHDGKLGGHMSVKKTLARMKQKYFWPNMSESVKDWIKICLICATRKNTGTKWKAPLKPMPVPAEPMTMISMDILGPLPETLNGNLILIRIHLIKSTLISQNQKAIGVPDGCAEHNATLHIAIDRAKRCKTELHIVWLDITDAFGSLPHDLIWYTLAGMGLRNETLTLIKELYKDVRTMFDCQGTLSEPVPITKGVKQGCPLSMTLFCLSIDYILKSILDNHPFFLHNLNISILAYADDLVLLSDSYQGIRKTLENTVKLAGFANLRFKPSKSGYLSINSASSVNQKLHLYDEEIPTISENNKYKYLGVDFSYKRNQDIDSRLNSALALTKSLFTSYLHPSQKLNAYKTFIHSKLIFSLRNCIIGHRILDCDRNRITQGREKQLGFDQKVKGLLKTMIGDKFQALNNYFLYTHCKMGGLGITATIDEYLIQSITGITRLFHSSNLGFRDMLIAELAHSRGSKSFEAGLKWMNCEISKEFHNTSFFVKFQKSALALKRKFSICISLKFVEEKFSLEMVYKKRTSYIDHRNLNTLSKQLHDFVGLHYAEQWYKMKVQGRIAASIGDSITAKYLIASDTLNDAQYCFLVRARNNILNLNYSAYRLKYNLNTKCRLCHLDEETQTHVFNHCRAKPNARRVKHENVLVSIVAFLEKIGFEIDVEKSPKYVSIPTKLKPDMVIRSKRNKDIHILDLKVPYDSVEGFEKARENNYVKYKDLSLQIGKAFNQTATISAIVIGCLGTWDKKNNAPLSKIGLTKTEIISLAKITCPNAVIACYHIYREHVSYIKAAIPPPFSLV

SEQ ID NO: 25082 - protein, 946 aa, Schmidtea mediterranea
MKEAMRPIIRKYNCEKFPESDIRNYRVFIEDLIYQVNLDTITCEEILNEIERINGRLNPKKYFKENKPKSDLIHLQKKKAAELLCVKRLKFQINQKIEIEKIWENSEVDHRPPMAKFLKTFANQDCPISCTSLITLPFYKDEDSDVFTDCKTMSHIMINLDNSAPGMDLITGGDWKKISPKHELITAICNCVLRNKICPQRWKLYRTVMILKPGKLPESFRANSWRPLAIMDTAYRIFTTLLNNRLLQWIRNGNLISQNQKALGVPDGCAEHNATIHIAIDKAKRCKSELHIVWLDITDAFGSLPHDLIWFTLAGMGLKNETLELIKELYMDVKTMFDCQGALSEPVNITKGVKQGCPLSMTLFCLSIDYILRTILNKCPFYLHDMNVSVLAYADDLVLLSDSYSGIKKSLESTVDLAAFANLKFKPSKSGYLSFNDINMDINRLYLYNEEIPMISENNKYRYLGVDFSNKRNQDIDGRLDSALALTKSLFGSYLHPSQKLSAYKIFIHSKLIFSLRNCVIGHRILDCDRNRVTQGRENQLGFDQKIKGLLKTMIGDKFQAMNNNFFYTHCKLGGLGITAAIDEYLIQSITGITRLFNSTNISFRKMLVSELAQSRGNGNFEAGLSWMNCEFNKIFPKSTFFVKFQKSVQSLKRKFCIYVCLKFVDDGFTLEITYKKRTSYINHQNLNTLSKELHNFVGLHYAEQWCKMRVQGHIAASIGDSITAKYLIASDTLNDAQYYFLVRARNNLLNLNYGAYRLKYNLSTKCRLCNLDEETQAHVFNHCKAKPNARRVKHENVLLGIVSFLEKIGFEIDVEKSPKYVSIPTKLKPDMVIRSKRNKDIHVLDLKVPYDSMEGFEKAREDNYVKYKDLAMQIGKAFNQTATISAVVIGCLGTWDKKNNAPLSKIGMTKTEIIALARIACADAVIACYHIYREHISFTKSIPPG

SEQ ID NO: 25083 - protein, 946 aa, Schmidtea mediterranea
MKEAMRPIIRKYNCAKFPESDIRNYRVLIEDLIYQVNLDTITCEEILNEIERINGRLNPKKYFKENKPKSDLIHLQKKKAAELLCVKRLKFQINQKIEIEKIWENSEVDHRPPMAKFLKTFANQDCPISCTSLITLPFYKDEDSDVFTDCKTMSHIMINLDNSAPGMDLITGGDWKKISPKHELITAICNCVLRNKICPQRWKLYRTVMILKPGKLPESFRANSWRPLAIMDTAYRIFTTLLNNRLLQWIRNGNLISQNQKALGVPDGCAEHNATIHIAIDRAKRCKSELHIVWLDITDAFGSLPHDLIWFTLAGMGLKNETLELIKELYMDVKTMFDCQGALSEPVNITKGVKQGCPLSMTLFCLSIDYILRTILNKCPFYLHDMNVSVLAYADDLVLLSDSYSGIKKSLESTVDLAAFANLKFKPSKSGYLSFNDINMDINRLYLYNEEIPMISENNKYRYLGVDFSNKRNQDIDGRLDSALELTKSLFGSYLHPSQKLSAYKIFIHSKLIFSLRNCVIGHRILDCDRNRVTQGREKQLGFDQKIKGLLKTMIGDKFQAMNNNFFYTHCKLGGLGITAAIDEYLIQSITGITRLFNSTNISFRKMLVSELAQSRGNGNFEAGLSWMNCEFNKIFPKSTFFVKFQKSVQSLKRKFCIYVCLKFVDDGFTLEITYKKRTSYINHQNLNTLSKELHNFVGLHYAEQWCKMRVQGHIAASIGDSITAKYLIASDTLNDAQYYFLVRARNNLLNLNYGAYRLKYNLSTKCRLCNLDEETQAHVFNHCKAKPNARRVKHENVLLGIVSFLEKIGFEIDVEKSPKYVSIPTKLKPDMVIRSKRNKDIHVLDLKVPYDSMEGFEKAREDNYVKYKDLAMQIGKAFNQTATISAVVIGCLGTWDKKNNAPLSKIGLTKTEIIALARIACADAVIACYHIYREHISFTKSIPPG

SEQ ID NO: 25084 - protein, 952 aa, Schmidtea mediterranea
MHFELATDILKTILNVQNIFGDLNFSLTEMEYPVCHEANLSAFYICHFLKCLMSDIPIGIPDINTMKEAMRPIIRKYNCTKFPESDIRSYRILLEDLIYQLNLDTISCEELLNEIERINGRINPKRYFKDNKPKSDIIHLQKKKAAELLCVKRLKFQINQKIEIGKIWENNEIEHKPAIAKFLKTFASKDCPVSNTSSIKLPFYKDVDTDSYTDCENLSHIMKNLDSSAPGMDLITGGDWKKISPKHELITAICNCVLRNKISPQRWKLYRTAMILKPGKLSESFKANSWRPLAIMDTAYRIFTTLINNRLLQWIRNGSLISQNQKAIGVPDGCAEHNATLHIAIDRAKRCKTELHVVWLDITDAFGSLPHDLIWYTLTGMGLKNETLTLIKELYKDVRTMFDCQGTMSEPVPITKGVKQGCPISMTLFCLSIDYILKSILDNHPFLLHNLNISILAYADDLVLLSDSYPRIRKTLENTVKLAGLANLKFKPSKSGYLTINSAGSDTKKLHLYDEEIPTISENNKYRYLGVDFSYKRNQDIDGRLDSALALTRSLFMSYLHPSQKLNAYKTFIHSKLIFSLRNCIIGHRILDCDRNRVTQGREKQLGFDQKIKGLLKTMIGDKFQALNNYFLYTHCKMGGLGITATIDEYLIQSITGITRLFHSSNLGFRDMLIAELAHSRGSKNFEAGLKWMNCEISKGFQNTSFFVKFQKSALALKRKFSICISLKFAEDKFSLEMIYKKRTYYIDHRNLNTLSKELHVFIGLHYAEQWYKMRVQGRIAASIGDSITAKYLIASDTLNDAQYCFLVRARNNILNLNYSAYRLKYNLNTKCRLCHLDEEIQTHVFNHCRAKPNARRVKHENVLVCIVAFLEKIGFEIDVEKTPKYVSIPTKLKPDMVIRSKRNKDIHVLDLKVPYDSVEGFEKAREDNYVKYKDLSLQIGKAFNQTATISV

SEQ ID NO: 25085 - protein, 964 aa, Schmidtea mediterranea
MSDIPIDIPDINMMKEAMRPIIRKYNCAKFPESDVRSYRILIEDLIYQLNLDTITCEELLNEIERINGRINPKRYFKDNKPKSDIIHLQKKKAAELLCVKRIKFQINQKIEIGKIWENNEIDHKPAMAKFLKTFASKDCPMSNTSPIKLPFYRYVDSDTYTDCENLSHIMKNLDSSAPGMDLITGGDWKKISPKHELITAICNCVLRNKISPQRWKLYRTVMILKPGKLSESFKANSWRPLAIMDTAYRIFTTLINNRLLHWIRSGTLISHNQKAIGVPDGCAEHNATLHIAIDRAKRCKTELHIVWLDITDAFGSLPHDLIWYTLAGMGLRNETLTLIKELYKDVRTMFDCQGTLSEPVPITKGVKQGCPLSMTIFCLSIDYILKSILDNHPFLLHNLNISILAYADDLVLLSDSYQGIRKTLENTVKLAGFANLKFKPSKSGYLSINSASSVNKKLHLYDEEIPTISENNKYRYLGVDFSYKRNQDIDSRLNSALALTKSLFTSYLHPSQKLNAYKTFIHSKLIFSLRNCIIGHRILDCDRNRITQGRENQLGLDQKIKGLLKTMIGDKFQALNNYFLYTHCKMGGLSITVTIDEYLIQSITGITRLFHSSNLGFRDMLIAELAHSRGSKSFEAGLKWMNCEISKEFHNTSFFVKFQESALALKRKFSICISLKFVEDKFSLEMVYKKRTSYIDHRNLNTLSKELHDFVGLHYAEQWYKMKVQGRIAASIGDSITAKYLIASDTLNNAQYCFLVRARNNILNLNYSAYRLKYNLNTKCRLCHLDEETQTHVFNHCRAKPNARRVKHENVLVSIVAFLEKIGFEIDVEKSPKYVSIPTKLKPDMVIRSKRNKYIHVLDLKVPYDSVEGFEKARENNYVKYKDLSLQIGKAFNQTATISAIVIGCLGTWDKKNNAPLSKIGLTKTEIISLAKITCPNAVIACYHIYREHVSYTKEAIPPPFSLV

SEQ ID NO: 25086 - protein, 946 aa, Schmidtea mediterranea
MKEAMRPIIRKYNCAKFPESDIRNYRVLIEDLIYQVNIDTITCEEILNEIERINGRLNPKKYFKKNRPKSDLIHLQKKKAAELLCVKRLKFQINQKIEIEKIWESSEVDHRPPMAKFLKTFANQDCPISSTSLITLPFYKDEDSDVFTDCKTMSHIMMNLDSSAPGTDLITGGDWKKISPKHELITAICNCVLRNKICPQRWKLYRTVMILKPGKLPESFRANSWRPLAIMDTAYRIFTTLLNNRLLHWIRNGSLISQNQKALGVPDGCAEHNATIHIAIDRAKRCKSELHIVWLDITDAFGSLPHDLIWYTLAGMGLKSETLELIKELYMDVKTMFDCQGALSEPVNITKGVKQGYPLSMTLFCLSIDYILKSILNKCPFYLHDLNISVLAYADDLVLLSDSYSGIKKSLESTVDLAAFANLKFKPSKSGYLSFNDINMDINRLYLYNEEIPMISENNKYRYLGVDFSNKRNQDIDGRLDSALALTKSLFGSYLHPSQKLSAYKIFIHSKLIFSLRNCVIGHRILDCDRNRVTQGREKQLGFDQKIKGLLKTMIGDKFQAMNNNFFYTHCKLGGLGVTAAIDEYLIQSITGITRLFNSSNISFRKMLITELAQSRGNGNFEAGLSWMNCEFNKIFPKSSFFVKFQKSVQSLKRKFCIYVCLKFVDDGFTLEITYKKRISYINHQNLNTLSKELHNFVGLHYAEQWCKMRVQGHIAASIGDSITAKYLIASDTLNDAQYYFLIRARNNLLNLNYGAYRLKYNLNTKCRLCDLDEETQAHVFNHCRAKPNARRVKHENVLLGIVSFLEKIGFEIDVEKSPKYISIPTKLKPDMVIRSKRNKDIHVLDLKVPYDSVEGFEKARENNYVKYKDLSMQIGKAFNQTATISAVVIGCLGTWDKKNNAALSKIGLTKTEIIALAKIACTDAVIASYHIYREHISFTKSIPPV

SEQ ID NO: 25087 - protein, 1016 aa, Schmidtea mediterranea
MHLELATDILKTILNVQNIFDDLHFSLTEMEYPICHEANLSAFYVCHFLKRLMSDIPIDIPDINMMKEAMRPIIRKYNCAKFPESDVRSYRILIEDLIYQLNLDTISCEELLNEIERINGRINPKRYFKDNKPKSDIIHLQKKKAAELLCVKRLKFQINQKIEIGKIWENNEIDNKPAMAKFLKTFASKDCPLSNTSPIKLPFYRDVDSDTYTDCENLPHIMKNLDSSTPGMDLITGGDWKKISPKHELITAICNCVLRNKISPQRWKLYRTVMILKPGKLSESFKANSWRPLAIMDTAYRIFTTLINNRLLHWIRSGTLISQNQKAIGVLDGCAEHNATLHIAIDRAKRCKTELHIVWLDITDAFGSLPHDLIWYTLAGMGLKNETLTLIKELYKDVRTMFDCQGTLSEPVPITKGVKQGGPLSLTLFCLSIDYILKSILDNHPFLLHNLNISILAYADDLVLLSDSYQGIRKTLENTVKLAGFANLKFKPSKSGYLSINSAGSVNKKLHLYDEEIPTISENNKYRYLGVDFSYKRNQDIDSRLNSALALTKSLFTSYLHPSQKLNAYKTFIHSKLIFSLRNCIIGHRILDCDKNRITQGREKQLGFDQKIKGLLKTMIGDKFQALNNYFLYTYCKMGGLGITATINEYLIQSITGITRLFHSSNLGFRDMLIAELAHSRGSKSFEAGLKWMNCEISKEFHNTSFFVKFQKSALALKRKFSICISLKFAEDKFSLEMVYKKRTSYIDHRNLNTLSKELHDFVGLHYAEQWYKMKVQGRIAASIGDSITAKYLIASDTLNDAQYCFLVRARNNILNLNYSAYRLKYNLNTKCRLCHLDEETQTHVFNHCRAKPNARRVKHENVLVSIVAFLEKIGFEIDVEKSPKYVSIPTKLKPDMVIRSKRNKDIHVLDLKVPYDSVEGFEKARENNYVKYKDLSLQIGKAFNQTATISAIVIGCLGTWYKKNNAPLSKIGLTKTEIISLAKIACPNAVIACYHIYREHVSFTKDVIPPPFSLV

SEQ ID NO: 25088 - protein, 946 aa, Schmidtea mediterranea
MKEAMRPIIRKYNCAKFPESDIRNYRVLIEDLIYQVNLDTITCEEILNEIERINGRLNPKKYFKENKSKSDLIHLQKKKAAELLCVKRLKFQINQKIEIGKIWESSEVDHRPPMAKFLKTFANQDCPISSTSLITLPFYKDEDSDVFTDCKTMSHIMMNLDSSAPGMDLITGGDWKKISPKHELITAMCNCVLRNKICPQRWKLYRTVMILKPGKLPESFRANSWRPLAIMDTAYRIFTTLLNNRLLHWIRNGSLISQNQKALGVPDGCAEHNATIHIAIDRAKRCKSELHIVWLDITDAFGSLPHDLIWYTLAGMGLKSETLELIKELYMDVKTMFDCQGALSEPVNITKGVKQGCPLSMTLFCLSIDYIMKSILNKCPFYLHDLNISVLAYADDLVLLSDSYSGIKKSLESTVDLAAFANLKFKPSKSGYLSFNDINMDINRLYLYNEEIPMISENNKYRYLGVDFSNKRNQDIDGRLDSALALTKSLFGSYLHPSQKLSAYKIFIHSKLIFSLRNCVIGHRILDCDRNRVTQGREKQLGFDQKIKGLLKTMIGDKFQAMNNNFLYTHCKLGGLGVTAAIDEYLIQSITGITRLFNSSNISFRKMLITELAQSRGNGNFEAGLSWMNCEFNKIFPKSSFFVKFQKSVQSLKRKFCIYVCLKFVDDGFTLEITYKKRISYINHQNLNTLSKELHNFVGLHYAEQWCKMRVQGHIAASIGDSITAKYLIASDTLNDAQYYFLVRARNNLLNLNYGAYRLKYNLSTKCRLCNLDEETQAHVFNHCRAKPNARRVKHENVLLGIVSFLEKIGFQIDVEKSPKYVAIPTKLKPDMVIRSGRNKDIHVLDLKIPYDSIEGFEKARENNYVKYKYLAMQIGKAFNQTATISAVVIGCLGTWDKKNNATLSKIGLTKTEIIALAKIACADAVITCYHIYREHISFTKSIPPV

SEQ ID NO: 25089 - protein, 1049 aa, Schmidtea mediterranea
MPIYGKNSSWSFFFLDKRRRMAMIIDPTADDSHALHFDLANDILRTIFNIENIFGRLKFGLTEIEYPICREFGLSSLYVCHFIQCLMLGSAVTIPDVSAMRILMRPIINKYNCTKFEDNDARKYRILIDDLVYQLDLDAITCDETLCEIERINGRLNPGRYFKKEKPKSDIIHLRFKKSAELLCVRRLRFQANQGQEIAKIWEDDGIKHTPPINAFLKTFASSECPISDTKSITLPFYSDNESNLTTDNENMSHVMKQLDNTAPGMDLITVADWKIISPKHILITAICNNVLRNGVCPKKWKLFRTVLILKPGKKDESFKTSSWRPLAIMDTAYRIFATLLNNRLLAWIKKGNLISQNQKAIGIPDGCAEHSATLHLAIDHARRMKKELHVVWLDITDAFGSLPHDLIWYTLEGMGMKKETVCLIKELYRDISTFFDCQGMISESVNITKGVKQGCPLSMTLFCLSIDYILKSVLIDCPFHLHDMNISILAYADDIVLVSDSFTKIEMALRMTVRLASHANLRFKPSKSGYLSINNNNHDIYKLYLYNEEVPIISNENKYKYLGIDFSHKQYQDIDGRLQSALALTNTLFKSYLHPAQKLNAYKTFIHSKLIFSFRNCIIGHRILDCDRNRITQGREKQLGYDQKVKALLKTMVGDKFHALNNYFLYTHCKLGGLGVSSSIDEYLIQSVTGITRLFHSYNTDFREMMKKELAHARGEENFEAALKWINCEIDKPFKNTSFFVKFQKSVYALKRKFEIYIKLKFEDNSFKLEMRYKNRISYIGYRNLGTLSKDLHDFVGLHYAEKWYEMRVQGHIGNAIGDSITAKYLIASDILNDAQYCFLIKARNNLLNLNYNAYRLKFSLDTMCRLCHLDAETQAHVFNHCLAKPNARRIKHENVLISIVAFLEKIGFEIDVEKSPKYISVPTKLKPDMVIRSNRNKEIHVLDLKVPYDSVEGFEKAREDNYVKYKDLAIEIGKAFGEKATISAVVIGCLGTWDKKNNAPLSKIGLSKPEIVSLAKIACSRAVIACYHIYREHISYTKSTMALPFSI

SEQ ID NO: 25090 - protein, 1016 aa, Schmidtea mediterranea
MHFELATDILKTILNVHNIFDDLHFSLAEMEYPICHDANLSAFYACHFLKCLMSDIPIDIPDINMMKEEMRPIIRKYNCAKFPESDVRSYRILIEDLIYQFNLDTISCEELLNEIERINGRINPKRYFKDNKPKSDIIHVQKKKAAELLCVKRLKFQINQKIEIEKIWENNEIDHKPAIAKFLKTFASKDCPMSNTSPIKLPFYRDVDSDAYTDCENLSHIMKNLDSSAPGMDLITGGDWKKISPKHELITAICNCVLRNKISPKRWKLYRTVMILKLGKLSESFKANSWRPLAIMDTAYRIFTTLINNRLLHWIRSGTLISQNQKAIGVPDGCAEHNATLHIAIDRAKRCKTELHIVWLDITDAFGSLPHDLIWYTLDGMGLKNETLTLIKELYKDLRTMFDCQGALSEPVPITKGVKQGCPLSMTLFCLSIDYILKSILDNHPFFLHNLNISILAYADDLVLLSDSYQGIRKTLENTVKLAGFANLRFKPSKSGYLSINSASSVNQKLHLYDEEIPTISENNKYKYLGVDFSYKRNQDIDNRINSALALTKSLFTSYLHPSQKLNAYKTFIHSKLIFSLRNCIIGHRILDCDRNRITQGREKQLGFDQKVKGLLKTMIGAKFQALNNYFLNTHCKMGGLGITATIDEYLIQSITGMTRLFHSSNLGFRDMLIAELAHSRGSKSFEAGLKWMNCEISKEFHNTSFFVKFQKSALALKRKFSICISLKFVEDKFSLEMVYKKRTSYIDHRNLNTLSKQLHDFVGLHYAEQWYKMKVQGRIAASIGDSITAKYLIASDTLNDAQYCFLVRARNNILNLNYSAYRLKYNLNTKCRLCHLDEETQTHVFNHCRAKPNARRVKHENVLVSIVAFLEKIGFEIDVEKSPKYVSIPTKLKPDMVIRSKRNKDIHILDLKVPYDSVEGFEKARENNYVKYKDLSLQIGKAFNQTATISAIVIGCLGTWDKKNNAPLSKIGLTKTEIISLAKITCPNAVIACYHIYREHVSNIKEAYPPPFSLV

SEQ ID NO: 25091 - protein, 1016 aa, Schmidtea mediterranea
MNFELATDILKTILNVHNIFDDLHFSLGEMEYPICHEANLSAFYVCHFLKCLMSDIPIDIPDINMMKEEMRPIIRKYNCAKFPESDVRSYRILIEDLIYQLNLDTISCEELLNEIERINGRINPKRYFKDNKPKSDIIHLQKKKAAELLCVKRLKFQINQKIEIEKIWENNEIDHKPAIAKFLKTFASKDCPTSNTSSIKLPFYRDVDSDTYTDCENLSHIMKNLDSSAPGMDLITGGDWKKISPKHELITAICNCVLRNKIIPKRWKLYRTVMILKPGKLSESFKTNSWRPLAIMDTAYRIFTTLINNRLLHWIRSGTLISQNQKAIGVPDGCAEHNATLHIAIDRAKRCKTELHIVWLDITDAFGSLPHDLIWYTLAGMGLRNETLTLIKELYKDVRTMFDCQGALSEPVPITKGVKQGCPLSMTLFCLSIDYILKSILDNHPFFLHNLNISILAYADDLVLLSDSYQGIRKTLENTVTLAGFANLRFKPSKSEYLSINSASSVNQKLHLYDEEIPTISENNKYKYLGVDFSYKRNQDIDSRLNSALALTKSLFTSYLHPSQKLNAYKTFIHTKLIFSLRNCIIGHRILDCDRNRITQGREKQLGFDQKVKGLLKTMIGDKFQALNNYFLYTHCKMGGLGITATIDEYLIQSITGITRLFHSSNLGFRDMLIAELAHSRGSKSFEAGLKWMNCEISKEFHNTSFFVKFQKSALALKRKFSICISLKFVEDKFSLEMVYKKRTSYIDHRNLNTLSKQLHDFVGLHYAEQWYKMKVQGRIAASIGDSITAKYLIASDTLNDAQYCFLVRARNNILNLNYSAYRLKYNLNTKCRLCHLDEETQTHVFNHCRAKPNARRVKHENVLVSKVAFLEKIGFEIDVEKSPKYVSIPTKLKPDMVIRSKRNKDIHILDLKVPYDSVEGFEKARENNYVKYKDLSLQIGKAFNQTATISAIVIGCLGTWDKKNNAPLSKIGLTKTEIISLAKITCPNAVIACYHIYREHVSYIKEAYPPPFSLV

SEQ ID NO: 25092 - protein, 1049 aa, Schmidtea mediterranea
MPIYGKNSSWSFFFLDKRRRMAMIIDPTADDSHALHFDLANDILRTIFNIENIFGRLKFGLTEIEYPICRESGLSSLYVCHFIQCLILGSALTIPDVSAMRILMKPIINKYNCTKFQDNDARKYRILIDDLVYQLDLDAITCDETLCEIERINGRLNPEKYFKREKPKSDIIHLRFKKSAELLCVRRLRFQANQRQEIAKIWEDDGIKYTPPINAFLKTFASSECPISDTKSITLPFYSDNESNLTTDNENMSHVMKQLDNTAPGTDLITVTDWKIISPNHILITAICNNVLRNGVCPKKWKLFRTVLILKPGKKDESFKTSSWRPLAIMDTAYRIFATLLNNRLLTWIKKGNLISQNQKAIGIPDGCAEHSATLHLAIDHAKRRKKELHIVWLDITDAFGSLPHDLIWYTLEGMGMKKETIYLIKELYRDVSTFFDCQGMISESVNITKGVKQGCPLSMTLFCLSIDYILKSVLNDCPFHLHDMNISILAYADDIVLVSDSFTKIEMTLRRTVRLASHANLKFKPSKSGYLSINNNNHDICKLYLYNEEVPIISNENKYKYLGIDFSHKQYQDIDGRLQSALALTNTLFKSYLHPAQKLNAYKTFIHSKLIFSFRNCIIGHRILDCDRNRITQGREKQLGYDQKIKALLKTMVGDKFHALNNYFLYTHCKLGGLGISSSIDEYLIQSVTGITRLFHSYNTDFREMMKKELAHARGEENFEAALKWINCEIDKPFKNASFFVKFQKSVYALKRKFEIYIKLKFEDNSFKLEMRYKNRISYIGYRNLGTLSKDLHDFVGLHYAEKWYEMRVQGRIGNAIGDSITAKYLIASDILNDAQYCFLVKARNNLLNLNYNAYRLKFSLDTMCRLCHLDAETQAHVFNHCLAKPNARTIKHENVLISIVAFLEKIGFEIDVEKSPKYISVPTKLKPDMVIRSNRNKEIHVLDLKVPYDSVEGFEKAREDNYVKYKDLAIEIGNAFGEKATISAVVIGCLGTWDKKNNAPLSKIGLSKPEIVSLARIACSKAVIACYHIYREHISYTKSTMALPFSI

SEQ ID NO: 25093 - protein, 1050 aa, Schmidtea mediterranea
MPIYGKNSSWSFFFFDKKRRITMIIDPTADDSHNLHFDLANNILRTILNIENIFGKLKFGLTEIEYPICRELNLSSMYICHFMQCLILNSTFTIPNISTMRILMKPIINKYNCTKFQDNDARKYRILIEDQVYQLDLDTITCDETLCEIERINGRLNPEKYFKKEKPRSDIIHLRLKKSAELLCVKRLRFQTNQKQEIAKIWEDDNVEHRPSITAFLKTFASSECPISNTASITLPFYPDTESNSTTDNENMSHIMKQLDNTAPGMDLITIADWKIISPKHVLITAIYNNVLRNGVCPKKWKLFKTVLILKPGKMDESFKTSSWRPLAIMDTAYRIFATLLNNRLLTWIKKGNLISQNQKAIGIPDGCAEHSATLHIAIDHAKRGKKELHIVWLDITDAFGSLPHDLIWYTLEGMEMKKETICLIKELYSDVSTFFDCHGILSGSVNITKGVKQGCPLSMTLFCLSIDYILKSILNDCPFLVHDMNISIMAYADDIVLVSDSFIKIDKALKETVRLASYANLKFKPSKSGYLSINNKNPDTCKLYLYNEEVPIICNKNKYKYLGIDFSHKQNQDIDGRLQAALELTDSLFKSYLHPAQKLNAFKTFVHSKLIFSFRNCKIGHRILDCDRNRITQGREKQLGFDQKIKALLKTMVGDKFHALNNFFLYAHCKLGGLGISSSIDEYLIQRITGITRLFHSSNSDFRKIMIKELAHARGEDNFEAGLKWLDCEINKPFSNTSFFVKFQKSVFALKRKFSIGVKLKFEDDNFKLEMTHKNRISYISYRNLGTLSKDLHDFVGLHYAEKWYEMRVQGRIGNAIGDSITAKYLIASDILNDAQYCFLIRARNNLLKLNYSAYRLKFSLDTKCRLCHLDVETQAHVFNHCLAKPNARRVKHENVLISIVGFLKKIGFEIDVEKSPKYISIPTKLKPDMVIRSNRNKEIHVLDLKVPYDSVEGFEKAREDNYVKYKDLALEIGNAFGVKATISAVMIGCLGTWDKKNNAPLSKIGLSKPEIVSLARIACSKAVIACYHIYREHISYTKSAMALPFSII

SEQ ID NO: 25094 - protein, 999 aa, Schmidtea mediterranea
MYRIFLMIYISHLLKWNILYAMKQTWLVFYVCHFLKCLMSDIPIDIPDINMMKEAMRPIIRKYNCAKFPESDVRSYRILIEDLIYQLNLDTITCEELLNEIERINGRINPKRYFKDNKPKSDIIHLQKKKAAELLCVKRIKFQINQKIEIGKIWEIDHKPAMAKFLKTFASKDCPMSNTSPIKLPFYMDVDSDTYTDCKNLSHIMKNLDSSAPGMDLITGGDWKKISPKHELITAICNCVLRNKISPQRWKLYRTVMILKPGKLSESFKANSWRPLAIMDTAYRIFTTLINNRLLHWIRSGTLISHNQKAIGVPDGCAEHNATLHIAIDSAKRCKTKLHIVWLDITDAFGSLPHDLIWYTLAGMGLRNETLTLIKELYKDVRTMFDCQGTFSEPVPITKGVKQGCPLSMTLFCLSIDYILKSILNNHPFLLHNLNISILAYADDLVLLLDSYQGIRKTLENTVKLAGFANLNFKPSKSGYLSINSASSVNKKLHLYDEEIPTISENNKYRYLGVDFSYKRNQDIDSRLNSALALTKSLFTSYLHPSQKLNAYKTFIHSKLIFSLRNCIIGHRILDCDRNRITQGREKQLGFDQKIKGLLKTMIGDKFQALNNYFLYTHCKMGVLGITATIDEYLIQSITGITRLFHSSNLGFRDMLIAELAYSRGSKSFEAGLKWMNCEISKEFHNTSFFVKFQKSALALKRKFSICISLKFVEDKFSLEMVYKKRTSYIDHRNLNTLSKELHDFVGLHYAEQWYKMKVQGRIAASIGDSITAKYLIASDTLNDAQYCFLVRARNNILNLNYSAYRLKYNLNTKCRLCHLDEETQTHVFNHCRAKPNARRVKHENVLVCIVAFLEKIGFEIDVEKSPKYVSIPTKLKPDMVIRSKWNKDIHVLDLKVPYDSVEGFEKARENNYVKYKDLSLQIGKAFNQTATISAIVIGCLGTWDKKNNAPLSKIGLTKTEVISLARIACPNAVIACYHIYREHVSYTKEAIPPPFSLV

SEQ ID NO: 25095 - protein, 833 aa, Schmidtea mediterranea
MAKFLKTFANQDCPISSTSLITLPFYKDEDSDVFTDCKTMSHIMMNLDSSAPGMDLITGGDWKKISPKHELITAICNCVLRNKICPQRWKLYRTVMILKPGKLPESFRANSWRPLAIMDTAYRIFTTLLNNRLLHWIRNGSLISQNQKAIGVPDGCAEHNATIHIAIDRAKRCKSELHIVWLDITDAFGSLPHDLIWYTLASMGLKSETLDLIKELYMDVKTMFDCQGALSEPVNITKGVKQGCPLSMTLFCLSIDYILKSILNKYPFFLHDLNISVLAYADDLVLLSDSYSGIKKSLESTVNLAAFANLKFKPSKSEYLSFNDINMDINRLYLYNEEIPMISENNKYRYLGVDFSNKRNQDIDGRLDSALALTKSLFGSYLHPSQKLSAYKIFIHSKLIFSLRNCVIGHRILECDRNRVTQGREKQLGFDQKINGPLKTMIGDKFQAMNNNFFYTHCKLGGLGVTAAIDEYLIQSITGITRLFNSSNISFRKMLITELAQSRGNGNFEAGLSWMNCKFNKIFPKSSFFVKFQKSVQSLKRKFCIHVYLKFVDNSFTLEITYKKRISYINHQNLNTLSKELHNFVGLHYAEQWCKMRVQGHIAASIGDSITAKYLIASDTLNDAQYYFLIRARNNLLNLNYGAYRLKYNLNTKCRLCDLDEETQAHVFNHCRAKPNARRVKHENVLLGIVSFLEKIGFEIDVEKSPKYISIPTKLKPDMVIRSKRNKDIHVLDLRVPYDSVEGFEKARENNYVKYKDLSMQIGKAFNQTATISAVVIGCLGTWDKKNNAALSKIGLTKTEIIALAKIACTDAVIACYHIYREHISFTKSIPPV

SEQ ID NO: 25096 - protein, 980 aa, Schmidtea mediterranea
MPVCHEVSLSAFYVCHFIKCLMSDTSITIPDINTMKEAMRPIIRKYNCTKFPESDIRNYRVLIEDLIYQVNLDTITCEEILNEIERINGRLNPKKYFKENKPKSDLIHLQKKKAAELLCVKRLKFQINQKVEIEKIWENSDVDHRPPMAKFLKTFANQDCPISNTSLITLPFYKDEDSDVFTDCKTMSHIMINLDSSAPGMDLITGGDWKKISPKHELITAICNCVLRNRICPQRWKLYRTVMILKPGKLPESFKANSWRPLAIMDTAYRIFTTLLNNRLLHWIRNGSLISQNQKAIGVPDGCAEHNATIHIAIDRAKRCKTELHIVWLDITDAFGSLPHDLIWYTLAGMGLKSETLDLIKELYMDVKTMFDCQGALSEPVNITKGVKQGCPLSMTLFCLSIDYILKSILNNYPFFLHDLNISVLAYADDLVLLSDSYSGIKKSLESTVDLAAFANLKFKPSKSGYLSFNDINMDINKLYLYNEEIPRISENNKYRYLGVDFSNKRNQDIDGRLDSALKLTKSLFGSYLHPSQKLNAYKIFIHSKLIFTLRNCVIGHRILDCDRNRITQGREKQLGFDQKIKGLLKTMIGDKFQAMNNNFFYTHCKLGGLGVTAAIDEYLIQSITGITRLFNSSNIGFRKMLMTELAQSRGSGNFEAGLSWMNCEFNKIFPKSSFFVKFQKSAQSLKRKFCIYVYLKFIDDSFTLEITYKKRISYINHQNLNTLSKELHNFVGLHYAEQWCKKRVQGHIAASIGDSITAKYLIATDTLNDAQYYFLIRARNNLLNLNYGAYRLKYNLNTKCRLCNLDEETQAHVFNHCRAKPNARRVKHENVLQGIVSFLEKIGFEIDVEKSPKYISIPTKLKPDMVIRSRRNKDIHVLDLKVPYDSVEGFEKAREDNYVKYKDLAMQIGKAFNQTATISAVVIGCLGTWDKKNNATLSKIGLTKSEIIALAKIACADAVIACYHIYREHISFTKSVPPV

SEQ ID NO: 25097 - protein, 892 aa, Schmidtea mediterranea
MKEAMRPIIRKYNCAKFPESDIRNYRVFIEDLIYQVNLDTITCEEILNEIERINGRLNPKKYFKENKPKSDLIHLQKKKAAELLCVKRLKFQINQKIEIEKIWENSEVDHRPPMAKFLKTFANQDCPISCTSLITLPFYKDEDSDVFTDCKTMSHIMINLDNSAPGMDLITGGDWKKISPKHELITAICNCVLRNKICPQRWKLYRTVMILKPGKLPESFRANSWRPLAIMDTAYRIFTTLLNNRLLQWIRNGNLISQNQKALGVPDGCAEHNATIHIAIDKAKRCKSELHIVWLDITDAFGSLPHDLIWFTLAGMGLKNETLELIKELYMNVKTMFDCQGALSEPVNITKGVKQGCPLSMTLFCLSIDYILRTILNKCPFYLHDMNVSVLAYADDLVLLSDSYSGIKKSLESTVDLAAFANLKFKPSKSGYLSFNDINMDINRLYLYNEEIPMISENNKYRYLGVDFSNKRNQDIDGRLDSALALTKSLFGSYLHPSQKLSAYKIFIHSKLIFSLRNCVIGHRILDCDRNRVTQGREKQLGFDQKIKGLLKTMIGDKFQAMNNNFFYTHCKLGGLGITAAIDEYLIQSITGITRLFNSTNISFRKMLVSELAQSRGNGNFEAGLSWMNCEFNKIFPKSTFFVKFQKSVQSLKRKFCIYVCLKFVDDGFTLEITYKKRTSYINHQNLNTLSKELHNFVGLHYAEQWCKMRVQGHIAASIGDSITAKYLIASDTLNDAQYYFLVRARNNLLNLNYGAYRLKYNLSTKCRLCNLDEETQAHVFNHCKAKPNARRVKHENVLLGIVSFLEKIGFEIDVEKSPKYVSIPTKLKPDMVIRSKRNKDIHVLDLKVPYDSMEGFEKARKITMLSIKIWLCRLERHLIKQPLYLLWLLDA

SEQ ID NO: 25098 - protein, 833 aa, Schmidtea mediterranea
MAKFLKTFASKDCPMSDTSPIKLPFYRDVDSDAYTDCENLSHIMKNLDSSAPGMDLITGGDWKKISPKHELITAICNCVLRNKISPQRWKLYRTVMILKPGKLSESFKANSWRPLAIMDTAYKIFTTLINNRLLHWIRSGTLISQNQKAIGVPGGCAEHNATLHIAIDRAKRCKTELHIVWLDIADAFGSLPHDLKWYTLAGMGLKNETLTLIKELYKDVRTMFDCQGTLSEPVPITKGVKQGCPLSMTLFCLSIDYILKSILDNHPFLLHNLNISILAYADDLVLLSDSYQGIRKTLENTVKLAGFANLKFKPSKSGYLSINSAGSVNKKLHLYDEEIPTISENNKYRYLGVDFSYKRNQDIDSRLDSALALTKSLFMSYLHPSQKLNAYKTFIHSKLIFSLRNCIIGHRILDCDRNRITQGREKQLGFDQKIKGLLKTMIGDKFQALNNYFLYTHCKMGGLGITATIDEYLIQSITGITRLFHSSNVDFRNMLIAELAHSRGSKNFEAGLKWMNCEISKGFQNTSFFVKFQKSAMALKRKFSICISLKFVEDKFFLEMIYKKRTSYIDHRNLNTLSKELHDFVGLHYAEQWYKMKVQGRIAASIGDSITAKYLIASDTLNDAQYCFLVRARNNILNLNYSAYRLKYNLNTKCRLCHLDEETQTHVFNHCRAKPNARRVKHENVLVSIVAFLEKIGFEIDVEKSPKYISIPTKLKPDMVIRSKRNKDIHVLDLKVPYDSVEGFEKAREDNYMKYKDLSLQIGKAFNQTATISAIVIGCLGTWDKKNNAPLSKIGLTKNEIISLARIACPNAVLEIKLTFSGIRTIGYIANVA

SEQ ID NO: 25099 - protein, 964 aa, Schmidtea mediterranea
MNNEPISIPKIDHMKESMRPVILNHSCSKLPENDARKYRIFVEDLTYQLDLDTTSCEEVLCEVERINGRLKPNKYFKKEKNKTDLIHLKFKKSAELLCVKRMRFQINQKIEINKILINEVITHKPPMNKFLLAFASTECPSSNTSNLILPTNTDNDTNQATDYENMAIIMNSLDNTTRGMDCVTIGDWKAISPKHELLTAICNNILRNGICPKRWKLFRTVLIPKPGKSDESFKTSSWRPLAIMDTAYRVFTTLLNNRILHWIKNGNLISPNQKAIGIPDGCAEHNVTLHIAIDYAKRNKKELHIVWLDITDAFGSLPHDLIWYTLTNMGLKKETISIIKELYKDVETFFDCDGMLSKQIPITKGVKQGCPLSMTLFCLSIDYILKTILETCPFVLHGMNIGILAYADDIVLISDSYQKIELALKETVKLASYANLIFKPAKSGYLLINNVNSDIFKLYLYDEEVPIVLDENKYKYLGIDFSYKQNQNIDERLNSTLSLTSTLFKSYLHPAQKLNAFKTFIHSRLIFIFRNCVIGHRILDCDRNRVTQGRDKQLGFDQKIKRLLKTMIGDKFQAVNNNFIYTHRKLGGLGITSAYDEYLVQSVTGFIRLFNSTNTNFRNMLTSELAAARGGKDLETGIKWINGELNKQFTNSSYFRKFQKSALAIKRKFCVIVKLCHIDDKFTMEISFKGCTYYIDDQNLKTTSKLLHNFVGLHYAEKWCLMKVQGHIATTISDSITAKYLISSDILNDAQYNFLIRARNNLLDLNYNPYRLKNNIGSKCRLCHRDEETQAHVFNHCPAKPNARRIKHENVLNSIVAFLERIGFEIDVEKSPRYLPNPTKLKPDMTIRSKRNKNIHVLDLKVPYDSVEGFDKAREGNYVKYKYLAFEIGEAFNEKATISAIVIGCLGTWDKKNNAPLAKIGLTKPEIQSLARIACSRAVISCYHIFREHVSYNKSSLNLPFSLT

SEQ ID NO: 25100 - protein, 895 aa, Schmidtea mediterranea
MKEAMRPIIRKYNCAKFPESDIRNYRVLIEDLIYQFNLDTITCEEILNEIERINGRLNPKKYFKENRPKSDLIHLQKKKAAELLCVKRLKFQINQKIEIEKIWESSDVDHRPPMAKFLKTFANQDCPVSSTSLIILPFYKDEDSDVFTDCKTLSHIMRNLDSSAPGMDLITGGDWKKISPKHELITAICNCVLRNKICPQRWKLYRTVMILKPGKLSESFRANSWRPLAIMDTAYRIFTTLLNNRLLHWIRNGSLISQNQKAIGVPDGCAEHNATIHIAIDRAKRCKTELHIVWLDITDAFGSLPHDLIWYTLTGMGLKSETLDLLKELYMDVRTMFDCQGTLSEPVNIIKGVKQGCPLSMTLFCLSIDYILKSILSRYPFFLHDLNISVLAYVDDLVLLSDSYSGIKKSLESTVELAAFANLKFKPSKSGYLSFNDINVDINRLYLYNEEIPMISENNKYRYLGVDFSNKRHQDIDGRLDSALSLTKSPFGSYLHPSQKLNAYKIFIHSKLIFSLRNCVIGHRILDCDRNRITQGREKQLGFDQKIKGLLKTIIGDKYEAMNNNFFYTHCKLGGLGVTSAIDEYLIQSITRITKLFNSSIISFRKMLIAELAQSRGNGNFEAGLSWMNCEFNKIFFKSSFFVKFQKSAQSLKRKFCIYVNLKFVEDNFTLEITYKKRISYINNQNLNTLSKELHNFIGLHYAEQWFEMRVQGHIAASIGDSITAKYLIASDTLNDAQYYFLVRARNNLLNLNYGAYRLKYNINTKCRLCHLDEETHAHVFNHCQAKPNARRVKHENVLLGIVSFLKKIGFEIDVEKSPKYVSTPTKLKPDMVIRSKRNRDIHVLDLKVPYDSIEGFEKARENNYVKYKDLAMQIGKAFNQTTTISAVVIGCLGT

SEQ ID NO: 25101 - protein, 946 aa, Schmidtea mediterranea
MKEAMRPIIRKYNCAKFPESDIRNYRVFIEDLIYQVNLDTITCEEILNEIERINGRLNPKKYFKENKPKSDLIHLQKKKAAELLCVKRLKFQINQKIEIEKIWENSEVDHRPPMAKFLKTFANQDCPISCTSLITLPFYKDEDSDVFTDCKTMSHIMINLDNSAPGMDLITGGDWKKISPKHELITAICNCVLRNKICPQRWKLYRTVMILKPGKLPKSFRANSWRPLAIMDTAYRIFTTLLNNRLLQWIRNGNLISQNQKALGVPDGCAEHNATIHIAIDKAKRCKSELHIVWLDITDAFGSLPHDLIWFTLAGMGLKNETLELIKELYMDVKTMFDCQGALSEPVNITKGVKQGCPLSMTLFCLSIDYILRTILNKCPFYLHDMNVSVLAYADDLVLLSDSYSGIKKSLESTVDLAAFANLKFKPSKSGYLSFNDINMDINRLYLYNEEIPMISENNKYRYLGVDFSNKRNQDIDGRLDSALALTKSLFGSYLHPSQKLSAYKIFIHSKLIFSLRNCVIGHRILDCDRNRVTQGREKQLGFDQKIKGLLKTMIGDKFQAMNNNFFYTHCKLGGLGITAAIDEYLIQSITGITRLFNSTNISFRKMLVSELAQSRGNGNFEAGLSWMNCEFNKIFPKSTFFVKFQKSVQSLKRKFCIYVCLKFVDDGFTLEITYKKRTSYINHQNLNTLSKELHNFVGLHYAEQWCKMRVQGHIAASIGDSITAKYLIASDTLNDAQYYFLVRARNNLLNLNYGAYRLKYNLSTKCRLCNLDEETQAHVFNHCKAKPNARRVKHENVLLGIVSFLEKIGFEIDVEKSPKYVSIPTKLKPDMVIRSKRNKDIHVLDLKVPYDSMEGFEKAREDNYVKYKDLAMQIGKAFNQTATISAVVIGCLGTWDKKNNAPLSKIGLTKTEIIALARIACADAVIACYHIYREHISFTKSIPPG

SEQ ID NO: 25102 - protein, 1049 aa, Schmidtea mediterranea
MPIYGKNSSWSFFFLDKRRRMAMIIDPTADDSHALHFDLANDILRTIFNIENIFGRLKFGLTEIEYPICREFGLSSLYVCHFIQCLMLGSAVTIPDISAMRILMRPIINKYNCTKFEDNDARKYRILIDDLVYQLDLDAITCDETLCEIERINGRLNPGRYFKKEKPKSDIIHLRFKKSAELLCVRRLRFQANQGQEIAKIWEDDGIKHTPPINAFLKTFASSECPISDTKSITLPFYSDNESNLTTDNENMSHVMKQLDNTAPGMDLITVADWRVISPKHILITAICNNVLRNGVCPKKWKLFRTVLILKPGKKDESFKTSSWRPLAIMDTAYRIFATLLNNRLLAWIKKGNLISQNQKAIGIPDGCAEHSATLHLAIDHARRRKEELHVVWLDITDAFGSLPHDLIWYTLEGMGMKKETIYLIKELYKDVSTFFDCQGMISESVNITKGVKQGCPLSMTLFCLSIDYILKSVLNDCPFHLHDMNISILAYADDIVLVSDSFKKIEMALGRTVRLASHANLRFKPSKSGYLSINNNNHDIYKLYLYNEEVPIITNENKYKYLGIDFSHKQYQDIDGRLQSALTLTNTLFKSYLHPAQKLNAYKTFIHSKLIFSFRNCIIGHRILDCDRNRITQGREKQLGYDQKVKALLKTMVGDKFHALNNYFLYSHCKLGGLGISSSIDEYLIQSVTGITRLFHSYNTDFREMMKKELAHARGEENFEAALKWINCEIDKPFKNTSFFVKFQKSVYALKRKFEIYIKLKFEDNSFKLEMRYKNRISYIGYRNLGTLSKDLHDFVGLHYAEKWYEMRVQGHIGNAIGDSITAKYLIASDILNDAQYCFLIKARNNLLNLNYNAYRLKFSLDTMCRLCHLDAETQAHVFNHCLAKPNARRIKHENVLISIVAFLEKIGFEIDVEKSPKYISVPTKLKPDMVIRSNRNKEIHVLDLKVPYDSVEGFEKAREDNYVKYKDLAIEIGKAFGEKATISAVVIGCLGTWDKKNNAPLSKIGLSKPEIVSLAKIACSRAVIACYHIYREHISYTKSTMALPFSS

SEQ ID NO: 25103 - protein, 987 aa, Schmidtea mediterranea
MPIYGKNSSWSFFFLDKRRRMAMIIDPTADDSHALHFDLANDILRTIFNIENIFGRLKFGLTEIEYPICREFGLSSLYVCHFIQCLMLGSALTIPDVSAMRILMRPIINKYNCTKFQDNDARKYRILIDDLVYQLDLDAITCDETLCEIERINGRLNPERYFKKERPKSDIIHLRFKKSAELLCVRRLRFQANQRQEIAKIWEDDGIKHTPPINAFLKTFASSECPISDTKSITLPFYSDNESNLTTDNENMSHVMKQLDNTAPGMDLITVADWKIISPKHILITAICNNVLRNGVCPKKWKLFRTVLILKPGKKDESFKTSSWRPLAIMDTAYRIFATLLNNRLLTWIKKGNLISQNQKAIGIPDGCAEHSATLHLAIDHAKRRKKELHIVWLDITDAFGSLPHDLIWYTLEGMGMKKETIYLIKELYRDVSTFFDCQGMISESVNITKGVKQGCPLSMTLFCLSIDYILKSVLNDCPFHLHDMNISILAYADDIVLVSDSFTGIELALRRTVRLASHANLKFKPSKSGYLSINNNNHDICKLYLYNEEVPIISNENKYKYLGIDFSHKQYQDIDGRLQSALALTNTLFKSYLHPAQKLNAYKTFIHSKLIFSFRNCIIGHRILDCDRNRITQGREKQLGYDQKIKALLKTMVGDKFHALNNYFLYTHCKLGGLGISSSIDEYLIQSVTGITRLFHSYNTDFREMMKKELAHARGEENFEAALKWINCEIDKPFKNASFFVKFQKSVYALKRKFEIYIKLKFEENSFKLEMRYKNRISYIGYRNLGTLSKDLHDFVGLHYAEKWYEMRVQGRIGNAIGDSITAKYLIASDILNDAQYCFLVKARNNLLNLNYNAYRLKFSLDTMCRLCHLDAETQAHVFNHCLAKPNARRIKHENVLISIVAFLEKIGFEIDVEKSPKYISVPTKLKPDMVIRSNRNKEIHVLDLKVPYDSVEGFEKAREDNYVKYKDWQLKSVMHSVKRLQYPLW

SEQ ID NO: 25104 - protein, 1049 aa, Schmidtea mediterranea
MPIYGKNSSWSFFFLDKRRRIAMIIDPTADDSHALHFDLANDILRTVLNIENIFGKLKFGLTEIEYPICRELCLSSLYVCHFIQCLILGSAFTIPDVSAMRILMKPIINKYNCTKFLDNDARKYRILIDDLVYQLDLDTITCDETLCEIERINGRLNPEKYFKKEKPKSDIIHLRFKKSAELLCVKRLRFQANQRQEIAKIWEDDGIEHRPPIKAFLKTFASSECPISDTKSITLPFYSDNDSNFTTDNENMSHVMKQLDNTAPGMDLITVADWKIISPKHILITAICNNVLRNGVCPKKWKLFRTVLILKPGKKDESFKTSSWRPLAIMDTAYRIFATLLNNRLLTWIKKGNLISQNQKAIGIPDGCAEHSATLHLAIDHAKRRKKELHIVWLDITDAFGSLPHDLIWYTLEGMGMKMETICLIKELYRDVSTFFDCQGMISESVNITKGVKQGCPLSMTLFCLSIDYILKSVLNDCPFHLHDKNISILAYADDIVLISDSFTKIEMALRKTVRLASHANLRFKPSKSGYLSINNKNPDTCKLYLYNEEVPIISNKNKYKYLGIDFSHKQNQDIDGRLQSALALTDSLFKSYLHPAQKLNAYKTFVHSKLIFSFRNCVIGHRILDCDRNPITQGREKQLGYDQKIKALLKTMVGDKFHALNNYFLYAHCKLGGLGVSSSIDEYLIQSVTGITRLFHSYNTDFREMMIKELAHARGEENFEAALKWINCEIDKPFKNASFFVKFQKSVFALKRKFEIYIKLKFEDNSFKLEMRYKNRISYIGYRNLGTLSKDLHDFVGLHYAEKWYEMRVQGRIGNAIGDSITAKYLIASDILNDAQYCFLVKARNNLLNLNYNAYRLKFSLDTMCRLCHLDAETQAHVFNHCLAKPNARRIKHENVLISIVAFLEKIGFEIDVEKSPKYISVPTKLKPDMVIRSNRNKEIHVLDLKVPYDSVEGFEKAREGNYVKYKDLALEIGNAFGEKATISAVVIGCLGTWDKKNNAPLSKIGLSKPEIVSLARIACSKAVIACYHIYREHISYTKSTMALPFSI

SEQ ID NO: 25105 - protein, 921 aa, Schmidtea mediterranea
MKEAMRPIIRKYNCAKFPESDIRNYRVLIEDLIYQVNLDTITCEIERINGRLNPKKYFKENRPKSDLIHLQKKKAAELLCVKRLKFQINQKIEIEKIWESSDVDHRPPMAKFLKTFANQDCPVSSTSLIILPFYKDEDSDVFTDCKTMSHIMRNLDSSTPGMVLITGGDWKKISPKHELITAICNCVLRNKICPQRWKLYRTVMILKPGKLSESFKANSWRPLAIMDTAYRIFTTLLNNRLLHWIRNGSLISQNQKAIGVPDGCAEHNATIHIAIDRAKRCKTELHIVWLDITDAFGSLPHDLIWYTLAGMGLKSETLDLIKELYMDVKTKFDCQGALSEPVNITEGVKQGCPLSMTLFCLSIDYILKSILSRYPFFLHDLNISVLAYADDLVLLSDSYSGIKKSLESTVELAAFANLKFKPSKSGYLSFNDINVDINRLYLYNEEIPMISENNKYRYLKVDFSNKRNQDIDGRLDSALALTKSLFGSYLHPSQKLNAYKIFIHSKLIFSLRNCVIGHRILDCDRNRVTQGREKQLGFDQKIKGLLKTMIGDKFQAMNNNFFYTHCKLGGLGVTSAIDEYLIQSITGITRLFNSSNISFRKMLIAELAQSRGNGNFEAGLSWMNCEFNKIFFKSSFFVKFQKSAQSLKRKFCIYVNLKFIEDNFTLEITYKKRISYINNQNLNTLSKELHNFIGLHYAEQWCKMRVHGHIAASIGDSITAKYLIASDTLNDAQYYFLVCARNNLLNLKYGPYSLKYNINTKCRLCHLDEETQAHVFNHCQAKPNARRVKHENVLLGTVSFLEKIGFEIRSKRNRDIHVLDLKVPYDSIEGFEKAREDNYVKYKDLAMQIGKAFNQTTTISAVVIGCLGTWDKKNNATLSKIGLTKTEIIALAKIACSDAVIACYHIYREHISFTKKSIPPV

SEQ ID NO: 25106 - protein, 963 aa, Schmidtea mediterranea
MSNIPIDIPDINMKEEMRPIIRKYNCAKFPESDVRSYRILIEDLIYQLNLDTISCEELLNEIERINGRVNPRRYFKDNKPKSDIIHLQKKKAAELLCVKRLKFQINQKIEIEKIWENNEIDHKPAIAKFLKTFASKDCPMSNTSPIKLPFYRDVDSDAYTDCENLSHIMKNLDSSAPGMDLITGGDWKKISPKHELITAICNCVLRNKISPKRWKLYRTVMILKPGKLSESFKANSWRPLAIMDTAYRIFTTLINNRLLHWIRSGTLISQNQKAIGVPDGCAEHNATLHIAIDRAKRCKTELHIVWLDITDAFGSLPHDLIWYTLDGMGLRNETLTLIKELYNDVRTMFDCQGALSEPVPITKGVKQGCPLSMTLFCLSIDYILKSILDNHPFFLHNLNISILAYADDLVLLSDSYQGIRKTLENTVKLAGFANLRFKPSKSGYLSINSASSVNQKLHLYDEEIPTISENNKYKYLGVDFSYKRNQDIDNRLNSALALTKSLFTSYLHPSQKLNAYKTFIHSKLIFSLRNCIIGHRILDCDRNRITQGREKQLGFDQKVKGLLKTMIGDKFQALNNYFLYTHCKMGGLGITATIDEYLIQSITGITRLFHSSNLGFRDMLIAELAHSRGSKSFEAGLKWMNCEISKEFHNTSFFVKFQKSALALKRKFSICISLKFVEDKFSLEMVYKKRTSYIDHRNLNTPSKQLHDFVGLHYAEQWYKMKVQGRIAASIGDSITAKYLIASDTLNDAQYCFLVRARNNILNLNYSAYRLKYNLNTKCRLCHLDEETQTHVFNHCRAKPNARRVKHENVLVSIVAFFEKIGFEIDVEKSPKYVSIPTKLKPNMVIRSKRNKDIHILDLKVPYDSVEGFEKARENNYVKYKDLSLQIGKAFNQTATISAIVIGCLGTWDKKNNAPLSKIGLTKTEIISLAKITCPNAVIACYHIYREHVSYIKEAYPPPFSLV

SEQ ID NO: 25107 - protein, 946 aa, Schmidtea mediterranea
MKEAMRPIIRKYNCAKFPESDIRNYRVLIEDLIYQVNLDTITCEEILNEIERINGRLNPKKYFKENKPKSDLIHLQKKKAAELLCVKRLKFQINQKIEIEKIWENSEVDHRPPMAKFLKTFANQDCPISSTSLITLPFYKDEDSDVFTDCKTMSHIMINLDNSAPGMDLITGGDWKKISPKHELITAICNCVLRNKICPQRWKLYRTVMILKPGKLPESFRANSWRPLAIMDTAYRIFTTLLNNRLLQWIRNGNLISQNQKALGVPDGCAEHNATIHIAIDKAKRCKSELHIVWLDITDAFGSLPHDLIWFTLAGMGLKSETLELIKELYMDVKTMFDCQGALSEPVNITKGVKQGCPLSMTLFCLSIDYILKTILNECPFYLHDMNVSVLAYADDLVLLSDSYSGIKKSLESTVDLAAFANLKFKPSKSGYLSFNDINMDINRLYLYNEEIPMISENNKYRYLGVDFSNKRNQDIDGRLDSALALTKSLFGSYLHPSQKLSAYKIFIHSKLIFSLRNCVIGHRILDCDRNRVTQGREKQLGFDQKIKGLLKTMIGDKFQAMNNNFFYTHCKLGGLGITAAIDEYLIQSITGITRLFNSTNISFRKMLVSELAQSRGNGNFEAGLSWMNCEFNKIFPKSSFFVKFQKSVQSLKRKFCIYVCLKFIDDGFTLEITYKKRTSYINHQNFNTLSKELHNFVGLHYAEQWCKMRVQGHIAASIGDSITAKYLIASDTLNDAQYYFLVRARNNLLNLNYGAYRLKYNLSTKCRLCNLDEETQAHVFNHCKAKPSARRVKHENVLLGIVSFLEKNGFEIDVEKSPKYVSIPTKLKPDMVIRSKRNKDIHVLDLKVPYDSVEGFEKAREDNYVKYKDLAMQIGKAFNQTATISAVVIGCLGTWDKKNNAPLSKIGLTKTEIIALAKVACADAVIACYHIYREHISFTKSIPPV

SEQ ID NO: 25108 - protein, 1016 aa, Schmidtea mediterranea
MHLELATDILKTILNIQNIFGDLNFSLTEMEYPVCHEANLSAFYVCHFLKCLMSDIPIDIPDINTMKEAMRPIIRKYNCAKFPESDVRSYRILIEDLIYQLNLDTISCEELLNEIERINGRINPKRYFKDNKPKSDIIHLQKKKAAELLCVKRLKFQINQKIEIGKIWENNEIDHKPAMAKFLKTFASKDCPMSNTSPIKLPFYRDVDTDTYTDCENLSHIMKNLDSSAPGMDLITGGDWKKISPKHELITAICNCVLRNKISPQRWKLYRTVMILKPGKLSESFKANSWRPLAIMDTAYRIFTTIINNRLLHWIRSGNLISQNQKAIGVPDGCAEHNATLHIAIDRAKRCKTELHVVWLDITDAFGSLPHDLIWYTLAGMGLKNETLTLIKELYKDVRTMFDCQGTMSEPVPITKGVKQGCPLSMKLFCLSIDYILKSILDNHPFLLHNLNISILAYADDLVLLSDSYQGIRKTLENTVKLAGFANLNFKPSKSGYLSINSAGSVNKKLHLYDEEIPTISENNKYRYIVVDFSYKRNQDIDGRLNSALALTRSLFMSYLHPSQKLNAYKTFIHSKLIFSLRNCIIGHRILDCDRNRITQGREKQLGFDQKIKGLLKTMIGDKFQALNNYFLYTHCKMGGLGITATIDEYLIQSISGITRLFHSSNLGFRDMLIAELAHSRGTKNFEAGLKWMNCEISKGFQNTSFFVKFQKSALALKRKFSICISLKFVENKFSIEMIYKKRTSYIDHRNLNTLSKELHDFVGLHYAEQWYKMRVQGRIAASIGDSITAKYLIASDTLNDAQYCFLVRARNNILNLNYNAYRLKYNLNTKCRLCHIDEETQTHVFNHCRDKPYARRVKHKNVLVSIVAFLEKIGFEIDVEKSPKYVSIPTKLKPDMVIRSKQNKDIHVMDLKVPYDSVEDFEKAREDNYVKYKDLSLQIGKAFKQTATISAIVIGCLGTWDKKNNAPLSKIRLTKTEIVSLARIACPNAVIACYHIYREHVSFTKNVIPLPFSLV

SEQ ID NO: 25109 - protein, 946 aa, Schmidtea mediterranea
MKEAMRPIIRKYNCAKFPESDIKNYRVLIEDLIYQVNLDTITCEEILNEIERINGRLNPKKYFKENRPKSDLIHLQKKKAAELLCVKRLKFQINQKIEIEKIWESSEVDHRPPMAKFLKTFANQDCPISSTSLITLPFYKDEDSDVFTDCKTMSHIMMNLDSSVPGMDLITGGDWKKISPKHELITAICNCVLRNKICPQRWKLYRTVMILKPGKLPESFRANSWRPLAIMDTAYRIFTTLLNNRLLHWIRNGSLISQNQKALGVPDGCAEHNATIHIAIDRAKRCKSELHIVWLDITDAFGSLPHDLIWYTLAGMGLKSETLELIKELYMDVKTMFDCQGALSEPVNITKGVKQGCPLSMTLFCLSIDYILKSILNKCPFYLHDLNISVLAYADDLVLLSDSYSGIKKSLESTVDLAAFANLKFKPSKSGYLSFNDINMDINRLYLYNEEIPMISENNKYRYLGVDFSNKRNQDIDGRLDSALALTKSLFGSYLHPSQKLSAYKIFIHSKLIFSLRNCVIGHRILDCDRNRVTQGRKKQLGFDQKIKGLLKTMIGDKFQAMNNNFFYTHCKLGGLGVNAAIDEYLIQSITGITRLFNSSNISFRKMLITELAQSRGNGNFEAGLSWMNCEFNKIFPKSSFFVKFQKSVQSLKRMFCIYVCLKFVDDGFTLEITYKKRISYINHQNLNTLSKELHNFVGLHYAEQWCKMRVQGHIAASIGDSITAKYLIASDTLNDAQYYFLIRARNNLLNLNYGAYCLKYNLNTKCRLCDLDEETQAHVFNHCRAKPNARRVKHENVLLGIVSFLEKIGFEIDVEKSPKYISIPTKLKPDMVIRSKRNKDIHVLDLKVPYDSVEGFEKARENNYVKYKDLSMQIGKAFNQTATISAVVIGCLGTWDKKNNAALSKIGLTKTEIIALAKIACTDAVIACYHIYREHISFTKSIPPV

SEQ ID NO: 25110 - protein, 946 aa, Schmidtea mediterranea
MKEAMRPIIRKYNCTKFPESDIRNYRVLIEDLIYQVNLDTITCEEILNEIERINGRLNPKKYFKENKPKSDLIHLQKKKAAELLCVKRLKFQINQKVEIEKIWESSDVDHRPPMAKFLKTFANQDCPISNTSLITLPFYKDEDSDVFTDCKTMSHIMMNLDSSAPGMDLITGGDWKKISPKHELITAICNCVLRNRICPQRWKLYRTVMILKPGKLPESFRANSWRPLAIMDTAYRIFTTLLNNRLLHWIRNGSLISQNQKAIGVPDGCAEHNATIHIAIDRAKRCKTELHIVWFDITDAFGSLLHDLIWYTLAGMGLKSETLDLIKELYMDMKTMFDCQGALSEPVNITKGVKQGCPLSMTLFCLSIDYILKSILNNYPFFLHDLNISVLAYADDLVLLSDSYSGIKKSLESTVDLAAFANLKFKPSKSGYLSFNDINMDINRLYLYNEEIPMISENNKYRYLGVDFSNKRNQDIDGRLDSALTLTKSLFGSYLHPSQKLNAYKIFIHSKLIFSLRNCVIGHRILDCDRNRITQGREKQLGFDQKIKGLLKTMIGDKFQAMNNNFFYTHCKLGGLGVTAAIDEYLIQSITGITRLFNSSNISFRKMLMTELAQSRGSGNFEAGLSWMNCEFNKIYPKSSFFVKFQKSAQSLKRKFCIYVYLKFIDDSFTLQITYKKRISYINHQNLNTLSKELHNFVGLHYAEQWCKMRVQGHIAASIGDSITAKYLIATDTLNDAQYYFLIRARNNLLNLNYGAYRLKFNLNTKCRLCNLDEETQAHVFNHCRAKPNARRVKHENVLQGIVSFLEKIGFEIDVEKSPKYISIPTKLKPDMVIRSRRNKDIHVLDLKVPYDSVEGFEKAREDNYVKYKDLAMQIGKAFNQTATISAVVIGCLGTWDKKNNATLSKIGLTKSEIIALAKIACADAVIACYHIYREHISFTKSVPPV

SEQ ID NO: 25111 - protein, 987 aa, Schmidtea mediterranea
MEYPICHEANLSAFYVCHFLKCLMSDIPIDIPDINMMKEAMRPIIRKYNCAKFPESDVRSYRILIEDLIYQLNLDTITCEELLNEIERINGRINPKRYFKDNKPKSDIIHLQKKKAAELLCVKRIKFQINQKIEIGKIWENNEIDHKPPMAKFLKTFASKDCPMSNTSPIKLPFYRDVDSDTYTDCENLSHIMKNLDSSAPGMDLITGGDWKKISPKHELITAICNCVLRNKISPQRWKLYRTVMILKPGKLSESFKANSWRPLAIMDTAYRIFTTLINNRLLHWIRSGTLISQNQKAIGVPDGCAEHNATLQIAIDRAKRCKTELHIFWLDITDAFGSLPHDLIWYTLAGMGLRNETLTLIKELYKDVRTIFDCQGTLSEPVPITKGVKQGCPLSMTLFCLSIDYILKSILDNHPFLLHNLNISILAYADDLVLLSDSYQGIRKTLENTVKLAGFANLKFKPSKSGYLSINSASSVNKKLHLYDEEIPTISENNKYRYLGVDFSYKRNQDIDSRLNSALALTKSLFTSYLHPSQKLNAYKTFIHSKLIFSLRNCIIGHRILDCDRNRITQGREKQLGFDQKIKGLLKTMIGDKFQALNNYFLYTHCKMGGLGITATIDEYLIQSITGITRLFHSSNLGFRDMLITELAHSRGSKNFEAGLKWMNCEISKEFHNTSFFVKFQKSALALKRKFSICISLKFVEDKFSLEMVYKKRTSYIDHRNLNTLSKELHDFVGLHYAEQWCKMKVQGRIAASIGDSITAKYLIASDTLNDAQYCFLVRARNNILNLNYSAYRLKYNLNTKCRLCHLDEETQTHVFNHCRAKPNARRVKHENVLVSIVAFLEKIGFEIDVEKSPKYVSIPTKLKPDMVIRSKRNKDIHVLDLKVPYDSVEGFEKARENNYVKYKDLSLQIGKAFNQTATISAIVIGCLGTWDKKNNAPLSKIGLRKTEIISLAKITCPNAVIACYHIYREHVSYTKEAISPPFSLV

SEQ ID NO: 25112 - protein, 1049 aa, Schmidtea mediterranea
MPIYGKNSSWSFFFLDKRRRMAMIIDPTADDSHAMHFDLANDILRTIFNIENIFGRLKFGLTEIEYPICREFGLSSLYVCHFIQCLMLGSAVTIPDISAMRILMRPIINKYNCTKFEDNDARKYRILIDDLVYQLDLDAITCDETLCEIERINGRLNPGRYFKKEKPKSDIIHLRFKKSAELLCVRRLRFQANQGQEIAKIWEDDGIKHTPPINAFLKTFASSECPISDTKSITLPFYSDNESNLTTDNENMSHVMKQLDNTAPGMDLITVADWKIISPKHILITAICNNVLRNGVCPKKWKLFRTVLILKPGKKDESFKTSSWRPLAIMDTAYRIFATLLNNRLLAWIKKGNLISQNQKAIGIPDGCAEHSATLHLAIDHARRRKEELHVVWLDITDAFGSLPHDLIWYTLEGMGMKKETIYLIKELYRDVSTFFDCQGMISESVNITKGVKQGCPLSMTLFCLSIDYILKSVLNDCPFHLHDMNISILAYADDIVLVSDSFKKIEMALGRTVRLASHANLRFKPSKSGYLSINNNNHDIYKLYLYNEEVPIITNENKYKYLGIDFSHKQYQDIDGRLQSALALTNTLFKSYLHPAQKLNAYKTFIHSKLIFSFRNCIIGHRILDCDRNRITQGREKQLGYDQKVKALLKTMVGDKFHALNNYFLYTHCKLGGLGISSSIDEYLIQSVTGITRLFHSYNTDFREMMKKELAHARGEENFEAALKWINCEIDKPFKNTSFFVKFQKSVYALKRKFEIYIKLKFEDNSFKLEMRYKNRISYIGYRNLGTLSKDLHDFVGLHYAEKWYEMRVQGHIGNAIGDSITAKYLIASDILNDAQYCFLIKARNNLLNLNYNAYRLKFSLDTMCRLCHLDAETQAHVFNHCLAKPNARRIKHENVLISIVAFLEKIGFEIDVEKSPKYISVPTKLKPDMVIRSNRNKEIHVLDLKVPYDSVEGFEKAREDNYVKYKDLAIEIGKAFGEKATISAVVIGCLGTWDKKNNAPLSKIGLSKPEIVSLAKIACSRAVIACYHIYREHISYTKSTMALTFSI

SEQ ID NO: 25113 - protein, 1049 aa, Schmidtea mediterranea
MPIYGKNSSWSFFFLDKRRRIAMIIDPTADDSHALHFDLANDILRTVLNIENIFGKSKFGLTEIEYPICRELGLSSLYVCHFIQCLILGSAFTIPDVSAMRILMKPIINKYNCTKFLDNDARKYRILIDDLVYQLDLDTITCDETLCEIERINGRLNPEKYFKKEKPKSDIIHLRFKKSAELLCVKRLRFQANQRQEIAKIWEDDGIEHRPPIKAFLKTFASSECPISDTKSITLPFYSDNDSNFTTDNENMSHVMKQLDNTAPGMDLITVADWKIISPKHILITAICNYVLRNGECPKKWKLFRTVLILKPGKKDESFKTISWRPLAIMDTAYRIFTTLLNNRLLTWIKKGNLISQNQKAIGIPDGCAEHSATLHLAIDHAKRRKKELHIVWLDIADAFGSLPHDLIWYTLEGMGMKMETICLIKELYRDVSTFFDCQGMISESVNITKGVKQGCPLSMTLFCLSIDYILKSVLNDCPFHLHDMNISILAYADDIVLVSDSFTKIEMALKKTVKLASHANLRFKPSKSGYLSINNKNPDTCKLYLYNEEVPIISNKNKYKYLGIDFSHKQNQDIDGRLQSALALTDSLFKSYLHPAQKLNAYKTFVHSKLIFSFRNCVIGHRILDCNRNRITQGREKQLGYDQKIKALLKTMVGDKFHALNNYFLYAHCKLGGLGVSSSIDEYLIQSVTGITRLFHSYNTDFREMMIKELAHARGEENFEAALKWINCEIDKPFKNASLFVKFQKSVFALKRKFEIYIKLKFEDNSFKLEMRYKNRISYIGYRNLGTLSKDLHDFVGLHYAEKWYEMRVQGRIGNAIGDSITAKYLIASDILNDAQYCFLVKARNNLLNLNYNAYRLKFSLDTMCRLCHLDAETQAHVFNHCLAKPNSRRIKHENVLISIVAFLEKIGFEIDVEKSPKYISVPTKLKPDMVIRSNRNKEIHVLDLKVPYDSVEGFEKAREGNYVKYKDLALEIGNAFGEKATISAVVIGCLGTWDKKNNAPLSKIGLSKPEIVSLARIACSKAVIACYHIYREHISYTKSTMALPFSI

SEQ ID NO: 25114 - protein, 1016 aa, Schmidtea mediterranea
MHLELATDILKTILNVQNIFDDLHFSLTEMEYPICHEANLSAFYVCHFLKCLMSDIPINIPDINMMKEAMRPIIRKYNCAKFPESDVRSYRILIEDLIYQLNLDTISCEELLNEIERINGRINPKRYFKDNKPKSDIIHLQKKKAAELLCVKRLKFQINQKIEIGKIWENNEIDHKPAIAKFLKTFASKDCPMSNPSPIKLPFYRDVDSDTYTDCENLSHIMKNLDSSAPGMDLITGGDWKKISPKHELITAICNCILRNKISPQRWKLYRTVMILKPGKLSESFKANSWRPLAIMDTAYRIFTTLINNRLLHWIRSGTLISQNQKAIGVPDGCAEHNATLHIAIDRAKRCKTELHIVWLDITDAFGSLPHDLIWYTLAGMGLRNETLTLIKELYKDVRTMFDCQGTLSEPVPITKGVKQGCPLSMTLFCLSIDYILKSILDNHPFLLHNLNISILAYADDLVLLSDSYQGIMKTLENTVKLAGFANLKFKPSKSGYLSINSASSVNKKLHLYDEEIPTISENNKYRYLGVDFSYKRNQDIDSRLNSALALTKSLFTSYLHPSQKLNAYKTFIHSKLIFSLRNCIIGHRILDCDRNRITQGREKQLGFDQKVKGLLKTMIGDKFQALNNYFLYTHCKMGGLGITATIDEYLIQSITGIRRLFHSSNLGFRDMLIAELAHSRGGKSFEAGLKWMNCEISKEFHNTSFFVKFQKSALALKRKFSICISLKFVEDKFSLEMVYKKRTSYIDHRNLNTLSKQLHDFVGLHYAEQWYKMKVQGRIAASIGDSITAKYLIASDTLNDAQYCFLVRARNNILNLNYSAYRLKYNLNTKCRLCHLDEETQTHVFNHCRAKPNARRVKHENVLVSIVAFLDKIGFEIDVEKSPKYVSIPTKLKPDMVIRSKRNKDIHVLDLKIPYDSVEGFEKARENNYVKYKDLSLQIGKAFNQTATISAIVIGCLGTWDKKNNAPLSKIGLTKTEIISLAKITCPNAVIACYHIYREHVYYTKEAIPPPFSLV

SEQ ID NO: 25115 - protein, 908 aa, Schmidtea mediterranea
MKEAMRPIIRKYNCAKFPESDIRNYRVLIEDLIYQVNLDTITCEEILNEIERINGRLNPKKYFKENKPKSDLIHLQKKKAAELLCVKRLKFQINQKIEIEKIWESSDVDHRSPMAKFLKTFANQDCLISRTSLITLPFYKDEDSDVITDCKTMSHIMMNLDSSAPGMDLITGGDWKKISPKHELITAICNCVLRNKICPQRWKLYRTVIILKPGKLPERFRANSWRPLAIMDTAYRIFTTLLNNRLLHWIRNGSLISQNQKAIGVPDGCAEHNATIHIAIDRAKRCKSELHIVWLDITDAFGSLPHDLIWYTLAGMGLKSETLDLIKELYMDVKTMFDCQGALSEPVNITKGVKQGCPLSMTLFCLSIDYILKSILNKYPFFLHDLNISVLAYADDLVLLSDSYSGIKKSLESTVDLAAFANLKFKPSKSGYLSFNDINMDINRLYLYNEEIPMISENNKYRYLGVDFSNKRNQDIDGRLDSALALTKSLFGSYLHPSQKLSAYKIFIHSKLIFSLRNCVIGHRILDCDRNRITQGREKQLGFDQMIKSLLKTMIGDKFQAMNNNFFYTHCKLGGLGVTAAIDEYMIQSITGITRLFNSSNINFRKMLITELAQSRGNGNLEVGLSWMNCEFNKIFPKSSFFVKFQKSAQSLKRKFCIYVKLKFVDDSFTLKITYKKRTSYINHQNLNTLSKELHNFVGLHYAEQWCKMRVQGHIAASIGDSITAKYLIASDTLNDAQYYFLVRARNNLLNLNYGAYRLKYNLSTKCRLCNLDEETQAHVFNHCRAKPNARRIKHENVLLGIVSFLEKIGFQIDVEKSPKYVAIPTKLKPDMVIRSKRNKDIQVLDLKVPYDSVEGFKKARENNYVKYKDLAMQMERHLIKQPLYLLWLLDAWAHGTKRTMLLSQRLD

SEQ ID NO: 25116 - protein, 1011 aa, Schmidtea mediterranea
MPIYGKNSSWSFFFLDKKRRIAMIIDPTADDSHNLHFDLANDILRTILNIENIFGKLKFGLTEIEYPICRELSLSSMYICHFMQCLMLNSTFTIPNMSTMRILMKPIINKYNCTKFQDNDARKYRILIEDQVYQLDLDTITCDETLCEIERINGRLNPEKYFKKEKPRADIIHLRFKKSAELLCVKRLRFQTNQKQEIAKIWEDDGVEHRPSITAFLKTLASSECPISDTESITLPFYPDTESNSTTDNENMSHIMKQLDNTAPGMDLITITDWKIISPKHVLITAICNNVLRNGVCPKKWKLFRTVLILKPWKMDESFKTSSWRPLAIMDTAYRIFATLLNNRLLTWIKKGNLISQNQKAIGIPDGCAEHSATLHLAIDHAKRGKKELHIVWLDITDAFGSLPHDLIWYTLEGMGMKNETICLIKELYIDVSTFFDCHGMLSGSVNITKGVKQGCPLSMTLFCLSIDYILKSILNDCPFLLHDMNIIILAYADDIVLISDSFMKIERALKETVRLVSYANLKFKPSKSGYLSINNKNPDTCKLYLYNEEVPIICNKNKYKYLGIDFSHKQNQDIDGRLQTALALTESLFKSYLHPAQKLNAYKTFVHSKLIFSFRNCIIGHRILDCDRNRITQGREKQLGFDQKIKALLKTMVGDKFHALNNFFLYTHCKLGGLGISSSIDEYLIQSITGITRLFHSSNTDFRKMMIKELAHARGEENFEAGLKWLNCEINKPFSNTSFFVKFQKSVFALKRKFSIGVKLKFEDDNFKLEMTYKNRISYISNRNLATLSKDLHDFVCLHYAEKWYEMRVQGRIGNAIGDSITAKYLIASDILNDAQYCFLVRARNNLLKLNYSAYRLKFSLDTKFRLCHLDVETQAHVFNHCLAKPNARRVKHENVLISIVAFLEKIGFEIDVEKSPKYISIPTKLKPDMVIRSNRNKDIHVLDLKVPYDSVEGFEKAREDNYVKYKDLALEIRNAFGEKATISAVVIGCLSTWDKKNNAPLSKIGLVET

SEQ ID NO: 25117 - protein, 1016 aa, Schmidtea mediterranea
MHLELATDILKTILNVQNIFDDLHFSLTEMEYPICHEANLSAFYVCHFLKCLMSDIPIGIPDINMMKEAMRPIIRKYNCAKFPESDVRSYRILIEDLIYQLNLDTITCEELLNEIERINERINPKRYFKDNKPKSDIIHLQKKKAAELLCVKRIKFQINQKIEIGKIWENNEIDHKPAMAKFLKKFASKDCPMSNTSPIKLPFYKDVDSDTYTDCENLSHIMKNLDSSAPGMDLITGGDWKKISPKHELITAICNCVLRNKISPQRWKLYRTVMILKPGKLSESFKANSWRPLAIMDTAYRIFTTLINNRLLHWIRSGTLISQNQKAIGVPDRCAEHNATLHIAIDRAKRCKTELHIVWLDITDAFGSLPPDLIWYTLAGMGLRNETLALIKELYKNVRTMFDCQGTLSEPVPITKGVKQECPLSMTLFCLSIDYILKSILDNHPFLLHNLNISILAYADDLVLLSDSYQGIRKTLENTVKLAGFANLKFKPSKSGYLSINSTSSVNKKLHLYDEEIPTISENNKYRYLGVDFSYKRNQDIDSRLNSALALTKSLFTSYLHPSQKLNAYKTFIHSKLIFSLRNCIIGHRILDCDRNRITQGREKQLGFDQKIKGLLKTMIGDKFQALNNYFLYTHCKMRGLGITATIDEYLIQSITGITRLFHSSNLGFRDMLIAELAHSRGSKNFEAGLKWMNCEISKEFHNTSFFVKFQKSALALKRKFSICISLKFVEDKFSLEMVYKKRTSYIDHRNLNTLSKELHDFIGLHYAEQWYKMKVQGRIAASIGDSITAKYLIASDTLNDAQYCFLVRARNNILNLKYSAYRLKYNLNTKCRLCHLDEKTQTHVFNHCRAKPNARRVKHENVLVSIVAFLEKIGFEIDVEKSPKYVSIPTKLKPDMVIRSKRNKDIHILDLKVPYDSVEGFEKARENNYVKYKDLSLQIGKAFNQTATISAIVIGCLGTWDKKNNALLSKIELIKTEITSLAKITCPNAVIACYHIYREHVSYTKEAIPPPFSLV

SEQ ID NO: 25118 - protein, 1049 aa, Schmidtea mediterranea
MPIYGKNSSWSFFFLDKRRRMAMIIDPTADDSHALHFDLANDILRTIFNIENIFGRLKFGLTEIEYPICREFGLSSLYVCHFIQCLMLGSAVTIPDISGMRILMRPIINKYNCTKFEDNDARKYRILIDDLVYQLDLDAITCDETLCEIERINGRLNPGRYFKKEKPKSDIIHLRFKKSAELLCVRRLRFQANQGQEIAKIWEDDGIKHTPPINAFLKTFASSECPISDTKSITLPFYSDNESNLTTDNENMSHVMKQLDNTAPGMDLITVADWKIISPKHILITAICNNVLRNGVCPKKWKLFRTVLILKPGKKDESFKTSSWRPLAIMDTAYRIFATLLNNRLLAWIKKGNLISQNQKAIGIPDGCAEHSATLHLAIDHARRRKEELHVVWLDITDAFGSLPHDLIWYTLEGMGMKKETVYLIKELYRDVSTFFDCQGMISESVNITKGVKQGCPLSMTLFCLSIDYILKSVLNDCPFHLHDMNISILAYADDIVLVSDSFKKIEMALGRTVRLASHANLRFKPSKSGYLSINNNNHDIYKLYLYNEEVPIITNENKYKYLGIDFSHKQYQDIDGRLQSALALTNTLFKSYLHPAQKLNAYKTFIHSKLIFSFRNCIIGHRILDCDRNRITQGREKQLGYDQKVKALLKTMVGDKFHALNNYFLYTHCKLGGLGISSSIDEYLIQSVTGITRLFHSYNTDFREMMKKELAHARGEENFEAALKWINCEIDKPFKNTSFFVKFQKSVFALKRKFEIYIKLKFEDNSFKLEMRYKNRISYIGYRNLGTLSKDLHDFVGLHYAEKWYEMRVQGHIGNAIGDSITAKYLIASDILNDAQYCFLIKARNNLLNLNYNAYRLKFSLDTMCRLCHLDAETQAHVFNHCLAKPNARRIKHENVLISIVAFLEKIGFEIDVEKSPKYISVPTKLKPDMVIRSNRNKEIHVLDLKVPYDSVEGFEKAREDNYVKYKDLAIEIGKAFGEKATISAVVIGCLGTWDKKNNAPLSKIGLSKPEIVSLARIACSRAVIACYHIYREHISYTKSTMALPFSI

SEQ ID NO: 25119 - protein, 959 aa, Schmidtea mediterranea
MSDTSITIPDINTMKEAMRPIIRKYNCTKFPESDIRNYRVLIEDLIYQINLDTITCEEILNEIERINGRLNPKNYFKENKPKSDLIHLQKKKAAELLCVKRLKFQINQKVEIEKIWENSDVDHRPPMAKFLKTFANQDCPISNTSFITLPFYKDEDSDVFTDCKTMSHIMMNLDSSAPGMDLITGGDWKKISPKHELITAICNCVLRNRICPQRWKLYRTVMILKPGKLPESFRANSWRPLAIMDTAYRIFTTLLNNRLLHWIRNGSLISQNQKAIGVPDGCAEHNATIHIAIDRAKRCKTELHIIWLDITDAFGSLPHDLIWYTLAGMGLKNETLDLIKELYMDVKTMFDCQGALSEPVNITKGVKQGCPLSMTLFCLSIDYILKSILNNYPFFLHDLNISVLAYADDLVLLSDSYSGIKKSLESTVDLAAFANLKFKPSKSGYLSFNDINMDINRLYLYNEEIPRISENNKYRYLGVDFSNKRNQDIDGRLDSALTLTKSLFGSYLHPSQKLNAYKIFIHSKLIFSLRNCVIGHRILDCDRNRVTQGREKQLGFDQKIKGLLKTMIGDKFQAMNNNFFYTHCKLGGLGVTAAIDEYLIQSITGITRLFNSSNIGFRKMLMTELAQSRGSGNFEAGLSWMNCEFNKIFPKSSFFVKFQKSAQSLKRKFCIYVYLKFIDDSFTLEITYKKRISYINHQNLNTLSKELHNFVGLHYAEQWCKKKVQGHIAASIGDSITAKYLIATDTLNDAQYYFLIRARNNLLNLNYGAYRLKYNLNTKCRLCNLDEETQAHVFNHCRAKPNARRVKHENVLQGIVSFLKKIGFEIDVEKSPKYISIPTKLKPDMVIRSTRNKDIHVLDLKVPYDSVEGFEKAREDNYVKYKDLAMQIGKAFNQTSTISAVVIGCLGTWDKKNNATLSKIGLTKSEIIALAKIACADAVIACYHIYREHISFTKSVPPV

SEQ ID NO: 25120 - protein, 1016 aa, Schmidtea mediterranea
MHFELATDILETILNVQNIFGDLNFSLTEMEYPVCHEANLSAFYICHFLKCLMSDIPIGIPDINTMKEAMRPIIRKYNCTKFPESDIRSYRILLEDLIYQLNLDTISCEELLNEIERINGRINPKRYFKDNKPKSDIIHLQKKKAAELLCVKRLKFQINQKIEIGKIWENNEIDHKPAIAKFLKTFASKDCPVSNTSSIKLPFYNDVDTDSYTDCENLSHIMKNLDSYAPGMDLITGGDWKKISPKHELITAICNCVLRNKISPQRWKLYRTVMILKPGKLSESFKANSWRPLAIMDTAYRIFTTLINNRLLQWIKNGSLISQNQKAIGVPDGCAEHNATLHIAIDRAKRCKTELHVVWLDITDAFGSLPHDLIWYTLAGMGLKNETLTLIKELYKDVRTMFDCQGTMSEPVPITKGVKQGCPLSMTLFCLSIDYILKSILDNHPFLLHNLNISILAYADDLVLLSDSYPRIRKTLENTVKLAGLANLKFKPSKSGYLTINNAGSDTKKLHLYDEEIPTISENNKYRYLGVDFSYKRNQDIDGRLDSALALTRSLFMSYLHPSQKLNAYKTFIHSKLIFSLRNCIIGHRILDCDRNRVTQGREKQLGFDQKIKGLLKTMIGDKFQALNNYFLYTHCKIGGLVITATIDEYLIQSITGITRLFHSSNLGFRDMLIAELAHSRGSKNFEAGLKWMNCEISKEFHNTSFFVKFQKSALALKRKFSICISLKFAEDKFSLEMIYKKRTSYIDHRNLNTLSKELYVFVGLHYAEQWYKMRVQGRIAASIGDSITAKYLIASDTFNDAQYCFLVRARNNILNLNYSAYRLKYNLNTKCRLCHLDEETQTHVFNHCRAKPNVRRVKHENVLVCIVAFLEKIGFEIDVEKTPKYVSIPTKLKPDMVIRSKRNKDIHVLDLKVPYDSVEGFEKAREGNYVKYKGLSLQIGKAFNQTATISAIVIGCLGTWDKKNNAPLSKIGLTKTEIISLAKIACPNAVIACYHIYREHISFTKNVIPLPFSLV

SEQ ID NO: 25121 - protein, 1049 aa, Schmidtea mediterranea
MPIYGKNSSWSFFFLDKRRRMAMIIDPTADDSHALHFDLANDILRTILNIENIFGKLKFGLTEIEYPICREFGLSSLYVCHFIQCLILGSAFTIPDVSAMRILLKPVINTYNCTKFLDNDARKYKILIDDLVYQLDLDTITCDETLCEIERINGRLNPEKYFKKEKPKSDIIHLRFKKSAELLCVKRLRFQANQRQEIAKIWENDGIEHTPPIKAFLKTFASSECPISDTKSITLPFFSDNESNLTTDNENMSHVMKQLDNTAPGMDLITVADWKIISPKHILITAICNNMLRNRVCPNKWKLFRTVLILKPGKKDESFKTSSWRPLAIMDTAYRIFATLLNNRLLTWIKKGNLISQNQKAIGIPDGCAEHSATLHLAIDHAKRRKKELHIVWLDITDAFGSLPHDLIWYTLEGMGMKKETIYLIKELYRDVRTFFDCQGMISESVNITKGVKQGCPLSMTLFCLSIDYILKSVLNDCPFHLHDMNISILAYADDIVLVSDSFTGIERALRRTVNLASHANLRFKPSKSGYLSINNKNSDIYKLYLYNEEVPIISNENKYKYLGIDFSHKQNQDIDGRLQSALALTDTLFKSYLHPAQKLNAYKTFIHSKLIFSFRNCIIGHRILDCDRNRITQGREKQLGYDQKIKALLKTMVGDKFHALNNYFLYTHCKLGGLGISSSIDEYLIQSVTGITRLFHSYNTDFREMMKKELAHARGEENFEAALKWINCEIDKPFKNASFFVKFQKSVFALKRKFEIYIKLKFEDNSFKLEMKYKNRISYIGYRNLGTLSKDLHDFVGLHYAEKWYEMRVQGRIGNAIGDSITAKYLIASDILNDAQYCFLVKARNNLLNLNYNAYRLKFSLDTMCRLCHLDAETQAHVFNHCLAKPNARRIKHENFLISIVAFLEKIGFEIDVEKSPKYISVPTKLKPDMVIRSNRNKEIHVLDLKVPYDSVEGFEKAREDNYAKYKDLAIEIGNAFGEKATISAVVIGCLGTWDKKNNAPLSKIGLSKPEIVSLARIACSKAVIACYHIYREHISYAKSTMALPFSI

SEQ ID NO: 25122 - protein, 1016 aa, Schmidtea mediterranea
MHFELATDILKTILNVNNIFDDLHFSLAEMEYPICHEANLSAFYLCHFLKCLMSDIPIDIPDINMMKEEMRPIIRKYNCAKFPESDVRSYRILIEDLIYQLNLDTISCEELLNEIERINGRINPKRYFKDNKPKSDIIHLQKKKAAELLCVKRLKFQINQKIEIEKIWENNEIDHKPAIDKFLKTFASKDCPMSNTSPIKLPFYGDVDSDTYTDCENLSHIMKNLDSSATGMDLITGGDWKKISPKHELITAICNCVLRNKISPKRWKLYRTVMILKPGKLSESFKANSWRPLAIMDTAYRIFTTLINNRLLHWIRSGTLISQNQKAIGVPDGCAEHNATLHIAIDRAKRCKTELHIVWLDITDAFGSLPHDLIWYTLAGMGLRNETLTLIKELYKDVRTIFDCQGALSEPVPITKGVKQGCPLSMTLFCLSIDYILKSILDNHPFFLHNLNISILAYADDLVLLSDSYQGIRKTLENTVKLAGLANLRFKPSKSGYLSINSASSVNQKLHLYDEEIPTISENNKYKYLGVDFSYKRNQDIDSRLNSALALTKSLFTSYLHPSQKLNAYKTFIHSKLIFSLRNSIIGHRILDCDRNRITQGREKQLGFDQKVKGLLKTMIGDKFQALNNYFLYTHCKMGGLGITATIDEYLIQSITGITRLFHSSNLGFRDMLIAELAHSRGSKSFEAGLKWMNCEISKEFHNTSFFVKFQKSALALKRKFSICISLKFVEDKFSLEMVYKERTSYIDHRNINTLSKQLHDFVGLHYAEQWYKMKVQGRIAASIGDSITAKYLIASDTLNDAQYCFLVRARNNILNLNYSAYRLKYNLNTKCRLCHLDEETQTHVFNHCRAKPNARRVKHENVLVSIVAFLEKIGFEIDVEKSPKYVSIPTKLKPNMVIRSKRNKDIHILDLKVPYDSVEGFEKARENNYVKYKDLSLQIGKAFNQTATISAIVIGCLGTWDKKNNAPLSKIGLTKTEIISLAKITCPNAVIACYHIYREHVSYIKEAFPPPFSLV

SEQ ID NO: 25123 - protein, 1050 aa, Schmidtea mediterranea
MPIYGKNSSWSFFFFDKKRRIAMIIDPTADDSHNQHFDLANDILRTILNIENIFGKLKFGLTEIEYLICRELSLSSMYICHFMQCLMLNSTFTIPNVSDMRMLMRPVINKYNCTKFQDNDARKYKILIEDQVYQLDLDTITCDETLCEIERINGRLNPDKYFKKEKPRSDIIHLRLKKSAELLCVKRLRFQTNQKQEIAKIWEDDSVEHRPSITAFLKTFASSECPISNTASITLPFYPDTESNSTTDNENMSHIMKQLDNTAPGMDLITITDWKIISPKHVLITAICNNVLRNGVCPKKWKLFRTVLILKPGKKDESFKTSSWRPLAIMDTAYRIFATLLNNRLLTWIKKGNLISQNQKAIGIPDGCAEHSATLHIAIDHAKRGKKELHIVWLDITDAFGSLPHDLIWYTLQGMGMKKETICLIKELYSDVSTFFDCQGILSGSVNITKGVKQGCPLSMTLFCLSIDYILKSILNDCPFLLHDMNISILAYADDIVLISDSFMKIDRALKETVRLASYANLKFKPSKSGYLSINNKNPDTCKLYLYGEEVPIISNENKYKYLGIDFSHKQNQDIDGRLQAALELTDCLFKSYLHPAQKLNVYKTFVHSKLIFSFRNCKIGHRILDCDRNRITQGREKQLGFDQKIKALLKTMVGDKFHALNNFFLYAHCKLGGLGISSSIDEYLIQSITGITRLFHSSNADFRKMMIKELAHARGEDNFEAGLKWLNCEINKPFSNTSFFVKFQKSVFALKRKFSIGVKLKFEDDNFKLEMTHKNRISYISYRNLGTLSKDLHDFVGLHYAEKWYEMRVHGRIGNAIGDSITAKYLIASDILNDAQYCFLVRARNNLLNLNYSAYRLKFSLDTKCRLCHLDVETQAHVFNHCLAKPNARRVKHENVLISIVGFLEKIGFEIDVEKSPKYISIPTKLKPDMVIRSNRNKEIHVLDLKVPYDSVEGFEKAREDNYVKYKDLALEIGNAFGEKATISAVVIGCLGTWDKKNNAPLSKIGLSKPEIVSLARIACSKAVIACYHIYREHISYTKSAMALPFSIV

SEQ ID NO: 25124 - protein, 946 aa, Schmidtea mediterranea
MKEAMRPIIRKYNCAKFPESDIRNYRVLIEDLIYQVNLDTITCEEILNEIERINGRLNPKKYFKENRPKSDLIHLQKKKAAELLCVKRLKFQINQKIEIEKIWESSDVDHRPPMAKFLKTFANQDCPVSSTSLIILPFYKDEDSDVFTDCKTMSHIMRNLDSSAPGMDLITGGDWKKISPKHELITAICNCVLRNKICPQRWKLYRTVMILKPGKLSESFRANSWRPLAIMDTAYRIFTTLLNNRLLHWIRNGSLISQNQKAIGVPDGCAEHNATIHIAIDRAKRCKTELHIVWLDITDAFGSLPHDLIWYTLAGMGLKSETLDLIKELYMDVKTMFDCQGALSEPVNITKGVKQGCPLSMTLFCLSIDYILKSILSRYPFFLHDLNISVLAYADDLVLLSDSYSGIKKSLESTVELAAFANLKFKPSKSGYLSFNDINVDINRLHLYNEVIPMISENNKYIYLGVDFSNKRNQDIDGRLYSALALTKSLFGSYLHPSQKLNAYKIFIHSKLIFSLRNCVIGHRILDCDRNRVTQGREKQLGFDQKIKGLLKTMIGDKFQAMNNNFFYTHCKLGGLGVTSAIDEFLIQSITGITRLFNSSNISFRKMLIAELAQSRGNGNFEAGLSWMNCEFNKIFLKSSFFVKFQKSAQSFKRKFCIYVNLKFIEDNLTLEITYKKRISYINNQNLNTLSKELHNFIGLHYAEQWCKMRVQGHIAASIGDSITAKYLIASDTLNDAQYYFLVRARNNLLNLNYGPYRLKYNINTKCRLCHLDEETQAHVFNHCQAKPNARRVKHENVLLGIVSFLEKIGFEIDVEKSPKYVSIPTKLKPDMVIRSKRNRDIHVLDLKVPYDSIEGFEKAREDNYVKYKDLAMQIGKAFNQTTTISAVVIGCLGTWDKKNNATLSKIGLTKTEIIALAKIACSDAVIACYHIYREHISFTKSIPPV

SEQ ID NO: 25125 - protein, 983 aa, Schmidtea mediterranea
MIFIQKDQDLWSMSTHALRINGGKHGDASRRRINTMKEAMRPIIRKYNCAKFPESDVRSYRILIEDLIYQLNLDTISCEELLNEIERINGRINPKRYFKDNKPKSDIINLQKKKAAELLCVKRLKFQINQKIEIGKIWENNEIDHKPAMAKFFKTFTSKDCPMSNTSPIKLPFYRDVDSDTYTDCENLSHIMKNLDSSAPGMYLITGGGWKKISPKHELITAICNCVLRNKISPQRWKLYRTVMILKPGKLFESFKANSWRPLAIMGTAYRIFTTLINNRLLHWIRSGTLISQNQKAIGVPDGCAEHNATLHIEIDRAKRCKTELHIVWLDITDAFGSLPHDLIWYTLAGMGLKNETLTLIKELYKDVRTMFDCQGTLSEPVPITKGVKQGCPLSMTLFCLSIDYILKSILDNHPFLLHNLNISILAYADDLVLLSDSYQGIRKTLENTVKLAGFANLKFKPSKSGYLSINSAGSVNKKLHLYDEEIPTISENNKYRYLGVDFSYKRNQDIDSRLDSALALTKSLFMSYLHPSQKLNAYKTFIHSKLIFSLRNCIIGHRILDCDRNRITQGREKQLGFDQKIKGLLKTMIGDKFQALNNYFLYTHCKMGGLGITATIDEYLIQSITGITRLFHSSNLGFRDMLIAELAHSKSFEAGLKWMNCEISKEFHNTSFFVKFQKSALALKRKFSICISLKFAEDKFSLEMVYKKRTSYIDHRNLNTLSKELHDFVGLHYAEQWYKMKVQGRIAASIGDSITAKYLIASDTLNDAQYCFLVRARNNILNLNYSAYRLKYNLNTKCRLCHLDEETQTHVFNHCRAKRNARRVKHENVLVSIVAFLEKIGFEIDVEKSPKYVSIPTKLKPDMVIRSKQNKDIHVLDLKVPYDSVEGFEKAREDNYVKYKDLSLQIGKAFNQTATISAIVIGCLGTYDKKNNAPLSKIGLTKTEIIFLAKIACPNAVIACYHIYREHVSFTKNVIPPPFSLV

SEQ ID NO: 25126 - protein, 889 aa, Schmidtea mediterranea
MHLELATDILKTILNVQNIFDDLHFSLTEMEYPICHEANLSAFYVCHFLKCLMSDVPIDIPDINMMKEAMRPIIRKYNCAKFPESDVRSYRILIEDLIYQLNLDTISCEELLNEIERINGRINPKRYFKDNKPKSDIIHLQKKKAAELLCVKRLKFQIYQKIEIGKIWENNEIDHKPAMAKFLKTFASKDCPMSNTSPIKLPFYRNVDSDTYTDCENLSHIMKNLDSSAPGMDLITGGDWKKISPKHELITAICNCILRNKISPQRWKLYRTVMILKPGKLSESFKANSWRPLAIMDTSYRIFTTLINNRLLHWIRSGTLISQNQKAIGVPDGCAEHNATLHIAIDRAKRCKTELHIVWLDITDAFGSLPHDLIWYTLADMGLRNETLTLIKELYKDVRTMFDCQGTLSEPVPITKGVKQGCPLSMTLFCLSIDYILKSILDNHAFSYTYADDLVLLSDSYQGIRKTLENTVKLAGFANLKFKLSKSGYLSINSASSVNKKLHLYDEEIPTISENNKYRYLGVDFSYKRNQDIDSRLNSALALTKSLFTSYLDPSQKLIAYKTFIHFKLIFSLRNCIIGHRILDCDRNRITQGREKQLGFDQKIKGLLKTMIGDKFQALNNYFLYTHCKMGGLGITATIDEYLIQSITGITRLFHSSNLGFRDMLIAELAHSRGSKSFEAGLKWMNCEISKEFHNTSFFVKFQKSALALKRKFSICISLKFVEDKFSLEMVYKKRTSYIDHRNLNTLSKELHDFVGLHYAEQWCRMKVQGRIAASIGDSITAKYLIASDTLNDAQYCFLVRARNNILNLNYSAYRLKYNLNTKCRLCHLDEETQTHVFNHCRAKPNARRVKHENVLVSIVAFLEKIGFEIDVENPPNMSQFQQSLNLTW

SEQ ID NO: 25127 - protein, 944 aa, Schmidtea mediterranea
MKEAMRPIIRKYNCTKFPESDIRNYRVLIEDLIYQVNLDTITCEEILNEIERINGRLNPKKYFKENKPKSDLIHLQKKKAAELLCVKRLKFQINQKVEIEKIWESSDVDHRPPMAKFLKTFANQDCPISNTSLITLPFYKDEDSDVFTDCKTMSHIMMNLDSTAPGMDLITGGDWKKISPKHELITAICNCVLRNRICPQRWKLYRTVMILKPGKLPESFRANSWRPLAIMDTAYRIFTTLLNNRLLHWIRNGSLISQNQKAIGVPDGCAEHNATIHIAIDRAKRCKTELHIVWLDITNAFGSLPHDLIWYTLAGMGLKSETLDLIKELYMDVKTMFDCQGALSEPVNITKGVKQGCPLSMTLFCLSIDYILKSILNNYPFSLHDLNISVLAYADDLVLLSDSYSGIKKSLESTVDLAAFANLKFKPSKSGYLSFNDINMDINRLYLYNEEIPMISENNKYRYLGVDFSNKRNQDIDGRLDSAPTLTKSLFGSYLHPSQKLNAYKIFIHSKLIFSLRVIGHRILDCDRNRITQGREKQFGFDQKIKGLLKTMIGDKFQAMNNNFFYTHCKLGGLGVTAAIDEYLIQSITGITRLFNSSNISFRKMLMTELAQSRGSGNFEAGLSWMNCEFNKIYPKSSFFVKFQKSAQSLKRKFCIYVYLKFIDDSFTLEITYKKRISYINHQNLNTLSKELHNFVGLHYAEQWCKKRVQGHIAASIGDSITAKYLIATDTLNDAQYYFLIRARNNLLNLNYGAYRLKYNLNTKCRLCNLDEETQAHVFNHCRAKPNARRVKHENVLQGIVSFLEKIGFEIDVEKSPKYISIPTNLKPDMVIRSRRNKDIHVLDLKVPYDSVEGFEKAREDNYVKYKDLAMQIGKAFNQTATISAVVIGCLGTWDKKNNATLSKIGLTKSEIIALAKIACADAVIACYHIYREHISFTKSVPPV

SEQ ID NO: 25128 - protein, 941 aa, Schmidtea mediterranea
MKEAMRPIIRKYNCAKFPESDIRNYRVLIEDLIYQVNLDTITCEEILNEIERINGRLNPKKYFKENRPKSDLIHLQKKKAAELLCVKRLKFQINQKIEIEKIWESSDVDHRPPMAKFLKTFANQDCPVSSTSLIILPFYKDEDSDVFTDCKTMSHIMRNLDSSAPGMDLITGGDWKKISPKHELITAICNCILRNKICPQRWKLYRTVMILKPGKLSESFRANSWRPLAIMDTAYRIFTTLLNNRLLYWIRNGSLISQNQKAIGVPDGYAEHNATIHIAIDRAKRCKTELHIVWLDITDAFGSLPHDLIWYILAGMGLKSETVDLIKELYMDVKTMFDCQGALSEPVNITKGVKQGCPLSMTLFCLSIDYILKSILSRYPFFLHDLNISVLAYADDLVLLSDSYSGIKKSLESTVELAAFANLKFKSSKSGYLSFNDINVDINRLYLYNEEIPMISENNKYRYLGVDFSNKRNQDIDGRLDSALALTKSLFGSYLHPSQKLNAYKIFIHSKLIFSLRNCVIGHRILDCDQNRITQGREKQLGFDQKIKGLLKTMIGDKFQAMNNNCKLGGLGVTSAIDEYLIQSITGITRLFNSSNISFQKMLIAELAQSRGNGNFEAGLSWMNCEFNKIFPKSSFFVKFQKSVQSLKRKFCIYVKLKFIEDNFTLEITYKKRISYINNQNLNTLSKELHNFIGLHYAEQWCKMRVQGHIAASIGDSITAKYLIANDTLNDAQYYFLVRAKNNLLNLNYGAYRLKYNINTKCRLCNLDEETQAHVFNHCQAKPNARRVKHENVLLGIVSFLEKIGFEIDVEKSPKYVSIPTKLKPDMVIKSKGNRDIHVLDLKVPYDSIEGFEKARENNYVKYKDLAMQIGKAFNQTTTISAVVIGCLGTWDKKNNATLSKIGLTKTEIIALAKIACSDAVIACYHIYREHISFTKSIPPV

SEQ ID NO: 25129 - protein, 1313 aa, Plectus sambesii
MSHVTIDVPLAPPHSCRLCMPIPRSYLSHNDLAKHLKLFHAGNSLNFRCSMCLVIFSHLKAANTHIKNNTQCSTALAARPIAEPPAPRRIQRIPFGPRRLQRTTANNAHIDDDSVDVNNTADDEGDASFMLPQSPQSSSSPGSSPGLSTSSASSATAISGTSIAIGISPIIICSVNSATGIAISSSTSPIIAPSINCNVSSASGIAASSSSSSIIVPSVNCNISTVTSITSSTASSTAISPSASRTISRSPSYIADANTDSATEIITSSSSGPSSTTAAATARHSAATRATTVLTTTTARATTTRTTTTRATATTSTSARPRALTVPSTAAPATIRPLHSDSTAIPPLSSTRSNTTLESNRGRGYRPAAEPPPTTTRRHAPHPPDRAIVTASASAKQAAWATRFDAAANPTQLDATLAALIDEVHATEMTPVPRPPPGRDVAGPARQHHHRHSGPQHSAADAARIQRLYRINRPQAFRAVTCPPSPFCQIDRRKVHAHYLRVFGQSADTDMAMPPEVPPLPPPNSNDPLGTNFTTQEVWNRLQKCANTAPGPDGIRYSAWRLFDPGCYALTAVFNACHRLHHTPASWKNSTTILIHKNGDPDDISNWRPISLSDTAGKLYSACLAARLTKWCLENNRISTCQKGFLPYEGCVEHNFTLQTIIQDARRRRQRATIAWLDLRNAFGSVPHKTIFACLAWAGLSSTAINIIQRLYDGCSTRIRSAPGLTDSIPIKAGVKQGCPLSPIIFNLAVEPILRALANTNHGYMVQGLSTPVLAYADDLVLTSDSIHGLQCLLDITAKIATWAGLQFNAAKCASLHIEGSQHASLRTNFHIQDQAMKSLAITEFYKHLGVPTGFSTHHSGEQTIRSMAADIQKIDKSLLAPWQKFDAVNTFVLSRIAFSLKAGSVPKRPLTALDKQLKAAGKRWLSLPQRASAEPLYLPYRHGGMNLLPLSHLADIAQMVHALRLLTSNDPSTCKLASDALTTVVHKKIRRHPDPADSAAFLNGATDGIFCSESGDISSTWTRLRTATRRLCKKINLEWKCSNNSFDLLLDGHPVNRHSAESALRSALRAYYLHKLIAKPDQGKVFEVTAMTSAANHFMRAGNYTRFAEWRFVHRARLDVVALNGCRRFGPPGEKSCRRCNAANETLPHVLNHCPPNFTAITKRHNAILDRLTKAMRRPEAGSVLINQQLPGYDGRERPDIIILDDAKKTAFVADVTVAFENRQAAFSMARTEKHRKYEALAQHLRSQGYETAVDAFVIGSLGGYDSANAPTLNQLGIGHRYSILMKRLMVSDTIRWSRNIYVEHVSGRRQY

SEQ ID NO: 25130 - protein, 1624 aa, Plectus sambesii
MSFVSLDVLLAPPYHCELCLPVPRQYSVHSSLAKHLKYHHVGVSLNFRCYGCREEFDDIRRCKTHIRDNAQCSTVIDAQPVQPQTTHRIRRILYGPRRARRISSTDTTESSSHAADSPAARRSRSAGNVNVLASPSAVGPSIDAATSPASISTYSSTAAASPTATSTHASFAGADTGPTYADIAATRHTSVILRSASTRANSAASSTAVATAAAYSGAAARPTAAAEYSATAAAAHSGAAASPTVAAGAHLDTAASPTVAAEYSATAAVAHPAIAASSTVAAEYSATAAAAHPAIAASSTAAAESSAAAYSGAAATPTAATSPTATRTYASVAATPPACSTRASTAATRRHTPRSITTHVDTISAATTNTAVTGRARRSSRIPRPPAARASSDSNASWRHTSVTTASTTASYASSRYTRTASTAIAAATTAAASIAAAAPLAAASTAAALTASASATAAPTTAASTTAASAAVASTTATSSSAAAAASTVAAPIAAAAITAAAAPIAAAASTAATTAAAAPSAAAVSTAASYAPPRYTRTTAARTHAAPIAVAATTAAAAPSAAAVSTAASYAPPRYTRTTAARTHAAPIAVAATTAAAAPSAAATSTAVAPIAAAVPSAAASTAAASTAAAPIASAPIAAAALTAAAPIAAALTTAAARRPAPTTRIRPNTAPQPPTARPQATRGTARPRPPGRTIIATTASPTQAAWIARFATTADAAQLDAALAALISEVLATQPEPARRPSPRRDAADPARQRRRRRSGPQYDAADAARIQRLYRANRPRAFREITTPPSPYCQLSKEQVQAHFADVLKRRTQTDTPMPPAVPQLPPPSPEDQDPLSDEFTPSEVWGRLCRCPNTAPGPDTLRYNTWKAFDPRAYVLSAVFNTVRRLQHVPAAWKQSTTILLHKKGEQDDIGNWRPIALSDTVGKLYASCLASRLTNWCLRHERISPTQKGFMPYEGCLEHSFTLQSIIQDARRRRQHTALAWLDLRNAFGSVPHDTIFKCLAWAGLNTTSIDIIRRLYDGCSTAVRVTEGLTEKIRIGAGVKQGCPLSPIVFNIAIEPILRAINAASHGYNIQGQKIAVLAYADDLVLTTDSAADLQSALNITTTIASWAGLTFNARKCASLHIDGKRHTALSTRFTIQDEPMAALAADGLYEHLGVPTGYAIHRSAADTLKTMTADVNKIDASLLAPWQKFDAVNTFVLSRLSYHLKAGSVPKKSLDVLDKTIKAVGKKWLNLPQRAGAEPLYLSYKQGGVNLLPTNMLADVAQLAHALRLLTSNDPAIEQLALATLKAVVKKKIRREVEEGDVSEYLNGSTSGVFCVETSDTTSMWTRLRSATRRLRSKIDVCWQHSDGSINLLLDGAVVSRGQVESRLRDAVRAHYLHRLLAKPDQGKVYDVTSTTTAANHFMRAGNYTRFAEWRFIHRARLDVLPLNGARRFGPPGVKNCRRCNAVNETLPHVLNHCPPHLTAITKRHNAILDRLTKAMRRPEAGSVLINQQLPGYDGRERPDIIVLDDAKKTAFIADVTVAFENRQAAFSMARAEKHRKYEALAQHLRNQGYETAVDAFVIGSLGGYDPANAPTLNQLGIGHRYSILMKRLMVSDTIRWSRDIYVEHVCGQRQY

SEQ ID NO: 25131 - protein, 1030 aa, Harmonia axyridis
MRTHRTPVAAPGPSGQGPSRAVAIKTASTGFVCNICALPREFSTKIGLGVHRQHAHTDIVNEGIITERRNRGYSAEEMRLAAAEEAHVVKHGHDRNGHAVRFINVFLSQLFPQRNIDSIKNMRTPAYRAYLEEAISVLPSAGSPPSHTTVEVREQPPLVNTPVADPFLLAAKELALKVLQSDYQGSSLMAALVEHIESGQNPSDFIVAALKAMIPSYGKTKGRYKRSKPAVAPSNRDSRRRREFALTQSLFKKNMSRTAKQILDGGGVTATPPLEQLVSHWEPVLTVLSTPVHQPPSLPQDRQKSATIYPITEDEVNRIKIPYCSAPGLDGITFAMWSKVPPSHRALLYNLVLYTGAFPKELLTSRTIFVPKKSEATDPADFRPISIASVRVRQLHKILARRIVATKVIDERQRCLDDGCAENISVLASVIHHARQHLKELYLVSLDVAKAYDSVSHQAITSALTDVGIPDKLVSYVASTYSNSSTVLKSGGKTSHVISVSRGVRQGDPMSSILFALVADKVLGAIPPQVGYNVGGELSNAVAFADDICLITSSKVGMTTALGAVERTASEQGLISNPNKCVATSLVPSGRDKKIKVLTRAQFSLNQGVPIRQLGPSDEWSYLGVNISPRGLRKISPTIEEELKNISKAPLKPQQRLKILRCFLVPRNYHALVLSGCTMKVLRQLDLQVRAAMRRWISLPKDTPLGYFHAAVKSGGLGIPAFTTAIPGILRDRLLRLEKSSSRAVRAVSSPDWAHNKIGWAEKVLSCDGQRLFSAEQRKRYWARKLYSSNDGSELRESEKSSASTRWIDAGSTGIPGRDYRQYHQVHVNAMPTRVRTSRGQRTALTNINCRAGCAFTETAAHVIQQCFRTKGGRQQRHDAVCNTLSGFFKKKSMKVYNEPHLRTTEGLRKPDIVVVRANDFWVIDTQVVSAGPNLNTTHKNKVDKYNIEYVKTEVAKLTNRPVSSVRVTSCTLSWRGVWAEQSSVALQDLGVPLGLLGGITTRVLQGSSTSWTRWNQITNMIPRARAGVG

SEQ ID NO: 25132 - protein, 1041 aa, Coccinella septempunctata
MRTHRVPEQATGLANQGPSGTGAPTTASGDFVCHLCDPARAFASRIGLGVHRQRAHTDVVNEEIVVERRNRGYSAEEMRIAAAEEAYVIKFGRDRQGREVKFVNVFLSQFFPGRTIDSLKGMRRQPAYKAYLHDAATLLSSAAASSDPSGVPDVPLATIVEEQEPPPTASAPNEDPYLSAARGLLPKVQESDYPGSHMLVSLVDHIESGQDPSEMIVACLKAMIPTYGKSKRKYVRRRRAVPPSNRDTRRRKEFASIESLFKKNMSRAAKQILDGGDVTTQPSLEAMVSYWEPMLTIPSTPVPQKPSLPEHLQKSVTALPISESEIKAVKIPNDSAPGIDGVTSAMWSKVPPAHRALLYNLVLYLGSFPKQILTSRTIFVPKKSASTEPADFRPISIASVIVRQLHKILARRIVATGIIDERQRCLDDGCAENISVLAAVLHHARNHLKELHLVSLDVAKAYDSVSHQAITSALTEAGLPDKLVRYVADTYSSSCTVLECGGERSKEIPVSRGVRQGDPMSSILFALVVDKVLRSIPPQVGYSVGGEPINAVAYADDIGLLTSSKAGMTIALEAVERAALEQGLTFNPSKCVATSLVPSGRDQKIKVLTRAQFQLIGGDPVRQLGPTDEWRYLGVNISPQGLRKISPSIEDEIKRISRAPLKPQQRLKILRCFLVPRYYHTLVLSGCTLKVLRQLDLQIRAALRRWLDLPKDTPLGYFHASVKNGGLGIPAFVTTIPGMLRDRLSRLQDWSSTAVRSVSNTEWARHKIAWAEKALSLGGDRLFSAEHRRQYWARRLYASNDGDELRESAGCSASTRWIDAGSTGIPGRDYCQYHHVHVNSLPSRVRTSRGQRTALSNINCRAGCRSTETTAHVIQSCFRTHGGRIKRHNAVCNTLSGFFRKKGLTVMSEPRLRTTVGLRIPDMVVVMGEGAWVIDTQIVSGGPSLDGTHESKVGKYNIDPVKDQVARLANVPASSVSVTSCTLSWRGVWSGKSATSLRDDLGVPLGLLCGITTRVLQGSHTNWTRWNQMTGMVPRPRAGVG

SEQ ID NO: 25133 - protein, 1031 aa, Harmonia axyridis
MRTHRTPVAAPGPSGQGPSRAVATTTASTGFVCNLCAPPREFSSKIGLGVHRQHAHTDIVNEEIITERRNRGYSAEEMRLAAAEEAHVVKHGHDRNGRAVRFINVFLGQLFPQRNIDSIKNMRRTPAYRAYLEEAISVLPSAGSPPSHTTVEVRDQPPLVITPVADPFLLAAKELAIKVLKSDYQGSSLMAALVGHIESGQNPSDFIVAALKAMIPSYGKTKGRYKRSKPAVAPSNRDSRRRREFALTQSLFKKNMSRTAKQILDGGGVTPNPPLEELVNHWEPVLTVPSTPVHQPPSLPQDRQKSATIYPITEDEVNAIKIPYSSAPGLDGVTFAMWSKIPPSHRALLYNLVLYTGAFPKELLTSRTIFVPKKSEATDPADFRPISIASVIVRQLHKILARRIVATKVIDERQRCLDDGCAENISVLASVIHHARHHLKELHLVSLDVAKAYDSVSHQAITSALTDVGIPDKLVSYVASTYSNSSTVLESGGKTSHVIPVSRGVRQGDPMSSILFALVADRILGAIPPQVGYNVGGELINAVAFADDICLITASKVGMTTALEAVERAASEQGLIFNPNKCVATSLVPSGRDKKIKVLTRAQFSLNQGVPIRQLGPSDEWRYLGVNISPRGLRKISPTIEEELKNISKAPLKPQQRLKILRCFLVPRYYHALVLSGCTMKVLRQLDLQVRAAMRRWIGLPKDTPLGYFHAAVKSGGLGIPAFTTAIPGILRDRLLRLEKSSSRAVRAVSSTDWAHNKIGWAEKVLSCDGQRLFSAEQRKRYWAKKLYSSNDGSELRESEKSSASTRWIDAGSTGIPGRDYRQYHQVHVNALPTRVRTSRGQRTALTNINCRAGCDFTETAAHVIQQCFRTKGGRQERHDAVCNTLSGFFKKKGLKVYNEPHLRTTEGLRKPDIVVVRANDVWVIDTQVVSAGPNLNNTHKNKVDKYNIEYVKTEVAKLTNRPVSSVRVTSCTLSWRGVWAEQSSVALQDLGVPLGLLGGITTRVLQGSSTSWTRWNQITNMIPRPRAGVG

SEQ ID NO: 25134 - protein, 1001 aa, Clostera curtula
MTLYIRFISLLSSQLCCLFYLCFKFLRILVYLLNYGVLRVYYMTQLMPVQNADLNPVDNNENSPQEDLIPCPCCKKLFKGQRGVKIHVGKVHKLHSNIEPDFPIINDAPIAQYPFWEYLSLLKQSTPILKRIPRGARPSVAKAFSSAIGSVTKENSFTAWQNLLTFPYRILHVKNDHNNKHSLTSRIKENCEYFQRTPERFIENKLPQRLGYRHVEQRLGEGDIKGAARLLFSSDKLAPDNLNTLLALQEKHPSASKDLVLPDSSTDDGFLQVNENDVMRAIISFPSGSAGGLDSLTPQHLKDLLGFSNGTTGESLLKDLTALVNLMLSGRVCGEIVDILYGANLCALIKKDGGIRPIAVGTTFRRLTAKVCCAKVKEHISKYFRPFQLGFGSRGGCEAAVHALRTYLNENGGNVLLKMDIRNAFNSIDRGALLSEVKSKMPETYSFISQCYGTSTKLIYKNKLILSSTGCQQGDPLGPAIFSLAIHPIISNLNSKFNVWYLDDGTIGGDVETVLRDLSFIKDKFENIGLKLNFSKCELFLNKTYSNPNLIHQSFDNLAPSIKMLSRDSLYLLGSPIFEESVPSFVAEKIKKYYDFSERLLEINTHMAFFIIRYCLFVPQFTYSLRCSLLWKFPDLLQKLDNIIRQTLTKILNLQFSDVSWCQATLPIRFGGLGVRKLSNVALPAFLSSIYSTEELVKSILQNSLSAYAISYLEEGKNAWKQLCPNDSQPSIPSSQREWDVQLCEIVRKQQIINASNPTECARLIAVGEWESGLWLQALPSQHLGTLIDSTAFRLAVSLRLGIQCLAPHNCHCGSKVDRFGHHGLSCYRSAGRISRHATLNDVVRRTLVTAGVPSILEPNGLMRDDGKRPDGMTLIPWTMGRPLVWDVTCVDTLAPSHIPGTAKRAGSAADSAESLKRRKYSQLDSSYMFVPLGVETFGPWGTEFKSFYKDLSRRLLNLTGDKKAGYYFAQRISIAIQRGNATSLLGTVPDDSDLAQIPLL

SEQ ID NO: 25135 - protein, 1403 aa, Clostera curtula
MEKYLRPERFDTDPSDSNASRAWTHWQKTFASFISSENTICSLNVKGKAEFARIKHQVLINHISSNVYAYISDANSYDEAITILQKLYVKPKNIIFARHVLATRKQYSDENIDTYLNVLKQLSKDCNFSAVDAETNRNDSIRDAFISGISSSKIRQRLLENLTLSLDEAYNQAVSLESAETNSMSFNTLSVNAATNQAVSAQSTNDTLTTKDETYSAAVLDKRKCFFCGGQMHYRQNCPALHKICQLCDKKGHIASVCRSTKQSKQQQFLKTAKRNTTACIVAASPSSLQKATVPAYIRGIRAEALLDTGSSVSFINEDFFKLCRLKKRPSSQTISMASLSHTAKVEGQTIQTISIGKHTYDNISLLIVKNLCADLIIGHDILREHSTLEFLFGGPKNALQVCNVAEASVPAVPLFANVSADCTPIAVKSRRHSEEDNKFIAEEIEQLLKEGIIEESKSPWRAQVLITKNDTHRKRLVIDYSRTINRYTQLDAYPLPNIEELVSKISKNNYFSLIDLKSAYHQVPILPYERKYTAFEALGNLYQFRRIPFGVTNGVSSFQRTIDWIIRQEKLQNTYAYLDDITICGQTRDEHDINLERFMSSVKKYGLTLSISKCKFSQESINILGYSITNHIIKPDSERLKPLMSLPLPHDMQSLRRTLGMFAHYSKWIPNFSEKIHPLVKVDKFPLGTDQKKCFEDLKNDIAKSAVHAIDDKIGFTVETLKKLKNLMLSGRVCGEIVDILYGANLCALIKKDGGIRPIAVGTTFRRLTAKVCCAKVKEHISKYFRPFQLGFGSRGGCEAAVHALRTYLNENGGNVLLKMDIRNAFNSIDRGALLSEVKSKMPETYSFISQCYGTSTKLIYKNKLILSSTGCQQGDPLGPAIFSLAIHPIISNLNSKFNVWYLDDGTIGGDVETVLRDLSFIKDKFENIGLKLNFSKCELFLNKTYSNPNLIHQSFDNLAPSIKMLSRDSLYLLGSPIFEESVPSFVAEKIKKYYDFSERLLEINTHMAFFIIRYCLFVPQFTYSLRCSLLWKFPDLLQKLDNIIRQTLTKILNLQFSDVSWCQATLPIRFGGLGVRKLSNVALPAFLSSIYSTEELVKSILQNSLSAYAISYLEEGKNAWKQLCPNDSQPSIPSSQREWDVQLCEIVRKQQIINASNPTECARLIAVGEWESGLWLQALPSQHLGTLIDSTAFRLAVSLRLGIQCLAPHNCHCGSKVDRFGHHGLSCYRSAGRISRHATLNDLVRRTLVTAGVPSILEPNGLMRDDGKRPDGMTLIPWTMGRPLVWDVTCVDTLAPSHIPGTAKRAGSAADSAESLKRRKYSQLDSSYMFVPLGVETFGPWGTEFKSFYKDLSRRLLNLTGDKKAGYYFAQRISIAIQRGNATSLLGTVPDDSDLAQIPLL

SEQ ID NO: 25136 - protein, 723 aa, Clostera curtula
MRAIISFPSGSAGGLDSLTPQHLKDLLGFSNGTTGESLLKDLTALVNLMLSGRVCGEIVDILYGANLCALIKKDGGIRPIAVGTTFRRLTAKVCCAKVKEHISKYFRPFQLGFGSRGGCEAAVHALRTYLNENGGNVLLKMDIRNAFNSIDRGALLSEVKSKMPETYSFISQCYGTSTKLIYKNKLILSSTGCQQGDPLGPAIFSLAIHPIISNLNSKFNVWYLDDGTIGGDVETVLRDLSFIKDKFENIGLKLNFSKCELFLNKTYSNPNLIHQSFDNLAPSIKMLSRDSLYLLGSPIFEESVPSFVAEKIKKYYDFSERLLEINTHMAFFIIRYCLFVPQFTYSLRCSLLWKFPDLLQKLDNIIRQTLTKILNLQFSDVSWCQATLPIRFGGLGVRKLSNVALPAFLSSIYSTEELVKSILQNSLSAYAISYLEEGKNAWKQLCPNDSQPSIPSSQREWDVQLCEIVRKQQIINASNPTECARLIAVGEWESGLWLQALPSQHLGTLIDSTAFRLAVSLRLGIQCLAPHNCHCGSKVDRFGHHGLSCYRSAGRISRHATLNDVVRRTLVTAGVPSILEPNGLMRDDGKRPDGMTLIPWTMGRPLVWDVTCVDTLAPSHIPGTAKRAGSAADSAESLKRRKYSQLDSSYMFVPLGVETFGPWGTEFKSFYKDLSRRLLNLTGDKKAGLYFAQRISIAIQRGNATSLLGTVPDDSDLAQIPLL

SEQ ID NO: 25137 - protein, 927 aa, Plutella xylostella
MSSDERATCPHCPNSSRLFTAPHGLNVHIGRMHKNLHTQHNDLVTQPSDHSNLDVLASLKASVRVLKHIPKGARATAAGQLHDLIDQCLNSNSYEDWQKLFTFSYTALRVPNRHDNKSLTAKVKENILDNSIDAHTGEPILRQRPVSVGSIIEAKVHDGDIRGAVRPLTSDCTIAPNTEETLTALRSKHPIPSRTLSFPAEPNSASPCLTVSAPEVLEALSSFHNGSAAGLDGLRPEHIKELTTASAGDSGQKLLESLTRLCNFLLKGLPNREVCPYLYGASLFAFLKKEGGIRPIAVGSIIRRLVAKLGCRAVKNEIAPFLQPEQVGFGTALGCEAAIHATRAFAIANSNKDIVLVKLDLKNAFNSVERDVLLGKVIDHAPLLYPFLHQCYSSPSNLFFGNAKLFSTVGAQQGDPLGPLIFCLAIQNIIKSIKCPLNIWYLDDGTIGGTPEMVAEDMEMLKGKFKDIGLEVNMSKCEFFNCGDEATASRFQDLRPGVKSVDVKTFTLLGAPVFPDAIPDMLRLKRRLKQVSSHVALALLRSCLAMPKLTYAVRTAPVWRSPDESRAFDSLLKQILECILNVELSSSQWAQASLPIRHGGLGIRSVEGTSLAAFLASSHGVKNLVTRILSEHGDEFQIPFVEEALQTWTILCPLSNPPARPDTQRSWDDIQCKVALKKLEDSVSGAHLARVKAAAKPESGAWLHALPSPVLGTLLDNDTLRVAVALRLGCDVCEPHRCICGVGVEANGHHGLSCGRCAGRFPRHHALNDLIRRALISANIPCVLEPPGLSRTDGKRPDGLTLVPWERGKSLLWDATCVSTFAASHVGSTKRIAGSAAESAATAKHAKYSMLSKTYIFVPFAVETTGVWGFEAKQFLSSLSRRLRERGQDRRSGSYLAQRISLAIQRGNAASIMGTFEPGTIRGGLFD

SEQ ID NO: 25138 - protein, 933 aa, Plutella xylostella
MSSDERATCPHCPNSSRLFTAPHGLNVHIGRMHKNLHTQHNDLVTQPSDHSNLDVLASLKASVRVLKHIPKGARATAAGKLHDLIDQCLNSNSYEDWQKLFTFSYTALRVPNRHDRHDVTAKVKENILDNSFDAHTGEPILRQRPVSVGSIIEAKVHDGDIRGAVRLLTSDCTIAPNTEETLTALRSKHPIPSRTLSFPAEPNSASPCLTVSAPEVLEALSSFHNGSAAGLDGLRPEHIKELTTASAGDSGQKLLESLTRLCNFLLKGLLNREVCPYLYGASLFAFLKKEGGIRPIAVGSIIRRLVAKLGCRAVKNEIAPFLQPEQVGFGTALGCEAAIHATRAFAIANSNKDIVLVKLDLKNAFNSVERDVLLGKVIDHAPLLYPFLHQCYSSPSNLFFGNAKLFSTVGAQQGDPLGPLIFCLAIQNIIKSIKCPLNIWYLDDGTIGGTPEMVAEDMVKGKFKDIDLEVNMSKCEFFNCGDEATASRFQDLRPGVKSVDVKTFTLLGAPVFPDAIPDMLRLKREMLASSRGRLKQVSSHVALVLLRSCLAMPKLTYAVRTAPVWRFPDESRALDSLLKQILECILNVELSSSQWAQASLPIRHGGLGIRSVEGTSLAAFLASSQGVKNLVTRILSEHGDEFQIPFVEEALQTWTILCPLSNPPARPDTQRSWDDIQCKVALKKLEDSVSGAHLARVKAAAKPESGAWLHALPSPVLGTLLDNDTLRVAVALRLGCDVCEPHRCICGVGVEANGHHGLSCGRCAGRFPRHHALNDLIRRALISANIPCVLEPPGLSRTDGKRPDGLTLVPWERGKSLLWDATCLSTFAASHVGSTKRIAGSAAESAATAKHAKYSMLSKTYIFVPFAVETTGVWGFEAKQFLSSLSRRLRERGQDRRSGSYLAQRISLAIQRGNAASIMGTFEPGTIRGGLFD

SEQ ID NO: 25139 - protein, 945 aa, Plutella xylostella
MSNNTNNRTTCPHCPSSSRLFAAPHGLNIHIGRKHKSIRHNAVDTNNFQTQPLSYDPHIQTNLDSLAKLKASVPVLKHIPKGARAAAADKLRHLIEQCIETNGHTEWYQLLSFSFTSLRIPSKLDPRSLTSKVKENIHNPSPDINSGEPPLRPGAPSISNLVESKVHDGDLRGAVRLLTSECSIAPASEETLISLRSKHPSPSRDLDFPPEPNLDSPFLTVSVADVQEALSSFHNGSAAGLDGLRPEHIKELTAASAGDSGQKLLESLTKLCNFLLKGLLNREVCPYLYGASLCAFLKKDGGIRPIAIGSTIRRLVAKLGCRSVKNELASYLQPVQVGFGTPLGCEAAIHATRAFAFENVNTSSVLVKLDLKNAFNSVERDIMLTQIKDKIPALYPFLHQCYSAPSNLFYGDTKINSCVGAQQGDPLGPLIFSLSIQNAIQSIKSPLNVWYLDDGTVGGSPETVAEDIEMLKLKLRDMGLEVNSSKCEYFPCGDASSLALIRDALPGIKLLNKNTFTLLGAPVFPEAIPDMLKTKIEKLASSQELLKKVSSHVALVLLRSSLSMPRLTYSVRTAPVWRFPNVVKDYDNLLKQILEGILNVDLSSDQWLQASLPVRFGGLGVRSLEGTALTAFLACSHGVKTLVTQILSQHGDGFHIPFATEALQSWCSFCSPPNHPDRPGSQRSWDDINCKRVLETLESSVTGADLARVKAAAKPESGAWLHALPSPALGTLLDNDTLRIAVALRLGCHVGEPHKCICGAWVEANGHHGLSCGRCAGRFPRHHALNDLIRRALISANIPCVLEPPGLSRTDGKRPDGLTLVPWERGKCLLWDATCVSTFAASHVGGTQRIAGSAAESAATAKHSKYSLLAKNYKFVPFAVETSGVWGFEAKQFLLSLSRRLRERGQDRRSGSYLAQRVSLAIQRGNAASIMGTFEPGTIRGGLFD

SEQ ID NO: 25140 - protein, 935 aa, Plutella xylostella
MSSDERATCPHCPNSSRLFTAPHGLNVHIGRMHKNLHTQHNDLVTQPSDHSNLDVLASLKASVRVLKHIPKGARATAAGKLHDLIDQCLNSNSYEDWQNLFTFSYTALRVPNRHDNKSLTAKVKENILDNSIDAHTGEPILRQRPVSVGSIIEAKVHDGDIRGAVRLLTSDCTIAPNTEETLTALRSKHPIPSRTLSFPAETNSASPCLTVSAPEVLEALSSFHNGSAAGLDGLRPEHIKELTTASAGDSGQKLLESLTRLCNFLLKGLLNREVCPYLYGASLFAFLKKEGGIRPIAVGSIIRRLVAKLGCRAVKNEIAPFLQPEQVGFGTALGCEAAIHATRAFAIANSNKDIVLVKLDLKNAFNSVERDVLLGKVIDHAPLLYPFLHQCYSSPSNLFFGNAKLFSTVGAQQGDPLGPLIFCLAIQNIIKSIKCPLNIWYLDDGTIGGTPEMVADDMEMLKGKFKDIGLEVNMSKCEFFNCGDEATASRFQDLRPGLKSVDVKTFTLLGAPVFPDAIPDMLRLKREMLASSRGRLKQVSSHVALVLLRSCLAMPKLTYAVRTAPVWRFPDESRAFDSLLKQILECILNVELSSSQWAQASLPIRHGGLGIRSVEGTSLAAFLASSHGVKNLVTRILSEHGDEFQIPFVEEALQTWTILCPLSNPPARPDTQRSWDDIQCKVALKKLEDSVSGAHLARVKAAAKPESGAWLHALPSPVLGTLLDNDTLRVAVALRLGCDVCEPHRCICGVGVEANGHHGLSCGRCAGRFPRHHALNDLIRRALISANIPCVLEPPGLSRTDGKRPDGLTLVPWERGKSLLWDATCVSTFAASHVGSTKRIAGSAAESAATAKHAKYSMLSKTYIFVPFAVETTGVWGFEAKQFLSSLSRRLRERGQDRRSGSYLAQRISLAIQRGNAASIMGTFEPGTIRGGLFD

SEQ ID NO: 25141 - protein, 945 aa, Plutella xylostella
MSNNTNNRTTCPHCPSSSRLFAAPHGLNIHIGRKHKSIRHNAVDTNNFQTQPLSYDPHIQTNLDSLAKLKASVPVLKHIPKGARAAAADKLRHLIEQCIETNGHTEWYQLLSFSFTSLRIPSKLDPRSLTSKVKENIHNPSPDNNSGEPPLRPGAPSISNLVESKVHDGDLRRAVRLLTSECSIAPASEETLISLRSKHPSPSRDLDFPPEPNLDSPFLTVSVADVQEALSSFHNGSAAGLDGLRPEHIKELTAASAGDSGQKLLESLTKLCNFLLKGLLNREVCPYLYGASLCAFLKKDGGIRPIAIGSTIRRLVAKLGCRSVKNELASYLQPVQVGFGTPLGCEAAIHATRAFAFENVNTSSVLVKLDLKNAFNSVERDIMLTQIKDKIPALYPFLHQCYSAPSNLFYGDTKINSCVGAQQGDPLGPLIFSLSIQNAIQSIKSPLNIWYLDDGTVGGSPETVAEDIEMLKLKLRDMGLEVNSSKCEYFPCGDASSLALIRDALPGIKLLNKNTFTLLGAPVFPEAIPDMLKTKIEKLASSQELLKKVSSHVALVLLRSSLSMPRLTYSVRTAPVWRFPNVVKDYDNLLKQILEGILNVDLSSDQWLQASLPVRFGGLGVRSLEGTALTAFLACSHGVKTLVTQILSQHGDGFHIPFATEALQSWCSFCSPPNHPDRPGSQRSWDDINCKRVLETLESSVTGADLARVKAAAKPESGAWLHALPSPALGTLLDNDTLRIAVALRLGCHVGEPHKCICGAWVEANGHHGLSCGRCAGRFPRHHALNDLIRRALISANIPCVLEPPGLSRTDGKRPDGLTLVPWERGKCLLWDATCVSTFAASHVGGTQRIAGSAAESAATAKHSKYSLLAKNYKFVPFAVETSGVWGFEAKQFLLSLSRRLRERGQDRRSGSYLAQRVSLAIQRGNAASIMGTFEPGTIRGGLFV

SEQ ID NO: 25142 - protein, 516 aa, Plutella xylostella
MIFSLAIHDIVKHLQSLLNIWYLDDGTIGGSVNTVVKDVQKIVEALKELGLELNSNKCEVFCCNPNEDISTLTAVVPGLKILDKANFTLLGAPFFPGALPSILDAKKDGIVKSRERLKNLSAHVALTIFRSCLSMPKLTYTVRTSPIWLYPDKTQGIDDAIRCTLEDLLNVSLDDAQWQQAALPIRHGGLGIRRVQDTSLSAFLASAHGAVELVTRILSVDGDGFRLPFVNEALAEWETQRPGQVTPDNPEMQRNWDEINSMAILDSLIETSSGVDLARLRAASASESGAWLHALPSPQMGTLLDNDALRIAVALRLGCNICEQHVCICGAQVDTRGHHGLSCQRCAGRFPRHHALNEIIRRAMVTANIPCVLEPPDLSRSDGKRPDGLTLVPWERGRSLLWDATCVSTFAASHLPGTTRTAGSAAESAARSKHLKYAALKNCYTFIPVAFETSGVWGSEARSFLKGLGRRIVIRGYDRRSGSYLAQRISLAIQRGNAASIMGTFGPGTIRGGLFE

SEQ ID NO: 25143 - protein, 941 aa, Plutella xylostella
MSQQRSTCPHCPSSSRQFIVPRGLNVHIGRVHKNAPSHSQPPISVATTDSVISNTPDFTHIAQLKNTVRVLKHIPKGARCLAAGKLAQLIDTCLQTNGSQEWYELLTFSYIALRAPSTDDPRSLTAKVKENINSFTEPLVTVYPFDQGHRSVYRTIEAKVYDGDLRGAVRLLTSDNSLAPNNSDTLTGLQEKHPSPSRSLNFPPEPNLSSPALSVVVADVAEAVSSFYSGSAAGLDGLRPQHLKELTSVSAGDNGQRLLESLTKLSNFLLKGLLNIEICPYLYGASLCALTKSGGGIRPIAVGSVFRRLVAKLGCKAVKSDVSAYLQPHQLGFGTALGCEAAIHATRSFATAGCGNNLHDIIVKLDIRNAFNNLERDIILSKIQDHTPTLFPFLNQCYSKPSQLFHGPVPILSQVGAQQGDPLGPMIFSLAIHDIVKHLQSLLNIWYLDDGTIGGSVNTVVNDVQKIVEALKELGLELNSNKCEVFCCNPNEDISTLTAVVPGLKILDKANFTLLGAPIFPEALPSILDAKKDGIVKSRERLKNLSAHVALTIFRSCLSMPKLTYTVRTSPIWLYPDKTQGIDDAIKCTLEDLLNVSLDDVQWQQAALPIRHGGLGIRRVQDTSLSAFLASAHGAAELVTRILSVDGDGFRLPFVNEALAEWETQRPGQVTPDNPEMQRNWDEINSMAILDSLIETSSGVDLARLRAASASESGAWLHALPSPQMGTLLDNDTLRIAVALRLGCNICEQHVCICGAQVDTRGHHGLSCQRCAGRFPRHHALNEIIRRAMVTANIPCVLEPPGLSRSDGKRPDGLTLVPWERGRSLLWDATCVSTFAASHLPGTTRTAGSAAESAARSKHLKYAALKNCYTFIPVAFETSGVWGSEARSFLKGLGRRIVIRGYDRRSGSYLAQRISLAIQRGNAASIMGTFGPGTIRGGLFE

SEQ ID NO: 25144 - protein, 947 aa, Plutella xylostella
MTQPTSTCPHCPGSSRQFVVPRGLNVHIGRIHKNDLAHSQPAAAVPAATNLNPPRNAQVTSNFDLLASMRRNIRVLKHIPKGARCMAAGKLSHLIDLCVESNGRQEWYDLLTFPYSALRVPSSVDQRSLTAKVKDNVNGSAEPIVDDSFLTHRQGSIYRAIEAKVYDGDLRGAVRLLTSDSSLAPSTPETITALKEKHPTPSRPLSFPPEPNISSPFLSVTVSDVADAVDSFYSGSAAGLDGLRPQHLKELISVSAGDNGHKLLESLTRLCNFLLKGMLNLEVCPYLYGASLCALSKSDGGIRPIAVGSVFRRLVAKVGGRAVKSEMSVFLQPHQLGYGTALGCEAAIHATRSFAMTGCENASNDIILKVDLKNAFNSIERDGMLSKIQEHIPTLYPFLSQCYSLPSQLFYDSESISSQVGAQQGDPLGPLIFSLAINDVVKSLASPLNVWYLDDGTIGGNIDTVEKDMKAIIDMFKEMGLELNSNKCELFCCSPNIPNLSTITNLFPGIKLLDKANFTVLGAPIFPEGVPPLLDGKREGINKTVSGLKQLPAHVALTIFRCCLSMPKLTYALRTSPVWLFPANIANIDNCIKNVLEQVLNIKLEGDQWRQAALPIRHGGLGIRRVKETGLSAFLSSAHGVVDLVTRILSINGDGFRLPFVTEALEGWEAQCPGKELPDHLDVQKAWDDVLCKTVLDKIMESSIGVDLARVRASSKPESGSWLHALPSPQMGTLLDDDSLRIAVALRLGCDICEQHHCICGALVDSRGHHGLSCPKCAGRFPRHHALNDLIKRAMVMANIPCVLEPPGLSRTDGKRPDGLTLVPWERGRSLLWDATCVSTFAASHLAGTARVAGSAAENAARLKHQKYTDLKNRYLFVPVAVETSGVWGGEAKALIRDLGRRIASRGHDRRSGSYLAQRLSLAIQRGNAASIMGTFGPGMTRGGLLD

SEQ ID NO: 25145 - protein, 947 aa, Plutella xylostella
MTQPTSTCPHCPGSSRQFVVPRGLNVHIGRIHKNDLAHSQPAAAVPAATNLNPPRNAQVTSNFDLLASMRRNIRVLKHIPKGARCMAAGKLSHLIDLCVESNGRQEWYDLLTFPYSALRVPSSVDQRSLTAKVKDNVNGSAEPIVDDSFLTHRQGSIYRAIEAKVYDGDLRGAVRLLTSDSSLAPSTPETITALKEKHPTPSRPLSFPPEPNISSPLLSVTVSDVADAVDSFYSGSAAGLDGLRPQHLKELISVSAGDNGHKLLESLTRLCNFLLKGMLNLEVCPYLYGASLCALSKSDGGIRPIAVGSVFRRLVAKVGGRAVKSEMSVFLQPHQLGYGTALGCEAAIHATRSFAMTGCENASNDIILKVDLKNAFNSIERDGMLSKIQEHIPTLYPFLSQCYSLPSQLFYDSESISSQVGAQQGDPLGPLIFSLAINDVVKSLASPLNVWYLDDGTIGGNIDTVEKDMKAIIDMFKEMGLELNSNKCELFCCSPNIPNLSTITNLFPGMKLLDKANFTVLGAPIFPEGVPPLLDGKREGINKTVSGLKQLPAHVALTIFRCCLSMPKLTYALRTSPVWLFPANIANIDNCIKNVLEQVLNIKLEGDQWRQAALPIRHGGLGIRRVKETGLPAFLSSAHGVVDLVTRILSINGDGFRLPFVTEALEGWEAQCPGKELPDHLDVQKAWDDVLCKSVLDKIMESSIGVDLARVRASSKPESGSWLHAFPSPQMGTLLDDDSLRIAVALRLGCDICEQHHCICGALVDSRGHHGLSCPKCAGRFPRHHALNDLIKRAMVMANIPCVLEPPGLSRTDGKRPDGLTLVPWERGRCLLWDATCVSTFAASHLAGTARVAGSAAENAARLKHQKYMDLKNRYLFVPVAVETSGVWGGEAKALIRDLGRRIASRGHDRRSGSYLAERLSLAIQRGNAASIMGTFGPGMTRGGLLD

SEQ ID NO: 25146 - protein, 947 aa, Plutella xylostella
MTQPTSTCPHCPGSSRQFVVPRGLNVHIGRIHKNDLAHSQPAAAVSAATNLNPPRNAQVTSNFDLLASMRRNIRVLKHIPKGARCMAAGKLSHLIDLCVESNGRQEWYDLLTFPYSALRVPSSVDQRSLTAKVKDNVNGSAEPIVDDSFLTHRQGSIYRAIEAKVYDGDLRGAVRLLTSDSSLAPRTPETITALKEKHPTPSRPLSFPPEPNISSPFLSVTVSDVADAVDSFYSGSAAGLDGLRPQHLKELISVSAGDNGHKLLESLTRLCNFLLKGMLNLEVCPYLYGASLCALSKSDGGIRPIAVGSVFRRLVAKVGGRAVKSEMSVFLQPHQLGYGTALGCEAAIHATRSFAMTGCENASNDIILKVDLKNAFNSIERDGMLSKIQEHIPTLYPFLSQCYSLPSQLFYDSESISSQVGAQQGDPLGPLIFSLAINDVVKSLASPLNVWYLDDGTIGGNIDTVEKDMKAIIDMFKEMGLELNSNKCELFCCSPNIPNLSTITNLVPGIKLLDKSNFTVLGAPIFPEGVPPLLDGKREGINKTVSGLKQLPAHVALTIFRCCLSMPKLTYALRTSPVWLFPANIANIDNCIKNVLEQVLNIKLEGDQWRQAALPIRHGGLGIRRVKETGLSAFLSSAHGVVDLVTRILSINGDGFRLPFVTEALEGWEAQCPGKKLPDHLDVQKAWDDVLCKSVLDKIMESSIGVDLARVRASSKPESGSWLHALPSPQMGTLLDDDSLRIAVALRLGCDICEQHHCICGALVDSRGHHGLSCPKCAGRFPRHHALNDLIKRAMVMANIPCVLEPPGLSRTDGKRPDGLTLVPWERGRSLLWDATCVSTFAASHLAGTVRVAGSAAENAARLKHQKYTDLKNRYLFVPVAVETSGVWGSEAKALIRDLSRRIASRGHDRRSGSYLAQRLSLAIQRGNAASIMGTFGPGMTRGGLLD

SEQ ID NO: 25147 - protein, 947 aa, Plutella xylostella
MTQPTSTCPHCPGSSRQFVVPRGLNVHIGRIHKNDLAHSQPAAAVPAATNLNPPRNAQVTSNFDLLASMRRNIRVLKHIPKGARCMAAGKLSHLIDLCVESNGRKEWYDLLTFPYSALRVPSSVDQRSLTAKVKDNVNGSAEPIVDDSFLTHRQGSIYRAIEAKVYDGDLRGAVRLLTSDSSLAPSTPETITALKEKHPTPSRPLSFPPEPNISSPFLSVTVSDVADAVDSFYSGSAAGLDGSRPQHLKELISVSAGDNGHKLLESLTRLCNFLLKGMLNLEVCPYLYGASLCALSKSDGGIRPIAVGSVFRRLVAKVGGRAVKSEMPVFLQPHQLGYGTALGCEAAIHATRSFAMTGCENASNDIILKVDLKNAFNSIERDGMLSKIQEHIPTLYPFLSQCYSLPSQLFYDSESISSQVGAQQGDPLGPLIFSLAINDVVKSLASPLNVWYLDDGTIGGNIDTVEKDMKAIIDMFKEMGLELNSNKCELFCCSPNIPNLSTITNLFPGIKLLDKANFTVLGAPIFPEGVPPLLDGKREGINKTVSGLKQLPAHVALTIFRCCLSMPKLTCALRTSPVWLFPANIANIDNCIKNVLEQVLNIKLEGDQWRQAALPIRHGGLGIRRVKETGLSAFLSSAHGVVDLVTRILSINGDGFRLPFVTEALEGWEAQCPGKELPDHLDVQKAWDDVLCKSVLDKIMERSIGVDLARVRASSKPESGSWLHALPSPQMGTLLDDDSLRIAVALRLGCDICEQHHCICGALVDSRGHHGLSCPKCAGRFPRHHALNDLIKRAMVMANIPCVLEPPGLSRTDGKRPDGLTLVPWERGRSLLWDATCVSTFAASHLAGTARVAGSAAENAARLKHQKYTDLKNRYLFVPVAVETSGVWGGEAKALIRDLGRRIASRGHDRRSGSYLAQRLSLAIQRGNAASIMGTFGPGMTRGGLLD

SEQ ID NO: 25148 - protein, 947 aa, Plutella xylostella
MTQPTSTCPHCPGSSRQFVVPRGLNVHIGRIHKNDLAHSQPAAAVPAATNLNPPRNAQVTSNFDLLASMRRNIRVLKHIPKGARCMAAGKLSHLIDLCVESNGRQEWYDLLTFPYSALRVPSSVDQRSLTAKVKDNVNGSAEPIVDDSFLTHRQGSIYRAIEAKVYDGDLRGAVRLLTSDSSLAPRTPETITALKEKHPTPSRPLSFPPEPNISSPFLSVTVSDVADAVDSFYSGSAAGLDGLRPQHLKELISVSAGDNGHKLLESLTRLCNFLLKGMLNLEVCPYLYGASLCALSKSDGGIRPIAVGSVFRRLVAKVGGRAVKSEMSVFLQPHQLGYGTALGCEAAIHATRSFAMTGCENASNDIILKVDLKNVFNSIERDGMLSKIQEHIPTLYPFLSQCYSLPSQLFYDSESISSQVGAQQGDPLGPLIFSLAINDVVKSLASPLNVWYLDDGTIGGNIDTVEKDMKAIIDMFKEMGLELNSNKCELFCCSPNIPNLSTITNLIPGMKLLDKTNFTVLGAPIFPEGVPPLLDGKREGINKTVSGLKQLPAHVALTIFRCCLSMPKLTYALRTSPVWLFPANIANIDNCIKNVLEQVLNIKLEGDQWRQAALPIRHGGLGIRRVKETGLSAFLSSAHGVVDLVTRILSINGDGFRLPFVTEALEGWEAQCPGKELPDHLDVQKAWDDVLCKSVLDKIMESSIGVDLARVRASSKPESGSWLHALPSPQMGTLLDDDSLRIAVALRLGCDICEQHHCICGALVDSRGHHGLSCPKCAGRFPRHHALNDLIKRAMVMANIPCVLEPPGLSRTDGKRPDGLTLVPWERGRSLLWDATCVSTFAASHLAGTARVAGSAAENAARLKHQKYTDLKNRYLFVPVAVETSGVWGGEAKALIRDLGRRIASRGHDRRSGSYLAQRLSLAIQRGNAASIMGTFGPGMTRGGLLD

SEQ ID NO: 25149 - protein, 947 aa, Plutella xylostella
MTQPTSTCPHCPGSSRQFVVPRGLNVHIGRIHKNDLAHSQPAAAVPAATNLNPPRNAQVTSNFDLLASMRRNIRVLKHIPKGARCMAAGKLSHLIDLCVESNGRQEWYDLLTFPYSALRVPSSVDQRSLTAKVKDNVNGSAEPIVDDSFLTHRQGSIYRAIEAKVYDGDLRGAVRLLTSDSSLAPSTPETITALKEKHPTPSRPLSFPPEPNISSPFLSVTVSDVADAVDSFYSGSAAGLDGLRPQHLKELISVSAGDNGHKLLESLTRLCNFLLKGMLNLEVCPYLYGASLCALSKSDGGIRPIAVGSVFRRLVAKVGGRAVKSEMSVFLQPHQLGYGTALGCEAAIHATRSFAMTGCENASNDIILKVDLKNAFNSIERDGMLSKIQEHIPTLYPFLSQCYSLPSQLFYDSESISSQVGAQQGDPLGPLIFSLAINDAVKSLASPLNVWYLDDGTIGGNIDTVEKDMKAIIDMFKEMGLELNSNKCELFCCSPNIPNLSTITNLFPGIKLLDKANFTVLGAPIFPEGVPPLLDGKREGINKTVSGLKQLPAHVALTIFRCCLSMPKLTYALRTSPVWLFPANIANIDNCIKNVLEQVLNIKLEGDQWRQAALPIRHGGLGIRRVKETGLSAFLSSAHGVVDLVTRILSINGDGFRLPFVIEALEGWEAQCPGKELPDHLDVQKAWDDVLCKSVLDKIMESSIGVDLARVRASSKPESGSWLHALPSPQMGTLLDDDSLRIAVALRLGCDICEQHHCICGALVDSRGHHGLSCPKCAGRFPRHHALNDLIKRAMVMANIPCVLEPPGLSRTDGKRPDGLTLVPWERGRSLLWDATCVSTFAASHLAGTARVAGSAAENAARLKHQKYTDLKNRYLFVPVAVETSGVWGGEAKALIRDLGRRIASRGHDRRSGSYLAQRLSLAIQRGNAASIMGTFGTGMTRGGLLD

SEQ ID NO: 25150 - protein, 930 aa, Plutella xylostella
MTQPTSTCPHCPGSSRQFVVPRGLNVHIGRIHKNDLAHSQPAAAVPAATNLNPPRNAQVTSNFDLLASMRRNIRVLKHIPKGARCMAAGKLSHLIDLCVESNGRQEWYDLLTFPYSALRVPSSVDQRSLTAKVKDNVNGSAEPIVDDSFLTHRQGSIYRAIEAKVYDGDLRGAVRLLTSDSSLAPSTPETITALKEKHPTPSRPLSFPPEPNISSPFLSVTVSDVADAVDSFYSGSAAGLDGLRPQHLKELISVSAGDNGHKLLESLTRLCNFLLKGMLNLEVCPYLYGASLCALSKSDGGIRPIAVGSVFRRLVAKVGGRAVKSEMSVFLQPHQLGYGTALGCEAAIHATRSFAMTGCENASNDIILKVDLKNAFNSIERDGMLSKIQEHIPTLYPFLSQCYSLPSQLFYDSESISSQVGAQQGDPLGPLIFSLAINDVVKSLASPLNVWYLDDGTIGGNIDTVEKDMKAIIDMFKEMGLELNSNKCELFCCSPNIPNLSTITNLFPGIKLLDKANFTVLGAPIFPEGVPPLLDGKREGINKTVSGLKQLPAHVALTIFRCCLSMPKLTYALRTSPVWLFPANIANIDNCIKNVLEQVLNIKLEGDQWRQAALPIRHGGLGIRRVKETGLSAFLSSAHGVVDLVTRILSINGDGFRLPFVTEALEGWEAQCPGKELPDHLDVQKAWDDVLCKSVLDKIMESSIGVDLARVRASSKPESGSWLHALPSPQMGTLLDDDSLRIAVALRLGCDICEQHHCICGALVDSRGHHGLSCPKCAGRFPRHHALNDLIKRAMVMANIPCVLEPPGLSRTDGKRPDGLTLVPWERGRSLLWDATCVSTFAASHLAGTARVAGSAAENAARLKHQKYTDLKNRYLFVPVAVETSGVWGGEAKALIRDLGRRIASHWLKGSLLLFKEVTLQALWVLLGQV

SEQ ID NO: 25151 - protein, 947 aa, Plutella xylostella
MTQPTSTCPHCPGSSRQFVVPRGLNVHIGRIHKNDLAHSQPAAAVPASTNLNPPRNAQVTSNFDLLACMRRNIRVLKHIPKGARCMAAGKLSHLIDLCVESNGRQEWYDLLTFPYSALRVPSSVDQRSLTAKVKDNVNGSAEPIVDDSFLTHRQGSIYRAIEAKVYDGDLRGAVRLLTSDSSLAPSTPETITALKEKHPTPSRPLSFPPEPNISSPFLSVTVSDVADAVDSFYSGSAAGLDGLRPQHLKELISVSAGDNGHKLLESLTRLCNFLLKGMLNLEVCPYLYGASLCALSKSDGGIRPIAVGSVFRRLVAKVGGRAVKSEMSVFLQPHQLGYGTALGCEAAIHATRSFAMTGCENASNDIILKVDLKNAFNSIERDGMLSKIQEHIPTLYPFLSQCYSLPSQLFYDSESISSQVGAQQGDPLGPLIFSLAINDVVKSLTSPLNVWYLDDGTIGGNIDTVEKDMKAIIDMFKEMGLELNSNKCELFCCSPNIPNLSTITNLFPGIKLLDKANFTVLGAPIFPEGVPPLLDGKREGINKTVSGLKQLPAHVALTIFRCCLSMPKLTYALRTSPVWLFPANIANIDNCIKNVLEQVLNIKLEGDQWRQAALPIRHGGLGIRRVKETGLSAFLSSAHGVVDLVTRILSINGDGFRLPFVTEALEGWEAQCPGKELPDHLDVQKAWDDVLCKSVLDKIMESSIGVDLARVRASSKPESGSWLHALPSPQMGTLLDDDSLRIAVALRLGCDICEQHHCICGALVDSRGHHGLSCPKCAGRFPRHHALNDLIKRAMVMANIPCVLEPPGLSRTDGKRPDGLTLVPWERGRSLLWDATCVSTFAASHLAGTARVAGSAAENAARLKHQKYTDLKNRYLFVPVAVETSGVWGGEAKALIRDLGRRIASRGHDRRSGSYLAQRLSLAIQRGNAASIMGTFGPGMTRGGLLD

SEQ ID NO: 25152 - protein, 947 aa, Plutella xylostella
MTQPTSTCPHCPGSSRQFVVPRGLNVHIGRIHKNDLAHSQPAAAVPAATNLNPPRNAQVTSNFDLLASMRRNIRVLKHIPKGARCMAAGKLSHLIDLCVESNGRQEWYDLLTFPYSALRVPSSVDQRSLTAKVKDNVNGSAEPIVDDSFLTHRQGSIYRAIEAKVYDGDLRGAVRLLTSDSSLAPSTPETITALKEKHPTPSRPLSFPPEPNISSPFLSVTVSDVADAVDSFYSGSAAGLDGLRPQHLKELISVSAGDNGHKLLESLTRLCNFLLKGMLNLEVCPYLYGASLCALSKSDGGIRPIAVGSVFRRLVAKVGGRAVKSEMSVFLQPHQLGYGTALGCEAAIHATRSFAMTGCENASNDIILKVDLKNAFNSIERDGMLSKIQEHIPTLYPFLSQCYSLPSQLFYDSESISSQVGAQQGDPLGPLIFSLAINDVVKSLASPLNVWYLDDGTIGGNIDTVEKDMKAIIDMFKEMGLELNSNKCELFCCSPNIPNLSTITNLFPGIKLLDKANFTVLGAPIFPEGVPPLLDGKREGINKTVSGLKQLPAHVALTIFRCCLSMPKLTYALRTSPVWLFPANIANIDNCIKNVLEQVLNIKLEGDQWRQAALPIRHGGLGIRRVKETGLSAFLSSAHGVVDLVTRILSINGDGFRLPFVTEALEGWEAQCPGKELPDHLDVQKAWDDVLCKSVLDKIMESSIGVDLARVRASSKPESGSWLHALPSPQMGTLLDDDSLRIAVALRLGCDICEQHHCICGALVDSRGHHGLSCPKCAGRFPRHHALNDLIKRAMVMANIPCVLEPPGLSRTDGKRPDGLTLVPWERGRSLLWDATCVSTFAASHLAGTARVAGSAAENAARLKHQKYTDLKNRYLFVPVAVETSGVWGGEAKALIRDLGRRIASRGHDRRSGSYLAQRLSLAIQRGNAASIMGTFGPGMTRGGLLD

SEQ ID NO: 25153 - protein, 947 aa, Plutella xylostella
MTQPTSTCPHCPGSSRQFVVPRGLNVHIGRIHKNDLAHSQPAAAVPAATNLNPPRNAQVTSNFDLLASMRRNIRVLKHIPKGARCMAAGKLSHLIDLCVESNGRQEWYDLLTFPYSALRVPSSVDQRSLTAKVKDNVNGSAEPIVDDSFLTHRQGSIYRAIEAKVYDGDLRGAVRLLTSDSSLAPSTPETITALKEKHPTPSRPLSFPPEPNISSPFLSVTVSDVADAVDSFYSGSAAGLDGLRPQHLKELISVSAGDNGHKLLESLTRLCNFLLKGMLNLEVCPYLYGASLCALSKSDGGIRPIAVGSVFRRLVAKVGGRAVKSEMSVFLHPHQLGYGTALGCEAAIHATRSFAMTGCENASNDIILKVDLKNAFNSIERDGMLSKIQEHIPTLYPFLSQCYSLPSQLFYDSESISSQVGAQQGDPLGPLIFSLAINDVVKSLASPLNVWYLDDGTIGGNIDTVEKDMKAIIDMFKEMGLELNSNKCELFCCSPNIPNLSTITNLFPGIKLLDKANFTVLGAPIFPEGVPPLLDGKREGINKTVSGLKQLPAHVALTIFRCCLSMPKLTYALRTSPVWLFPANIANIDNCIKNVLEQVLNIKLEGDQWRQAALPIRHGGLGIRRVKETGLSAFLSSAHGVVDLVTRILSINGDGFRLPFVTEALEGWEAQCPGKELPDHLDVQKAWDDVLCKSVLDKIMESSIGVDLARVRASSKPESGSWLHALPSPQMGTLLDDDSLRIAVALRLGCDICEQHHCICGALVDSRGHHGLSCPKCAGRFPRHHALNDLIKRAMVMANIPCVLEPPGLSRTDGKRPDGLTLVPWERGRSLLWDATCVSTFAASHLAGTARVASSAAENAARLKHQKYTDLKNRYLFVPVAVETSGVWGGEAKALIRDLGRRIASRGHDRRSGSYLAQRLSLAIQRGNAASIMGTFGPGMTRGGLLD

SEQ ID NO: 25154 - protein, 888 aa, Trachelipus rathkii
MLIIAKANKIKRYDKRDKEKKQNQMFKEDQGRFYRELRNDSIKVSNPPPKEEVDRFWKGIYEDERMFNNQAEWLEQIKNSQETTNIEQMEHVAITKKEIEDVIKKSSNWKTPGPDRVQNVWLKKIRTLLEPLTACYNRIINGREEIPQWLTTGETVLIPKSEETQRPEKYRPITCLPTLYKVFTGVLAKRIQGHLDNNNIISEEQKGCCKNSYGTKDQLLINKMITENSRRAQKNLSMVWIDYKKAYDSVPHNWIREVLKIYKISPEIIRFIDNAMKIWKVNINLHYEEGTLEIEEVKIKRGIFQGDSISPLIFVLAINPLSALINGLQNGYRINSRNEKKPKIISHLFYMDDLKLYSSNREETIKQIEIVKRFSNDICMEFGLDKCAFVLLKKGRRIESENIEIEGDIIKELEQERTYKYLGIEESEKIENNIMKGKIKKEYRRRLKLILKTELNPRNKMQAINTLAIPVLSYGFGIIDWMQEDLNKLDVMTRKMLHAHKMTYKNQCVPRIHVSRKKGGMGVPTIDIIYKSEIIGIGKYLKGNDGRFIGWVHEHENLKPSTTSIIKKMNDYLRDVRFDGEGRNNESLEREIKNAKMTYKEKREEANLEQWKNHTFAKHHKNILDEAFIDTYKSNEVMIKGWLKSEDERTILAAQDQALRTNWFKKHIEGQNITDKCRMCSGGSESVCHILSECKFLLEKGTYTERHNNICRLIHYRLCRKFEIEVNTVNHWEHNPNNIEENNRVLILYDYNIPTDAQVTHNKPDIVIYNKTENKCLIIEVGVPWDGRVSAYEIEKEMKYQRLKYELRRLWNIDIVEIVPVIVGASGTIKKSLEKHLERLPVKVSTLELSMTVIKKSLSILRTVLGYIRMKTSEEGKINEGCSLGIKV

SEQ ID NO: 25155 - protein, 1001 aa, Trachelipus rathkii
MQNKKKIGNWFQMEKYTRIADKVLPRIIPDNCSLTEVNRLYYSVARAVADFMKAKVFKTKKAGKKSKNKEKIPPWKYRLQQEVSKLRQEVSIVDAYRRGVVTSEQTIRRVKNILRRENTVQSNQITQAIASRKMLIIAKANKIKRYDKRDKEKKQNQMFKEDQGRFYREIRNDSIKVSNPPPKEEVDRFWKGIYEDERMFNNQAEWLEQIKNSQETTNIEQMEHVAITKKEIEDVIKKSSNWKTPGPDRVQNVWLKKIRTLLEPLTACYNRIINGREEIPQWLTTGETVLIPKSEETQRPEKYRPITCLPTLYKVFTGVLAKRIQGHLDNNNIISEEQKGCCKNSYGTKDQLLINKMITENSRRAQKNLSMVWIDYKKAYDSVPHNWIREVLKIYKISPEIIRFIDNAMKIWKVNINLHYEEGTLEIEEVKIKRGIFQGDSISPLIFVLAINPLSALINGLQNGYRINSRNEKKPKIISHLFYMDDLKLYSSNREETFKQIEIVKRFSNDICMEFGLDKCAFVLLKKGRRIESENIEIEGDIIKELEQERTYKYLGIEESEKIENNIMKGKLKKEYRRRLKLILKTELNPRNKMQAINTLAIPVLSYGFGIIDWMQEDLNKLDVMTRKMLHAHKMTYKNQCVPRIHVSRKKGGMGVPTIDIIYKSEIIGIGKYLRGNDGRFIGWVHEHENLKPSTTSIIKKMNDYLRDVRFDGEGRNNESLEREIKNAKMTYKEKREEANLEQWKNHTFAKHHKNILDEAFIDTYKSNEVMIKGWLKSEDERTILAAQDQALRTNWFKKHIEGQNITDKCRMCSGGSESVCHILSECKFLLQKGTYTERHNNICRLIHYRLCRKFEIEVNTVNHWEHNPNNIEENNRVLILYDYNIPTDAQVTHNKPDIVIYNKTENKCLIIEVGVPWDGRVSAYEIEKEMKYQRLKYELRRLWNIDIIEIVPVIVGASGTIKKSLEKHLERLPVKVSTLELSMTVIKKSLSILRTVLGYR

SEQ ID NO: 25156 - protein, 868 aa, Trachelipus rathkii
MLIIAKANKIKRYDKRDKEKKQNQMFKEDQGRFYRELRNDSIKVSNPPPKEEVDRFWKGIYEDERMFNNQAEWLEQIKNSQETTNIEQMEHVAITKKEIEDVIKKSSNWKTPGPDRVQNVWLKKIRTLLEPLTACYNRIINGREEIPQWLTTGETVLIPKSEETQRPEKYRPITCLPTLYKVFTGVLAKRIQEHLDNNNIISEEQKGCCKNSYGTKDQLLINKMITENSRRAQKNLSMVWIDYKKAYDSVPHNWIREVLKIYKISPEIIRFIDNAMKIWKVNINLHYEEGTLEIEEVKIKRGIFQGDSISPLIFVLAINPLSALINGLQNGYRINSRNEKKPKIISHLFYMDDLKLYSSNREETFKQIEIVKRFSNDICMEFGLDKCAFVLLKKGRRIESENIEIEGDIIKELEQERTYKYLGIEESEKIENNIMKGKLKKEYRRRLKLILKTELNPRNKMQAINTLAIPVLSYGFGIIDWMQEDLNKLDVMTRKMLHAHKMTYKNQCVPRIHVSRKKGGMGVPTIDIIYKSEIIGIGKYLKGNDGRFIGWVHEHENLKPSTTSIIKKMNDYLRDVRFDGEGRNNESLEREIKNAKMTYKEKREEANLEQWKNHTFAKHHKNILDEAFIDTYKSNEVMIKGWLKSEDERTILAAQDQALRTNWFKKHIEGQNITDKCRMCSGGSESVCHILSECKFLLKKGTYTERHNNICRLIHYRLCRKFEIEVNTVNHWEHNPNNIEENNRVLILYDYNIPTDAQVTHNKPDIVIHNKTENKCLIIEVGVPWDGRVSAYEIEKEMKYQRLKYELRRLWNIDIIEIVPVIVGASGTIKKSLEKHLERLPVKVSTLELSMTVIKKSLSILRTVLGYR

SEQ ID NO: 25157 - protein, 1426 aa, Trachelipus rathkii
MGLDNPEVQPTGTSTSPAGLLEEPLDPPNPDNQPQKKKKASYNCRGAIRSMWSEGEKKEIFWCLTYARHEIFPRKGTSERAKQMMLKRKKIDGEKIENTPDGRFSSIATNIRIGKTNITKEQIKQIEEEVEEYIQGNFLNKNDEETSSGKKDEWTLSRNLYLMESYYIGELIPTKTNKSELWKYVIEKKEFGANDFMEYRFREKFKNVDRKAMIKQKLCILNFVKERKETGKRKMKSTLPTKEDLEEIKMKAQNIVENKMEMTLELVKNIKEKRTKECAAVKEKKRKQTKKQERTNKNKQETVTQVDKEKEMEILIDIKDLYQRENLDKDQTTIIEEEIVGSDILEVKEGNEENEMETDPENSDVEEMENIMDNTTEELEPDRERELMNEIMNVQTGNEESCSEEEMLIKIAKYRDEDLIKGIQGRCKIKKIGNWFQMEKYTRIADKVLPRIIPDNCSLTEVNRLYYSVARAVADFMKAKVFKTKKAGKKSKNKEKIPPWKYRLQQEVSKLRQEVSIVDAYRRGVVTSEQTIRRVKNILRRENTVQNNQITQAIASRKMLIIAKANKIKRYDKRDKEKKQNQMFKEDQGRFYREIRNDSIKVSNPPPKEEVDRFWKGIYEDERMFNNQAEWLEQIKNSQETTNIEQMEHVAITKKEIEDVIKKSSNWKTPGPDRVQNVWLKKIRTLLEPLTACYNRIINGREEIPQWLTTGETVLIPKSEETQRPEKYRPITCLPTLYKVFTGVLAKRIQGHLDNNNIISEEQKGCCKNSYGTKDQLLINKMITENSRRAQKNLSMVWIDYKKAYDSVPHNWIREVLKIYKISPEIIRFIDNAMKIWKVNINLHYEKGTLEIEEVKIKRGIFQGDSISPLIFVLAINPLSALINGLQNGYRINSRNEKKPKIISHLFYMDDLKLYSSNRGETIKQIEIVKRFSNDICMEFGLDKCAFVLLKKGRRIESENIEIEGDIIKELEQERTYKYLGIEESEKIENNIMKGKIKKEYRRRLKLILKTELNPRNKMQAINTLAIPVLSYGFGIIDWMQEDLNKLDVMTRKMLHAHKMTYKNQCVPRIHVSRKKGGMGVPTIDIIYKSEIIGIGKYLKGNDGRFIGWVHEHENLKPSTTSIIKKMNDYLRDVRFDGEGRNNESLEREIKNAKMTYKEKREEANLEQWKNHTFAKHHKNILDEAFIDTYKSNEVMIKGWLKSEDERTILAAQDQALRTNWFKKHIEGQNITDKCRMCSGGSESVCHILSECKFLLQKGTYTERHNNICRLIHYRLCRKFEIEVNTVNHWEHNPNNIEENNRVLILYDYNIPTDAQVTHNKPDIVIYNKTENKCLIIEVGVPWDGRVSAYEIEKEMKYQRLKYELRRLWNIDIIEIVPVIVGASGTIKKSLEKHLERLPVKVSTLELSMTVIKKSLSILRTVLGYR

SEQ ID NO: 25158 - protein, 1116 aa, Trachelipus rathkii
MEILIDIKDLYQRENLDKDQTTIIEEEIVGSDILEVKEGNEENEMETDPENSDVEEMENIMDNTTEELEPDRERELMNEIMNVQTGNEESCSEEEMLIKIAKYRDEDLIKGIQGRCKIKKIGNWFQMEKYTRIADKVLPRIIPDNCSLTEVNRLYYSVARAVADFMKAKVFKTKKAGKKKSKNKEKIPPWKYRLQQEVSKLRQEVSIVDAYRRGVVTSEQTIRRVKNILRRENTVQSNQITQAIASRKMLIIAKANKIKRYDKRDKEKKQNQMFKEDQGRFYRELRNDSIKVSNPPPKEEVDRFWKGIYEDERMFNNQAEWLEQIKNSQETTNIEQMEHVAITKKEIEDVIKKSSNWKTPGPDRVQNVWLKKIRTLLEPLTACYNRIINGREEIPQWLTTGETVLIPKSEETQRPEKYRPITCLPTLYKVFTGVLAKRIQGHLDNNNIISEEQKGCCKNSYGTKDQLLINKMITENSRRAQKNLSMVWIDYKKAYDSVPHNWIREVLKIYKISPEIIRFIDNAMKIWKVNINLHYEEGTLEIEEVKIKRGIFQGDSISPLIFVLAINPLSALINGLQNGYRINSRNEKKPKIISHLFYMDDLKLYSSNREETIKQIEIVKRFSNDICMEFGLDKCAFVLLKKGRRIESENIEIEEDIIKELEQERTYKYLGIEESEKIENNIMKGKIKKEYRRRLKLILKTELNPRNKMQAINTLAIPVLSYGFGIIDWMQEDLNKLDVMTRKMLHAHKMTYKNQCVPRIHVSRKKGGMGVPTVDIIYKSEIIGIGKYLKGNDGRFIGWVHEHENLKPSSTSIIKKMNDYLRDVRFDGEGRNNESLEREIKNAKMTYKEKREEANLEQWKNHTFAKHHKNILDEAFIDTYKSNEVMIKGWLKSEDERTILAAQDQALRTNWFKKHIEGQNITDKCRMCSGGSESVCHILSECKFLLQKGTYTERHNNICRLIHYRICRKFEIEVNTVNHWEHNPNNIEENNRVLILYDYNIPTDAQVTHNKPDIVIYNKTENKCLIIEVGVPWDGRVSAYEIEKEMKYQRLKYELRRLWNIDIIEIVPVIVGASGTIKKSLEKHLERLPVKVSTLELSMTVIKKSLSILRTVLGYR

SEQ ID NO: 25159 - protein, 1525 aa, Trachelipus rathkii
MLTFSLVGEISAMGWPRCGFSNPKRLGRRYGGLHVVERTNCKNWIITMRRNKKEKHCQGIGSPGPGPYSLRKRGEGGRSSLERSKQSLQTEAMGLDNPEVQPTGTSTSPAGLLEEPLDPPNPDNQPQKKKKASYNCRGAIRSMWSEGEKKEIFWCLTYARHEIFPRKGTSERAKQMMLKRKKIDGEKIENTPDMRFSSIATNIRIGKTNITKEQIKKKKRQIKQIEEEVEEYIQGNFLNKNDEETSSGEEDEWTLSRNLYLMESYYIGELIPTKTNKSELWKYVIEKKEFGANDFMEYRFREKFKNVDRKAMIKQKLCILNFVKERKETGKRKMKSTLPTKEDLEEIKMKAQNIVENKMEMTLELVKNIKEKRTKECAAVKEKKTKQTKKQERTNKNKQETVTQVDKEKEMEILIDIKDLYQRENLDKDQTTIIEEEIVGSDILEVKEGNEENEMETDPENSDVEEMENIMDNTTEELEPDRERELMNEIMNVQTGNEESCSEEEMLIKIAKYRDEDLIKGIQGRCKIKKIGNWFQMEKYTRIADKVLPRIIPDNCSLTEVNRLYYSVARAVADFMKAKVFKTKKAGKKSKNKEKIPPWKYRLQQEVSKLRQEVSIVDAYRRGVVTSEQTIRRVKNILRRENTVQSNQITQAIASRKMLIIAKANKIKRYDKRDKEKKQNQMFKEDQGRFYRELRNDSIKVSNPPPKEEVDRFWKGIYEDERMFNNQAEWLEQIKNSQETTNIEQMEHVAITKKEIEDVIKKSSNWKTPGPDRVQNVWLKKIRTLLEPLTACYNRIINGREEIPQWLTTGETVLIPKSEETQRPEKYRPITCLPTLYKVFTGVLAKRIQGHLDNNNIISEEQKGCCKNSYGTKDQLLINKMITENSRRAQKNLSMVWIDYKKAYDSVPHNWIREVLKIYKISPEIIRFIDNAMKIWKVNINLHYEEGTLEIEEVKIKRGIFQGDSISPLIFVLAINPLSALINGLQNGYRINSRNEKKPKIISHLFYMDDLKLYSSNREETIKQIEIVKRFSNDICMEFGLDKCAFVLLKKGRRIESENIEIEEDIIKELEQERTYKYLGIEESEKIENNIMKGKIKKEYRRRLKLILKTELNPRNKMQAINTLAIPVLSYGFGIIDWMQEDLNKLDVMTRKMLHAHKMTYKNQCVPRIHVSRKKGGMGVPTIDIIYKSEIIGIGKYLKGNDGRFIGWVHEHENLKPSTTSIIKKMNDYLRDVRFDGEGRNNESLEREIKNAKMTYKEKREEANLEQWKNHTFAKHHKNILDEAFIDTYKSNEVMIKGWLKSEDERTILAAQDQALRTNWFKKHIEGQNITDKCRMCSGGSESVCHILSECKFLLEKGTYTERHNNICRLIHYRLCRKFEIEVNTVNHWEHNPNNIEENNRVLILYDYNIPTDAQVTHNKPDIVIYNKTENKCLIIEVGVPWDGRVSAYEIEKEMKYQRLKYELRRLWNIDIIEIVPVIVGASGTIKKSLEKHLERLPVKVSTLELSMTVIKKSLSILRTVLGYR

SEQ ID NO: 25160 - protein, 1195 aa, Trachelipus rathkii
MFALSCKPFHRLGVYKNSLKAQKIVENKMEMTLELVKNIKEKRTKECAAVKEKKTKQTKKQERTNKNKQETVTQVDKEKEMEILIDIKDLYQRENLDKDQTTIIEEEIVGSDILEVKEGNEENEMETDPENSDVEEMENIMDNTTEELEPDRERELMNEIMNVQTGNEESCSEEEMLIKIAKYRDEDLIKGIQGRCKIKKIGNWFQMEKYTRIADKVLPRIIPDNCSLTEVNRLYYSVARAVADFMKAKVFKTRSREKKSKNKEKIPPWKYRLQQEVSKLRQEVSIVDAYRRGVVTSEQTIRRVKNILRRENTVQNNQITQAIASRKMLIIAKANKIKRYDKRDKEKKQNQMFKEDQGRFYRELRNDSIKVSNPPPKEEVDRFWKGIYEDERMFNNQAEWLEQIKNSQETTNIEQMEHVAITKKEIEDVIKKSSNWKTPGPDRVQNVWLKKIRTLLEPLTACYNRIINGREEIPQWLTTGETVLIPKSEETQRPEKYRPITCLPTLYKVFTGVLAKRIQGHLDNNNIISEEQKGCCKNSYGTKDQLLINKMITENSRRAQKNLSMVWIDYKKAYDSVPHNWIREVLKIYKISPEIIRFIDNAMKIWKVNINLHYEKGTLEIEEVKIKRGIFQGDSISPLIFVLAINPLSALINGLQNGYRINSRNEKKPKIISHLFYMDDLKLYSSNREETIKQIEIVKRFSNDICMEFGLDKCAFVLLKKGRRIESENIEIEGDIIKELEQERTYKYLGIEESEKIENNIMKGKIKKEYRRRLKLILKTELNPRNKMQAINTLAIPVLSYGFGIIDWMQEDLNKLDVMTRKMLHAHKMTYKNQCVPRIHVSRKKGGMGVPTIDIIYKSEIIGIGKYLKGNDGRFIGWVHEHENLKPSTTSIIKKMNDYLRDVRFDGEGRNNESLEREIKNAKMTYKEKREEANLEQWKNHTFAKHHKNILDEAFIDTYKSNEVMIKGWLKSEDERTILAAQDQALRTNWFKKHIEGQNITDKCRMCNEWSESVCHILSECKFLLQKGTYTERHNNICRLIHYRLCRKFEIEVNTVNHWEHNPNNIEENNRVLILYDYNIPTDAQVTHNKPDIVIYNKTENKCLIIEVGVPWDGRVSAYEIEKEMKYQRLKYELRRLWNIDIIEIVPVIVGASGTIKKSLEKHLERLPVKVSTLELSMTVIKKSLSILRTVLGYR

SEQ ID NO: 25161 - protein, 989 aa, Trachelipus rathkii
MEKYTRIADKVLPRIIPANCSLTEVNRLYYAVARAVADCMKAKVFKTKKAGKKGKNKEKIPPWKYRLQQEVSKLRQEVSIVDAYRRGVITSEQTIRRVKNILRRENTVQSNQVTQAIASRKMLIIAKANKIKRYDKRDKEKKQNQMFKEDQGRFYRELRNDSIKVSNPPPKEEVDRFWKGIYEDERMFNNQAEWLEQIKNSQETTNIEQMEHVAITKKEIEDVIKKSSNWKTPGPDRVQNVWLKKIRTLLEPLTACYNRIINGREEIPQWLTTGETVLIPKSEETQRPEKYRPITCLPTLYKVFTGVLAKRIQGHLDNNNIISEEQKGCCKNSYGTKDQLLINKMITENSRRAQKNLSMVWIDYKKAYDSVPHNWIREVLKIYKISPEIIRFIDNAMKIWKVNINLHYEKGTLEIEEVKIKRGIFQGDSISPLIFVLAINPLSALINGLQNGYRINSRNEKKPKIISHLFYMDDLKLYSSNREETIKQIEIVKRFSNDICMEFGLDKCAFVLLKKGRRIESENIEIEGDIIKELEQERTYKYLGIEESEKIENNIMKGKIKKEYRRRLKLILKSELNPRNKMQAINTLAIPVLSYGFGIIDWMQEDLNKLDVMTRKMLHAHKMTYKNQCVPRIHVSRKKGGMGVPTIDIIYKSEIIGIGKYLKGNDGRFIGWVHEHENLKPSTTSIIKKMNDYLRDVRFDGEGRNNESLEREIKNAKMTYKEKREEANLEQWKNHTFAKHHKNILDEAFIDTYKSNEVMIKGWLKSEDERTILAAQDQALRTNWFKKHIEGQNITDKCRMCNEGSESVCHILSGCKFLLLRGSYTERHNNICRLIHYRLCRKFEIEVNTVNHWEHNPNNIEENNRVLILYDYNIPTDAQVTHNKPDIVIHNKTENKCWIIEVGVPWDGGVSAYEREKELKYQRLKYELRRLWNIDMIEIVPVIVGATGTIKKSLEKHLERLPVKVSTLELSMTVIKKSLSILRTVLGYR

SEQ ID NO: 25162 - protein, 1071 aa, Trachelipus rathkii
METDPENSDVEEMENIMDNTTEELEPDRERELMNEIMNVQTGNEESCSEEEMLIKIAKYRDEDLIKGIQGRCKIKKIGNWFQMEKYTRIADKVLPRIIPDNCSLTEVNRLYYSVARAVADFMKAKVFKTKKAGKKSKNKEKIPPWKYRLQQEVSKLRQEVSIVDAYRRGVVTSEQTIRRVKNILRRENTVQSNQITQAIASRKMLIIAKANKIKRYDKRDKEKKQNQMFKEDQGRFYRELRNDSIKVSNPPPKEEVDRFWKGIYEDERMFNNQAEWLEQIKNSQETTNIEQMEHVAITKKEIEDVIKKSSNWKTPGPDRVQNVWLKKIRTLLEPLTACYNRIINGREEIPQWLTTGETVLIPKSEETQRPEKYRPITCLPTLYKVFTGVLAKRIQGHLDNNNIISEEQKGCCKNSYGTKDQLLINKMITENSRRAQKNLSMVWIDYKKAYDSVPHNWIREVLKIYKISPEIIRFIDNAMKIWKVNINLHYEEGTLEIEEVKIKRGIFQGDSISPLIFVLAINPLSALINGLQNGYRINSRNEKKPKIISHLFYMDDLKLYSSNREETIKQIEIVKRFSNDICMEFGLDKCAFVLLKKGRRIESENIEIEEDIIKELEQERTYKYLGIEESEKIENNIMKGKIKKEYRRRLKLILKTELNPRNKMQAINTLAIPVLSYGFGIIDWMQEDLNKLDVMTRKMLHAHKMTYKNQCVPRIHVSRKKGGMGVPTVDIIYKSEIIGIGKYLKGNDGRFIGWVHEHENLKPSTTSIIKKMNDYLRDVRFDGEGRNNESLEREIKNAKMTYKEKREEANLEQWKNHTFAKHHKNILDEAFIDTYKSNEVMIKGWLKSEDERTILAAQDQALRTNWFKKHIEGQNITDKCRMCSGGSESVCHILSECKFLLQKGTYTERHNNICRLIHYRLCRKFEIEVNTVNHWEHNPNNIEENNRVLILYDYNIPTDAQVTHNKPDIVIYNKTENKCLIIEVGVPWDGRVSAYEIEKEMKYQRLKYELRRLWNIDIIEIVPVIVGASGTIKKSLEKHLERLPVKVSTLELSMTVIKKSLSILRTVLGYR

SEQ ID NO: 25163 - protein, 989 aa, Trachelipus rathkii
MEKYTRIADKVLPRIIPDNCSLTEVNRLYYSVARAVADFMKAKVFKTKKAGKKSKNKEKIPPWKYRLQQEVSKLRQEVSIVDAYRRGVVTSEQTIRRVKNILRRENTVQSNQITQAIASRKMLIIAKANKIKRYDKRDKEKKQNQMFKEDQGRFYRELRNDSIKVSNPPPKEEVDRFWKGIYEDERMFNNQAEWLEQIKNSQETTNIEQMEHVAITKKEIEDVIKKSSNWKTPGPDRVQNVWLKKIRTLLEPLTACYNRIINGREEIPQWLTTGETVLIPKSEETQRPEKYRPITCLPTLYKVFTGVLAKRIQGHLDNNNIISEEQKGCCKNSYGTKDQLLINKMITENSRRAQKNLSMVWIDYKKAYDSVPHNWIREVLKIYKISPEIIRFIDNAMKIWKVNINLHYEEGTLEIEEVKIKRGIFQGDSISPLIFVLAINPLSALINGLQNGYRINSRNEKKPKIISHLFYMDDLKLYSSNREETFKQIEIVKRFSNDICMEFGLDKCAFVLLKKGRRIESENIEIEGDIIKELEQERTYKYLGIEESEKIENNIMKGKLKKEYRRRLKLILKTELNPRNKMQAINTLAIPVLSYGFGIIDWMQEDLNKLDVMTRKMLHAHKMTYKNQCVPRIHVSRKKGGMGVPTIDIIYKSEIIGIGKYLKGNDGRFIGWVHEHENLKPSTTSIIKKMNDYLRDVRFDGEGRNNESLEREIKNAKMTYKEKREEANLEQWKNHTFAKHHKNILDEAFIDTYKSNEVMIKGWLKSEDERTILAAQDQALRTNWFKKHIEGQNITDKCRMCSGGSESVCHILSECKFLLKKGTYTERHNNICRLIHYRLCRKFEIEVNTVNHWEHNPNNIEENNRVLILYDYNIPTDAQVTHNKPDIVIYNKTENKCLIIEVGVPWDGRVSAYEIEKEMKYQRLKYELRRLWNIDIIEIVPVIVGASGTIKKSLEKHLERLPVKVSTLELSMTVIKKSLSILRTVLGYR

SEQ ID NO: 25164 - protein, 1543 aa, Trachelipus rathkii
MLATLFYHKLYNLSITHPFPILPRSMLTFSLVGEISAMGWPRCGFSNLKRLGRRYGGLHVVERTNCKNWIITMRRNKKEKHCQGIGSPGPGPYSLRKRGEGGRSSLERSKQSLQAEAMGLDNPEVQPTGTSTSPAGLLEEPLDPPNPDNQPQKKKKASYNCRGAIRSMWSEGEKKEIFWCLTYARHEIFPRKGTSERAKQMMLKRKKIDGEKIENTPDMRFSSIATNIRIGKTNITKEQIKQIEEEVEEYIQGNFLNKNDEETSSGKKDEWTLSRNLYLMESYYIGELIPTKTNKSELWKYVIEKKEFSANDFMEYRFREKFKNVDRKAMIKQKLCILNFVKERKETGKRKMKSTLPTKEDLEEIKMKAQNIVENKMEMTLELVKNIKEKRTKECAAVKEKKTKQTKKQERTNKNKQETVTQVDKEKEMEILIDIKDLYQRENLDKDQTTIIEEEIVGSDILEVKEGNEENEMETDPENSDVEEMENIMDNTTEELEPDRERELMNEIMNVQTGNEESCSEEEMLIKIAKYRDEDLIKGIQGRCKIKKIGNWFQMEKYTRIADKVLPRIIPDNCSLTEVNRLYYSVARAVADFMKAKVFKTKKAGKKGKNKEKIPPWKYRLQQEVSKLRQEVSIVDAYRRGVVTSEQTIRRVKNILRRENTVQSNQITQAIASRKMLIIAKANKIKRYDKRDKEKKQNQMFKEDQGRFYRELRNDSIKVSNPPPKEEVDRFWKGIYEDERMFNNQAEWLEQIKNSQETTNIEQMEHVAITKKEIEDVIKKSSNWKTPGPDRVQNVWLKKIRTLLEPLTACYNRIINGREEIPQWLTTGETVLIPKSEETQRPEKYRPITCLPTLYKVFTGVLAKRIQGHLDNNNIISEEQKGCCKNSYGTKDQLLINKMITENSRRAQKNLSMVWIDYKKAYDSVPHNWIREVLKIYKISPEIIRFIDNAMKIWKVNINLHYEEGTLEIEEVKIKRGIFQGDSISPLIFVLAINPLSALINGLQNGYRINSRNEKKPKIISHLFYMDDLKLYSSNREETIKQIEIVKRFSNDICMEFGLDKCAFVLLKKGRRIESENIEIEGDIIKELEQERTYKYLGIEESEKIENNIMKGKLKKEYRRRLKLILKTELNPRNKMQAINTLAIPVLSYGFGIIDWMQEDLNKLDVMTRKMLHAHKMTYKNQCVPRIHVSRKKGGMGVPTIDIIYKSEIIGIGKYLKGNDGRFIGWVHEHENLKPSTTSIIKKMNDYLRDVRFDGEGRNNESLEREIKNAKMTYKEKREEANLEQWKNHTFAKHHKNILDEAFIDTYKSNEVMIKGWLKSEDERTILAAQDQALRTNWFKKHIEGQNITDKCRMCSGGSESVCHILSECKFLLQKGTYTERHNNICRLIHYRLCRKFEIEVNTVNHWEHNPNNIEENNRVLILYDYNIPTDAQVTNNKPDIVIYNKTENKCLIIEVGVPWDGRVSAYEIEKEMKYQRLKYELRRLWNIDIIEIVPVIVGASGTIKKSLEKHLERLPVKVSTLELSMTVIKKSLSILRTVLGYR

SEQ ID NO: 25165 - protein, 1020 aa, Trachelipus rathkii
MLTHQNIKLFKCSECDYECNHKGNLRSHMLTHQNIKLFKCSECDYECNQKGALKTHMLIHQNIKLFKCSECDYECNLKGNLRLHMLTHQNIKLFKCSECDYGCKLRQEVSIVDAYRRGVVTSEQTIRRVKNILRRENTVQSNQITQAIASRKMLIIAKANKIKRYDKRDKEKKQNQMFKEDQGRFYRELRNDSIKVSNPPPKEEVDRFWKGIYEDERMFNNQAEWLEQIKNSQETTNIEQMEHVAITKKEIEDVIKKSSNWKTPGPDRVQNVWLKKIRTLLEPLTACYNRIINGREEIPQWLTTGETVLIPKSEETQRPEKYRPITCLPTLYKVFTGVLAKRIQGHLDNNNIISEEQKGCCKNSYGTKDQLLINKMITENSRRAQKNLSMVWIDYKKAYDSVPHNWIREVLKIYKISPEIIRFIDNAMKIWKVNINLHYEEGTLEIEEVKIKRGIFQGDSISPLIFVLAINPLSALINGLQNGYRINSRNEKKPKIISHLFYMDDLKLYSSNREETFKQIEIVKRFSNDICMEFGLDKCAFVLLKKGRRIESENIEIEGDIIKELEQERTYKYLGIEESEKIENNIMKGKLKKEYRRRLKLILKTELNPRNKMQAINTLAIPVLSYGFGIIDWMQEDLNKLDVMTRKMLHAHKMTYKNQCVPRIHVSRKKGGMGVPTIDIIYKSEIIGIGKYLKGNDGRFIGWVHEHENLKPSTTSIIKKMNDYLRDVRFDGEGRNNESLEREIKNAKMTYKEKREEANLEQWKNHTFAKHHKNILDEAFIDTYKSNEVMIKGWLKSEDERTILAAQDQALRTNWFKKHIEGQNITDKCRMCSGGSESVCHILSECKFLLQKGTYTERHNNICRLIHYRLCRKFEIEVNTVNHWEHNPNNIEENNRVLILYDYNIPTDAQVTHNKPDIVIYNKTENKCLIIEVGVPWDGRVSAYEIEKEMKYQRLKYELRRLWNIDIIEIVPVIVGASGTIKKSLEKHLERLPVKVSTLELSMTVIKKSLSILRTVLGYR

SEQ ID NO: 25166 - protein, 868 aa, Trachelipus rathkii
MLIIAKANKIKRYDKRDKEKKQNQMFKEDQGRFYREIRNDSIKVSNPPPKEEVDRFWKGIYEDERMFNNQAEWLEQIKNSQETTNIEQMEHVAITKKEIEDVIKKSSNWKTPGPDRVQNVWLKKIRTLLEPLTACYNRIINGREEIPQWLTTGETVLIPKSEETQRPEKYRPITCLPTLYKVFTGVLAKRIQGHLDNNNIISEEQKGCCKNSYGTKDQLLINKMITENSRRAQKNLSMVWIDYKKAYDSVPHNWIREVLKIYKISPEIIRFIDNAMKIWKVNINLHYEKGTLEIEEVKIKRGIFQGDSISPLIFVLAINPLSALINGLQNGYRINSRNEKKPKIISHLFYMDDLKLYSSNREETIKQIEIVKRFSNDICMEFGLDKCAFVLLKKGRRIESENIEIEGDIIKELEQERTYKYLGIEESEKIENNIMKGKIKKEYRRRLKLILKTELNPRNKMQAINTLAIPVLSYGFGIIDWMQEDLNKLDVMTRKMLHAHKMTYKNQCVPRIHVSRKKGGMGVPTIDIIYKSEIIGIGKYLKGNDGRFIGWVHEHENLKPSTTSIIKKMNDYLRDVRFDGEGRNNESLEREIKNAKMTYKEKREEANLEQWKNHTFAKHHKNILDEAFIDTYKSNEVMIKGWLKSEDERTILAAQDQALRTNWFKKHIEGQNITDKCRMCSGGSESVCHILSECKFLLQKGTYTERHNNICRLIHYRLCRKFEIEVNTVNHWEHNPNNIEENNRVLILYDYNIPTDAQVTHNKPDIVIYNKTENKCLIIEVGVPWDGRVSAYEIEKEMKYQRLKYELRRLWNIDIIEIVPVIVGASGTIKKSLEKHLERLPVKVSTLELSMTVIKKSLSILRTVLGYR

SEQ ID NO: 25167 - protein, 1518 aa, Trachelipus rathkii
MLTFSAVGEISAMGWPRCGFSNPKRLGRRYGGLHVVERTNCKNWIITMRRNKKEKHCQGIGSPGPGPYSLRKRGEGGRSSLERSKQSLQTEAMGLDNPEVQPTGTSTSPAGLLEEPLDPPNPDNQPQKKKKASYNCRGAIRSMWSEGEKKEIFWCLTYARHEIFPRKGTSERAKQMMLKRKKIDGEKIENTPDMRFSSIATNIRIGKTNITKEQIKQIEEEVEEYIQGNFLNKNDEETSSGKKDEWTLSRNLYLMESYYIGELIPTKTNKSELWKYVIEKKEFGANDFMEYRFREKFKNVDRKAMIKQKLCILNFVKERKETGKRKMKSTLPTKEDLEEIKMKAQNIVENKMEMTLELVKNIKEKRTKECAAVKEKKTKQTKKQERTNKNKQETVTQVDKEKEMEILIDIKDLYQRENLDKDQTTIIEEEIVGSDILEVKEGNEENEMETDPENSDVEEMENIMDNTTEELEPDRERELMNEIMNVQTGNEESCSEEEMLIKIAKYRDEDLIKGIQGRCKIKKIGNWFQMEKYTRIADKVLPRIIPDNCSLTEVNRLYYSVARAVADFMKAKVFKTKKAGKKGKNKEKIPPWKYRLQQEVSKLRQEVSIVDAYRRGVVTSEQTIRRVKNILRRENTVQSNQITQAIASRKMLIIAKANKIKRYDKRDKEKKQNQMFKEDQGRFYRELRNDSIKVSNPPPKEEVDRFWKGIYEDERMFNNQAEWLEQIKNSQETTNIEQMEHVAITKKEIEDVIKKSSNWKTPGPDRVQNVWLKKIRTLLEPLTACYNRIINGREEIPQWLTTGETVLIPKSEETQRPEKYRPITCLPTLYKVFTGVLAKRIQGHLDNNNIISEEQKGCCKNSYGTKDQLLINKMITENSRRAQKNLSMVWIDYKKAYDSVPHNWIREVLKIYKISPEIIRFIDNAMKIWKVNINLHYEEGTLEIEEVKIKRGIFQGDSISPLIFVLAINPLSALINGLQNGYRINSRNEKKPKIISHLFYMDDLKLYSSNREETIKQIEIVKRFSNDICMEFGLDKCAFVLLKKGRRIESENIEIEGDIIKELEQERTYKYLGIEESEKIENNIMKGKIKKEYRRRLKLILKTELNPRNKMQAINTLAIPVLSYGFGIIDWMQEDLNKLDVMTRKMLHAHKMTYKNQCVPRIHVSRKKGGMGVPTIDIIYKSEIIGIGKYLKGNDGRFIGWVHEHENLKPSTTSIIKKMNDYLRDVRFDGEGRNNESLEREIKNAKMTYKEKREEANLEQWKNHTFAKHHKNILDEAFIDTYKSNEVMIKGWLKSEDERTILAAQDQALRTNWFKKHIEGQNITDKCRMCSGGSESVCHILSECKFLLEKGTYTERHNNICRLIHYRLCRKFEIEVNTVNHWEHNPNNIEENNRVLILYDYNIPTDAQVTHNKPDIVIYNKTENKCLIIEVGVPWDGRVSAYEIEKEMKYQRLKYELRRLWNIDIIEIVPVIVGASGTIKKSLEKHLERLPVKVSTLELSMTVIKKSLSILRTVLGYR

SEQ ID NO: 25168 - protein, 1115 aa, Trachelipus rathkii
MEILIDIKDLYQRENLDKDQTTIIEEEIVGSDILEVKEGNEENEMETDPENSDVEEMENIMDNTTEELEPDRERELMNEIMNVQTGNEESCSEEEMLIKIAKYRDEDLIKGIQGRCKIKKIGNWFQMEKYTRIADKVLPRIIPDNCSLTEVNRLYYSVARAVADFMKAKVFKTKKAGKKSKNKEKIPPWKYRLQQEVSKLRQEVSIVDAYRRGVVTSEQTIRRVKNILRRENTVQSNQITQAIASRKMLIIAKANKIKRYDKRDKEKKQNQMFKEDQGRFYRELRNDSIKVSNPPPKEEVDRFWKGIYEDERMFNNQAEWLEQIKNSQETTNIEQMEHVAITKKEIEDVIKKSSNWKTPGPDRVQNVWLKKIRTLLEPLTACYNRIINGREEIPQWLTTGETVLIPKSEETQRPEKYRPITCLPTLYKVFTGVLAKRIQGHLDNNNIISEEQKGCCKNSYGTKDQLLINKMITENSRRAQKNLSMVWIDYKKAYDSVPHNWIREVLKIYKISPEIIRFIDNAMKIWKVNINLHYEEGTLEIEEVKIKRGIFQGDSISPLIFVLAINPLSALINGLQNGYRINSRNEKKPKIISHLFYMDDLKLYSSNREETFKQIEIVKRFSNDICMEFGLDKCAFVLLKKGRRIESENIEIEGDIIKELEQERTYKYLGIEESEKIENNIMKGKIKKEYRRRLKLILKTELNPRNKMQAINTLAIPVLSYGFGIIDWMQEDLNKLDVMTRKMLHAHKMTYKNQCVPRIHVSRKKGGMGVPTIDIIYKSEIIGIGKYLKGNDGRFIGWVHEHENLKPSTTSIIKKMNDYLRDVRFDGEGRNNESLEREIKNTKMTYKEKREEANLEQWKNHTFAKHHKNILDEAFIDTYKSNEVMIKGWLKSEDERTILAAQDQALRTNWFKKHIEGQNITDKCRMCSGGSESVCHILSECKFLLQKGTYTERHNNICRLIHYRLCRKFEIEVNTVNHWEHNPNNIEENNRVLILYDYNIPTDAQVTHNKPDIVIYNKTENKCLIIEVGVPWDGRVSAYEIEKEMKYQRLKYELRRLWNIDMIEIVPVIVGATGTIEKSLEKHLERLPVKVSTLELSMTVIKKSLSILRTVLGYR

SEQ ID NO: 25169 - protein, 1512 aa, Trachelipus rathkii
MLVHRNIKWPRCGFSNPKRLGRRYGGLHVVERTNCKNWIITMRRNKKEKHCQGIGSPGPGPYSLRKRGEGGRSSLGAANNLSKLKPMGLDNPEVQPTGTSTSPAGLLEEPLDPPNPDNQPQKKKKASYNCRGAIRSMWSEGEKKEIFWCLTYARHEIFPRKGTSERAKQMMLKRKKIDGEKIENTPDMRFSSIATNIRIGKTNITKEQIKQIEEEVEEYIQGNFLNKNDEETSSGKKDEWTLSRNLYLMESYYIGELIPTKTNKSELWKYVIEKKEFGANDFMEYRFREKFKNVDRKAMIKQKLCILNFVKERKETGKRKMKSTLPTKEDLEEIKMKAQNIVENKMEMTLELVKNIKEKRTKECAAVKEKKTKQTKKQERTNKNKQETVTQVDKEKEMEILIDIKDLYQRENLDKDQTTIIEEEIVGSDILEVKEGNEENEMETDPENSDVEEMENIMDNTTEELEPDRERELMNEIMNVQTGNEESCSEEEMLIKIAKYRDEDLIKGIQGRCKIKKIGNWFQMEKYTRIADKVLPRIIPDNCSLTEVNRLYYSVARAVADFMKAKVFKTKKAGKKGKNKEKIPPWKYRLQQEVSKLRQEVSIVDAYRRGVVTSEQTIRRVKNILRRENTVQSNQITQAIASRKMLIIAKANKIKRYDKRDKEKKQNQMFKEDQGRFYRELRNDSIKVSNPPPKEEVDRFWKGIYEDERMFNNQAEWLEQIKNSQETTNIEQMEHVAITKKEIEDVIKKSSNWKTPGPDRVQNVWLKKIRTLLEPLTACYNRIINGREEIPQWLTTGETVLIPKSEETQRPEKYRPITCLPTLYKVFTGVLAKRIQGHLDNNNIISEEQKGCCKNSYGTKDQLLINKMITENSRRAQKNLSMVWIDYKKAYDSVPHNWIREVLKIYKISPEIIRFIDNAMKIWKVNINLHYEEGTLEIEEVKIKRGIFQGDSISPLIFVLAINPLSALINGLQNGYRINSRNEKKPKIISHLFYMDDLKLYSSNRGETIKQIEIVKRFSNDICMEFGLDKCAFVLLKKGRRIESENIEIEGDIIKELEQERTYKYLGIEESEKIENNIMKGKLKKEYRRRLKLILKTELNPRNKMQAINTLAIPVLSYGFGIIDWMQEDLNKLDVMTRKMLHAHKMTYKNQCVPRIHVSRKKGGMGVPTIDIIYKSEIIGIGKYLKGNDGRFIGWVHEHENLKPSTTSIIKKMNDYLRDVRFDGEGRNNETLEREIKNAKMTYKEKREEANLEQWKNHTFAKHHKNILDEAFIDTYKSNEVMIKGWLKSEDERTILAAQDQALRTNWFKKHIEGQNITDKCRMCSGGSESVCHILSECKFLLEKGAYTERHNNICRLIHYRLCRKFEIEVNTVNHWEHNPNNIEENNRVLILYDYNIPTDAQVTHNKPDIVIYNKTENKCLIIEVGVPWDGRVSAYEIEKEMKYQRLKYELRRLWNIDIIEIVPVIVGASGTIKKSLEKHLERLPVKVSTLELSMTVIKKSLSILRTVLGYR

SEQ ID NO: 25170 - protein, 989 aa, Trachelipus rathkii
MEKYTRIADKVLPRIIPDNCSLTEVNRLYYSVARAVADFMKAKVFKTKKAGKKGKNKEKIPPWKYRLQQEVSKLRQEVSIVDAYRRGVVTSEQTIRRVKNILRRENTVQSNQITQAIASRKMLIIAKANKIKRYDKRDKEKKQNQMFKEDQGRFYRELRNDSIKVSNPPPKEEVDRFWKGIYEDERMFNNQAEWLEQIKNSQETTNIEQMEHVAITKKEIEDVIKKSSNWKTPGPDRVQNVWLKKIRTLLEPLTACYNRIINGREEIPQWLTTGETVLIPKSEETQRPEKYRPITCLPTLYKVFTGVLAKRIQGHLDNNNIISEEQKGCCKNSYGTKDQLLINKMITENSRRAQKNLSMVWIDYKKAYDSVPHNWIREVLKIYKISPEIIRFIDNAMKIWKVNINLHYEEGTLEIEEVKIKRGIFQGDSISPLIFVLAINPLSALINGLQNGYRINSRNEKKPKIISHLFYMDDLKLYSSNREETIKQIEIVKRFSNDICMEFGLDKCAFVLLKKGRRIESENIEIEGDIIKELEQERTYKYLGIEESEKIENNIMKGKIKKEYRRRLKLILKTELNPRNKMQAINTLAIPVLSYGFGIIDWMQEDLNKLDVMTRKMLHAHKMTYKNQCVPRIHVSRKKGGMGVPTIDIIYKSEIIGIGKYLKGNDGRFIGWVHEHENLKPSTTSIIKKMNDYLRDVRFDGEGRNNESLEREIKNAKMTYKEKREEANLEQWKNHTFAKHHKNILDEAFIDTYKSNEVMIKGWLKSEDERTILAAQDQALRTNWFKKHIEGQNITDKCRMCSGGSESVCHILSECKFLLQKGTYTERHNNICRLIHYRLCRKFEIEVNTVNHWEHNPNNIEENNRVLILYDYNIPTDAQVTHNKPDIVIYNKTENKCLIIEVGVPWDGRVSAYEIEKEMKYQRLKYELRRLWNIDIIEIVPVIVGASGTIKKSLEKHLERLPVKVSTLELSMTVIKKSLSILRTVLGYR

SEQ ID NO: 25171 - protein, 1291 aa, Leptinotarsa peninsularis
MKNDNSRKSKKLSSTRKSDGNEIIVCPETNSNLECSFCNRIFQTKRGVNIHMRKKHHSIPFCQNSSESSNVNGNLTSKTLNAHLAYLKQNVSILKRIPKSSRMFVADSLANTIDNCIKANSLDSWKKLLCFAYTSFCIPLSKKPYKETITSIIRRNMKNAPNLSKFPPRDRKPPTKQNKSKYIINKVSDGDITSAIRILSSTDSITTFDNETFKLLKSKHPSENTHLELNIPGNGNEILDPLQITEIEVLRAVRSFRTGSSGGLDSLRPSHFQDLLSKSSGSKGEKLLSSLTSLCNFLLAGRVNSEILPILYGASLQALKKKCGGIRPIAVGTFFRRLVAKISCFTIKNIFGDLFRPVQFGFGTSGGCEVVAHAARRFINQHPNSSSTIFLKLDFQNAFNMIHRRVFLERILDLTPHLFNFISQCYQKPTFLNFGDNVIMSERGVQQGDPLGPALFCLAIDRLTKSIQTDFNCWYLDDGSIGGHPDIVFSQFKNILSSSEEIGLKLNFEKCEIFFLNSQDASVIEKFKSLTPGIRTIDRHELTLLGAPLSEESLAECLIQKTTSLNLMASHIKSLPAHIGYFLLKHSLAIPKLMYTLRSSPTWRCRKELGQFDSALRGILEQITNNNFTNESWIQASLPVNLGGIGIRQSSSLALPAFLSSFNSVKHLINFILPKFFFDIDDSFYLEAEKIWMEKSNAPIPDNKGSQKSWDLPLLQMLSTELMAAAKDSLTDQARLKAVITKESGAWLNALPVASLGTLLDDESFRISIGIRLGCLICVNHQCRCGFVVDENGTHGLSCKFSAGRFSRHYAVNDIIKRALSTANIPSVIEPLGISRDDGKRPDGMSLIPWRHGKPLVWDFTCVDTLARSHLNSTSQSSGGAAEYAEKMKQRKYICLEDRYIFYPIAIETFGSFGSFASDFFRDIGQKLITVTGDSRARSFLIQRISIAIQRGNAASILGTISPSQSLDEIFFSPLNWYDTTDFSPASCVENYPNVNESKSDFSSKKIVEEDLTGKFNTSSFNIIKGQMQKRKNVQIHENFAMIPQTSESPPFANNPHTMIFPTMNHHHSPMSEPVNNFDEIATDQDAENVFHDNFPLCPFKLSRRSHHFVDPDCYKMGMFLSTYMIDGRAVNLQPKGLLNQNNHCYVNSILQALIACPPLYNLLNSLSKNISSNERMSSTPVIFGMCRFVEQFVHLPSYCLTKDGRVDKNSKNGQKVSINTGIPFGPTWIYKMLHNMRTDWIDGRQQDAEEFLGFLLNELNDEMFELNELVKNYIKDEKPLVDSALSNDSN

SEQ ID NO: 25172 - protein, 1193 aa, Popillia japonica
METRSTRKKTGGKGNRAGPHRSRREDRPSVDMDETGGVIPQTGNSTDNEREYDQNQKSSTPTPESVAGSSGSQPTEGENRQKGQRMKWTSQMNADLYRCYLQITEMETSNKPYSVLLYKAITEKHPQIRVKTVQNVLDQRRSLFTKNRLPPEVVQTIRREVEIELGMVADENEDENKQDDGNRSTQIHVEIDGDISQIFQRNLIAYGGLDPALRPRLPRLRFNKKTKRNTDEVNKVLQQQVDECKNLEEFHQLIYAGAATVLESNEQKLRAQQGQSEKRDWRKIKPWETRISTKIENYRREIGVLSQMISTTEPSKRLTSKANYIMHKYLDPENINAREVLDLIKQRLAVNANRLRRYRESQKRRDQNKEFSINQKAFYRQLGSQADNSENIQTPLQKSNALNYWKSIWTKEGQHNPSAKWLQLERNRLEKIQYMTDYKIEVDELREATTKLSNWRAPGIDGVHNYWLKVFHTLHGKATEILNDIMQNPENAPRFFTQGITYLLPKTQPPSPDPAQYRPITCLPTIYKLFTCIITNKVYKHIEKNHIMATEQKGCQRKAYGCKELIVLDTLITEEAKRNKRDLYWGYIDYKKAYDNIPHSYLKEILKIYKITPQLTSALTTLMETWQTQLYIDGNCAGSVPVRRGIYQGDSLSPLWFCLALNPLSTMLNKRNKGYEIGDSGQKISHLIYMDDIKVLGSTKEEIRHLLQQVETFTQDTSMEFGLQKCRVNGLYKGKWQKQEGHTIAIDAEDPKVIEAMDREETYKYLGVLQAKGIEHKKIKEQLTHKYRQRLNQLLKTKLSAKNLVTAVNAYAVPVISYSFGIIGWTPTDLEDLNRLTRKIFTKFRGHHPHSSKERFHLPRSVGGRGVADMRRMHFRLVNGMKDYFYSKMTADPLYGAMVHNDRKYTILNLRDRRQAGSNITTENMIQQWRAKELHGRHANNLNQDHMDPRASNGWLRHGGLFPETEGFLISIQDHVVPTLNYRRYITKDPAVRDDRCRLCKSKPETIEHLTNSCQIMAAREYTYRHNSVAKILHNWIAYKIGYVQNRTPYYSYQPEHVCETATALLYWDRTIQTDHLVSHNRPDIVVLNKTTKKCTIIDIAIPAAANIKEKHKEKISKYLPLAAEIRQIWDVSSVEIVPIVLGSLGEVPKSLHEGIASIDLPPNLYLEMQKAVILATTNIIRKVLNNAPEVSP

SEQ ID NO: 25173 - protein, 1341 aa, Bathochordaeus stygius
MWCRTSEGCCRCLRRWVTEPAALSDDLVTSRRRRLSLHVQSREQHVVDDEVLRRRLSLRVPAVAGGWVGGGTNVVEAGGSLPALGAVGATLVVPASGGGSRSTMRGVFASGGMGNGGGGDDGGSSGGGGGDDGGSGGGRSRRRSQRPGARYMSDVALGHFISLLQVGCRVAMRVENTQAPLQFHATVVSVETTRFHVQVDADPLAGNDDGDGGTALADRSFCFPDDGDVVSAEKLAVMPGLPSFNFSTRPLYRMPRWAVYYDGSSGSSGGVASAAGVKVVHMPTGRPFEFGVFHPSSTNNVVEYVAQIASLRIARLLPGEVAIIGDSNLAQRHLLGQFRRTAAHLKAYVEMSRTEWMDIDQAKVSIHHMCGHGGVAGDNPADSTAKRCKVLAADVGGDVSAIVVGDVDVALPRLHALFPAIVAVPLPPSKQVHKAMTAGMEVANTVASAALEELCITSLDDYLRVRSYPARSEPPREVRAQWAALQQAQVLKVTTAPDGDVAQREMLRLMCLPNLWLPRNVPTRRIVLHFERDEPFKVSRSVRGAVTREGVRDAATQVRRLTRMVEQKARDRDIKGAMQVLRTEADTAAPASAADKLAALRAKFPLAAATPLRHSIPDVQLPIFGDGVLSLALRHMKRHAATAIDGWGKAHLTSVLSVRPSIVSSWCALMVQVIRGQFSPLVMQCLRAARLVAVPKPDGGVRPIAITHFFLKLAGSCALKVAGAACRDWQYAVGGVDGTKTIIHHLRRHVADGCTITKYDQQNAYNTMPRSLIEEVLGGDDEASVVSPYLRSYFRTVYYPGSSMAVFVPGDHSTVVMVEGVRQGDSISSLYYCLAFDRVIADICEQCSAFTVTDAAGDAVACPVDVKGVYAYMDDLTFATGNASDAATLTGIVSSTFAKYGITLNRGSAKSASMIPQHDAYWTDDGIRRRFTELAFTAQGCDTEFVALGADICRVPDAFITRYKVRVNRFFDLLERVDLHPALLLTILRLCGNPRLVHFCSTMPTTDAVLGVCAVYDDRCLALLDSAALLNGALRGLAVEDQMCLDLVYDRAGAGLTHYAAAAAAMYEEACLAMDPCSRNHADGVRHRVSPVGLVQRNPTTSVPGLDSLDALASLAAHDWMFWTGSEHEVTPSEFVHALGVRLQVLPQRVDFPAQCRCGATQHRAVEFVHHVLCCADATRFGYKARHDAVMTAVTEVARAYGIACRREPTFYTYADGTAKRPDVMFDVAPPLTVDFTVVCPQIRVDVAAHAAAQAKVAKHEAAVKALGHVFRPFAVEVFGHLHKSVYEVIEILQRAVMLYERRRFSEDMLHAVSVALARGRAQAVRSAVALQRAKRVLGAV

SEQ ID NO: 25174 - protein, 1020 aa, Dasypogon diadema
MSAPLNCVCGGSYSSVASLKQHQRYHCRGPPSDDQNKCPVCKMDFNSYRGMRLHLKKLHAEVYNQDLVRAAKSSRSAWTEDEEDELAKIEASMQGSTPGQIMDRQMLILGRTRDAIKGKRKSAKYKGKVAAAILRSNQAVNLETITEDSLPEREQQTEHIRDFVLNIPEARLSTTANSFKNLLLNSTREAAIRGLEDWYGEIVSRFANTGGNGLGTRGNRKRQELISSLMSQSLPKRRRRALLYKLAQMDLKNNPKKYAERLLDGKDLEEGEETPEAEEIKNHYEQIFDTASPEDEESVDRCSNIVEISTPITMEELQWALSSCKSNSPGPDGITVKDASTMIKEEILLLFNAFLLLEYLPIQIKKSRTILIPKSTSNRRDIKNWRPITISSVVLRLFNKVIAQRLSYAVELHSTQRGFSRLDGCFANCLTIQALIKHHRRKGIPLSIISLDLSKAFDRVSHHSISRALERFGIDRKTFNIIMQGLYDTKTSLWCGSELIGEYAINRGVKQGDPLSPILFNVVLDELLVTLHERTGVAVGDSSKLCCVAYADDIIICAKSPEDAGRMLDTALEFFNKRGLEVNGAKSSSLVMKTVPSRKKLLVETQPRFQVNGELIPAIGVGDEFKYLGYKFNTQGLTACSAENLIQQLTAVKSAPLKPQQKIRVIKIYLLPRYIASLQYPNVSKKTLITVDKKIRWAVRKILHLPEHCTNYILHAPVKSGGLGLFCFEKCIPAIISNRIERLKHTSTLLEDTISLAEPYLGQLRRMIGSNSCNTKDIRNGFADGLESSFSGNGIWQVGLRKECCQFINYPPRFWNGEDYLRALHLRFNMLPSAGLPYNSGEAKLCRAGCRKVESLSHILQNCPVTHWRRIERHNRVLQRLINAAKKKGWRVEREPNIRGPDGMLKKPDAIFCKGDKVIVSDVGIHWEGPIPLSTQYGNKTAIYSTTPFTTKLQQLFPGKQLYVLPIIIGARGAWCALNDRLIQHLELPAAAIRDVIYTTLRGGWTTHRDFMKLVWRRRF

SEQ ID NO: 25175 - protein, 1098 aa, Paragonimus westermani
MHRRRNDRVQDVDAQHATVFDCADCDRTFPTKIGLSQHRRHAHPVERNRENLNHMKSAGTNWSQQESASLLKYADELAPSCPTRRELHNRLLSLFPGRTVESIRTRLYTLSWQRNPVPTANPVTVSQTNVTSGTESQAAENPEWFACLIQTVITQLESNSEASLQTDGLLAIARGLQAGIFTMVQAKSLLNMHAAQAFPYTWRLNTRRRARINVGALVTSKQIRRANYAAIQTLYHQRRKDAAFAVFSGNWRTAYKMNRGLPDSSNEYWSEVLSAHPHPDERPSRTILPPDWSLVDPITGDEVSRTLKQMENTAPGLDKLLPKHLKRMKADALAGYFNLFLLTQGCPIHLCRSRITLVPKVNNPSSPTELRPIAVSSTLIRCFHKILADRWNARLHLPALQFAFLHRDGCLEATSLLHALLRNSCATSSSLCAAFIDVSKAFDSISQDCIIRSAQAFGAPPPLTHYIADSYRNASVTLGSTVLRSQRGVRQGDPLSPLLFIMAMDEVLALSRPELGYQFHDTLVSGFAYADDLILLAENPTRLSEKLAAAASALELSGLQINTRKTKLMVIRGDHKHNVTAISNESIQFGPDTIRSLSAIDTVTYLGIPFTWKGKAFTNHRLQLRTMLDETTRAPLKPHQRLDLLRQHLIPKMNHSLILSRVHRNTLKAMDCTVRQFVRQWLRLPKDTPISYIHTPIRLGGLGIPSLSTTIPISRKSRLERLLSSQCPVLRNVVKDHSFGPILREVNVPVRVQGVVVTSKEEAHSAWSNKLYHSLDGCGLREVSRSPLSNRWLFNPDRIFPRIFIRAIQLRCSLLRTKVRNSRGDRSGQSVLCRGNCGQPESLAHILQSCWITHDARCARHNRVAKDLARRLRNLDYTVFEELRVPTASSFIKPDVIAVRGGAAVVLDVSIVDDYRCQLAWTDKTAKYGTDSHKAAILSTLHTMSCEVNSVSHSPVIISFRGIMFPASCSAILRLGLPSYAVTDLCLLTVLGSLKTYDTYMRGTYDYRCQLAWTDKIARYATDFHNAAILSTLHTMSCKANSLSHSLVTISFHGIMFPSSCSAILRIGLPSYAVTDLCLLTVLGSLKTYDTYMQGTWR

SEQ ID NO: 25176 - protein, 1006 aa, Paragonimus westermani
MHRRRNDREQDVDAQHATVFDCTDCDRTFPTKIGLSQHRRHSHPVERNRENLNHLKSAGTNWSQQESASLLKYADELAPSCPTRRDFHNRLLPLFPGRTAESIRTRLYALSWQRNPVPIVNPVTVSQTNVTSGTESQAAENPEWFACLIQTVITQLESNSEASLQTDGLLAIARGLQAGIFTMVQAKSLLNMHAAQAFPYTWRLNTRRRARINVGALVTSKQIRRANYAAIQTLYHQRRKDAAFAVFSGNWRTAYKMNRGLPDSSNEYWSEVLSAHPHPDERPSRTILPPDWSLVDPITGDEVSRTLKQMENTAPGLDKLLPKHLKRMKADALAGYFNLFLLTQGCPIHLCRSRITLVPKVNNPSSPTELRPIAVSSTLIRCFHKILADRWNARLHLPALQFAFLHRDGCLEATSLLHALLRNSCATSSSLCAAFIDVSKAFDSISQDCIIRSAQAFGAPPPLTHYIADSYRNASVTLGSTVLRSQRGVRQGDPLSPLLFIMAMDEVLALSRPELGYQFHDTLVSGFAYADDLILLAENPTRLSEKLAAAASALELSGLQINTRKTKLMVIRGDHKHNVTAISNESIQFGPDTIRSLSAIDTVTYLGIPFTWKGKAFTNHRLQLRTMLDETTRAPLKPHQRLDLLRQHLIPKMNHSLILSRVHRNTLKAMDCTVRQFVRQWLRLPKDTPISYIHTPIRLGGLGIPSLSTTIPISRKSRLERLLSSQCPVLRNVVKDHSFGPILREVNVPVRVQGVVVTSKEEAHSAWSNKLYHSLDGCGLREVSRSPLSNRWLFNPDRIFPRIFIRAIQLRCSLLRTKVRNSRGDRSGQSVLCRGNCGQPESLAHILQSCWITHDARCARHNRVAKDLARRLRNLDYTVFEELRVPTASSFIKPDVIAVRGGAAVVLDVSIVDDYRCQLAWTDKTAKYGTDSHEAAILSTLHTMSCEVNSVSHSPVIISFRGIMFPSSCSAILRLGLPSYAVTDLCLLTVLGSLKTYDTYMRGTWR

SEQ ID NO: 25177 - protein, 821 aa, Paragonimus westermani
MVQAKSLLNMHAAQAFPYTWRLTTRRRARINVGALVTSKQIRRANYAVIQTLYHQRRKDAAFAVFSGNWRTAYKIDRSLADSSNEYWSVVLSAHPYTDERPSRTILPPEWSLVDPITGDEVSRTLKQMENTALSLDKLLPKHLKRMKADALAGYSNLFLLTQGCPIHLCRSRITLVPAVDNPSSPTELRLIAVSSMLIRCFHKILADHWNTRLHLPALQFVRDGCLEATSLLHALLRNSCTTSSSLCAAFIDVSKAFDSISQDCIIRSAQAFGAPPPLTHYIADSYRNASVTLGSTVLRSQRGVRQGDPLSPLLFIMAMDEVLALSRPELGYQFHDTLVSGFAYADDLILLAENPTRLSEKLAAAASALELSGLQINTRKTKLMVIRGDHKHNVTAISNESIQFGPDTIRSLSAIDTVTYLGIPFTWKGKAFTNHRLQLRTMLDETTRAPLKPHQRLDLLRQHLIPKMNHSLILSRVHRNTLKAMDCTVRQFVRQWLRLPKDTPISYIHTPIRLGGLGIPSLSTTIPISRKSRLERLLSSQCPVLRNVVKDHSFGPILREVNVPVRVQGVVVTSKEEAHSAWSNKLYHSLDGCGLREVSRSPLSNRWLFNPDRIFPRIFIRAIQLRCSLLRTKVRNSRGDRSGQSVLCRGNCGQPESLAHILQSCWITHDARCARHNRVAKDLARRLRNLDYTVFEELRVPTASSFIKPDVIAVRGGAAVVLDVSIVDDYRCQLAWTDKTAKYGTDSHKAAILSTLHTMSCEVNSVSHSPVIISFRGIMFPASCSAILRLGLPSYAVTDLCLLTVLGSLKTYDTYMRGTWR

SEQ ID NO: 25178 - protein, 1006 aa, Paragonimus westermani
MHRRRNDRVQDVDAQHATVFDCADCDRTFPTKIGLSQHRRHAHPVERNRENLNHMKSAGTNWSQQESASLLKYADELAPSCPTRRELHNRLLSLFPGRTVESIRTRLYTLSWQRNPVPTANPVTVSQTNVTSGTESQAAENPEWFACLIQTVITQLESNSEASLQTDGLLAIARGLQAGIFTMVQAKSLLNMHAAQAFPYTWRLNTRRRARINVGALVTSKQIRRANYAAIQTLYHQRRKDAAFAVFSGNWRTAYKMNRGLPDSSNEYWSEVLSAHPHPDERPSRTILPPDWSLVDPITGDEVSRTLKQMENTAPGLDKLLPKHLKRMKADALAGYFNLFLLTQGCPIHLCRSRITLVPKVNNPSSPTELRPIAVSSTLIRCFHKILADRWNARLHLPALQFAFLHRDGCLEATSLLHALLRNSCATSSSLCAAFIDVSKAFDSISQDCIIRSAQAFGAPPPLTHYIADSYRNASVTLGSTVLRSQRGVRQGDPLSPLLFIMAMDEVLALSRPELGYQFHDTLVSGFAYADDLILLAENPTRLSEKLAAAASALELSGLQINTRKTKLMVIRGDHKHNVTAISNESIQFGPDTIRSLSAIDTVTYLGIPFTWKGKAFTNHRLQLRTMLDETTRAPLKPHQRLDLLRQHLIPKMNHSLILSRVHRNTLKAMDCTVRQFVRQWLRLPKDTPISYIHTPIRLGGLGIPSLSTTIPISRKSRLERLLSSQCPVLRNVVKDHSFGPILREVNVPVRVQGVVVTSKEEAHSAWSNKLYHSLDGCGLREVSRSPLSNRWLFNPDRIFPRIFIRAIQLRCSLLRTKVRNSRGDRSGQSVLCRGNCGQPESLAHILQSCWITHDARCARHNRVAKDLARRLRNLDYTVFEELRVPTASSFIKPDVIAVRGGAAVVLDVSIVDDYRCQLAWTDKTAKYGTDSHKAAILSTLHTMSCEVNSVSHSPVIISFRGIMFPSSCSAILRLGLPSYAVTDLCLLTVLGSLKTYDTYMRGTWR

SEQ ID NO: 25179 - protein, 969 aa, Paragonimus westermani
MHRRRNDREQDVGAQRATVFDCADCDRTFSNKIGLSQHRSHAHPVERNRENLNHMKSAGTNWSQQESASLLKHADELSPSCPTRHELHNRLLPIFPGRTVESIRTRLYALSWQRNLVPIANPANVSQTNVTSGTESQAENSEWFACLIQTVITQLESNSEASLQTDGLLAIARGLQAGIFTMVQAKSLLNMHAAQAFPYTWRLNTRRRARINVGALVTSKQIRRANYAAIQTLYHQRRKDAAFAVFSGNWRTAYKMNRGLPDSSNEYWSEVLSAHPHPDERPSRTILPPDWSLVDPITGDEVSRTLKQMENTAPGLDKLLPKHLKRMKADALAGYFNLFLLTQGCPIHLCRSRITLVPKVNNPSSPTELRPIAVSSTLIRCFHKILADRWNARLHLPALQFAFLHRDGCLEATSLLHALLRNSCATSSSLCAAFIDVSKAFDSISQDCIIRSAQAFGAPPPLTHYIADSYRNASVTLGSTVLRSQRGVRQGDPLSPLLFIMAMDEVLALSRPELGYQFHDTLVSGFAYADDLILLAENPTRLSEKLAAAASALELSGLQINTRKTKLMVIRGDHKHNVTAISNESIQFGPDTIRSLSAIDTVTYLGIPFTWKGKAFTNHRLQLRTMLDETTRAPLKPHQRLDLLRQHLIPKMNHSLILSRVHRNTLKAMDCTVRQFVRQWLRLPKDTPISYIHTPIRLGGLGIPSLSTTIPISRKSRLERLLSSQCPVLRNVVKDHSFGPILREVNVPVRVQGVVVTSKEEAHSAWSNKLYHSLDGCGLREVSRSPLSNRWLFNPDRIFPRIFIRAIQLRCSLLRTKVRNSRGDRSGQSVLCRGNCGQPESLAHILQSCWITHDARCARHNRVAKDLARRLRNLDYTVFEELRVPTASSFIKPDVIAVRGGAAVVLDVSIVDDYRCQLAWTDKTAKYGTDSHKAAILSTLHTMSCEVNSLSLSFTCDYFFSRNHVPFFM

SEQ ID NO: 25180 - protein, 1006 aa, Paragonimus westermani
MHRRRNDRVQDVDAQHATVFDCADCDRTFPTKIGLSQHRRHAHPVERNRENLNHMKSAGTNWSQQESASLLKYADELAPSCPTRRELHNRLLSLFPGRTVESIRTRLYTLSWQRNPVPTANPVTVSQTNVTSGTESQAAENPEWFACLIQTVITQLESNSEASLQTDGLLAIARGLQAGIFTMVQAKSLLNMHAAQAFPYTWRLTTRRRARINVGALVTSKQIRRANYAAIQTLYHQRRKDAAFAVFSGNWRTAYKMNRGLPDSSNEYWSEVLSAHPHPDERPSRTILPPDWSLVDPITGDEVSRTLKQMENTAPGLDKLLPKHLKRMKADALAGYFNLFLLTQGCPIHLCRSRITLVPKVNNPSSPTELRPIAVSSTLIRCFHKILADRWNARLHLPALQFAFLHRDGCLEATSLLHALLRNSCATSSSLCAAFIDVSKAFDSISQDCIIRSAQAFGAPPPLTHYIADSYRNASVTLGSTVLRSQRGVRQGDPLSPLLFIMAMDEVLALSRPELGYQFHDTLVSGFAYADDLILLAENPTRLSEKLAAAASALELSGLQINTRKTKLMVIRGDHKHNVTAISNESIQFGPDTIRSLSAIDTVTYLGIPFTWKGKAFTNHRLQLRTMLDETTRAPLKPHQRLDLLRQHLIPKMNHSLILSRVHRNTLKAMDCTVRQFVRQWLRLPKDTPISYIHTPIRLGGLGIPSLSTTIPISRKSRLERLLSSQCPVLRNVVKDHSFGPILREVNVPVRVQGVVVTSKEEAHSAWSNKLYHSLDGCGLREVSRSPLSNRWLFNPDRIFPRIFIRAIQLRCSLLRTKVRNSRGDRSGQSVLCRGNCGQPESLAHILQSCWITHDARCARHNRVAKDLARRLRNLDYTVFEELRVPTASSFIKPDVIAVRGGAAVVLDVSIVDDYRCQLAWTDKTAKYGTDSHKAAILSTLHTMSCEVNSVSHSPVIISFRGIMFPASCSAILRLGLPSYAVTDLCLLTVLGSLKTYDTYMRGTWR

SEQ ID NO: 25181 - protein, 1006 aa, Paragonimus skrjabini
MHRRRNGAEQEVDSQPATIFDCANCDRSFPTKIGLSQHRRHAHPVERNNEKLISMKTAGSNWSQQESASLIRCADALAPFCPTRRELHHRLLSHFPGRTLESIRTRLYALNWQRNTAPAANPTTVPQINTTSDIESQAADHSEWFTCLIQTVITQLESNSEASLHSDELLAIARGLQAGIFTVVQAKSLLNMHASLAFPYTWRFVTRRRGRVYVGTHLTTKQIRKANYAAIQTLYHQRKKDAAFAVFSGNWRTAYKMNRGLPDNSNEYWSEVLSAHAHIDERPPRAILPPDWSLVDPISGEEVSRTLKHMGNTAPGLDKLLPKHLKRMKADALAGYFNLFLLTQGCPVHLCRSRITLVPKVNNPSSPTELRPIAVSSTLIRCFHKILADRWNSRLQLPALQFAFLHRDGCLEATSLLHAMLRNSCITSSSLCAAFIDVSKAFDSISQDSIIRSARAFGAAPPLTHYIADSYRNASVTLNGPVLRSQRGVRQGDPLSPLLFIMAMDEVLELSRPELGYQFHDTLVSGFAYADDLILLAENPTRLSEKLAAAASALELSGLKINTQKTKLMVIRSDHKHNATAISDESIHFGPDIIHSLSASDTVTYLGIPFTWKGKAFTHHRQQLRTMLDETTKAPLKPHQRLELLRQHLIPKMNHSLVLSRVHRNTLKAMDCTVRQFVRQWLRLPKDTPISYIHTPIRLGGLGIPSLSTTIPISRKSRVERLLSSQCPVLRNVVRDNSFGPILREINIPVRVQGVVVTNKEEAHAAWMDKLYHSLDGRGLQEVSRSPLSNRWLFNPDRIFPRIFIRAIQLRCNLLRTKVRNSRGGRSDHSVLCRGNCGQPESLAHILQSCWITHDARCARHNRVAKDLAKRLRNSGYTVFEELRVPTASSFIKPDVIVVRDSAAVVLDVSIVDDYRSQFAWTDKIAKYGTDSHNAAIQSVLHTLGCDVNSVSHSPVIISFRGIIFPSSSNAILRLGLPSYAVTDLCLLTVLGSLKTYDTFMRGTWR

SEQ ID NO: 25182 - protein, 990 aa, Paragonimus westermani
MHRRRNDRVQDVDAQHATVFDCADCDRTFPTKIGLSQHRRHAHPVERNRENLNHMKSAGTNWSQQESASLLKYADELAPSCPTRRELHNRLLSLFPGRTVESIRTRLYTLSWQRNPVPTANPVTVSQTNVTSGTESQAAENPEWFACLIQTVITQLESNSEASLQTDGLLAIARGLQAGIFTMVQAKSLLNMHAAQAFPYTWRLTTRRRARINVGALVTSKQIRRANYAAIQTLYHQRRKDAAFAVFSGNWRTAYKMNRGLPDSSNEYWSEVLSAHPHPDERPSRTILPPDWSLVDPITGDEVSRTLKQMENTAPGLDKLLPKHLKRMKADALAGYFNLFLLTQGCPIHLCRSRITLVPKVNNPSSPTELRPIAVSSTLIRCFHKILADRWNARLHLPALQFAFLHRDGCLEATSLLHALLRNSCATSSSLCAAFIDVSKAFDSISQDCIIRSAQAFGAPPPLTHYIADSYRNASVTLGSTVLRSQRGVRQGDPLSPLLFIMAMDEVLALSRPELGYQFHDTLVSGFAYADDLILLAENPTRLSEKLAAAASALELSGLQINTRKTKLMVIRGDHKHNVTAISNESIQFGPDTIRSLSAIDTVTYLGIPFTWKGKAFTNHRLQLRTMLDETTRAPLKPHQRLDLLRQHLIPKMNHSLILSRVHRNTLKAMDCTVRQFVRQWLRLPKDTPISYIHTPIRLGGLGIPSLSTTIPISRKSRLERLLSSQCPVLRNVVKDHSFGPILREVNVPVRVQGVVVTSKEEAHSAWSNKLYHSLDGCGLREVSRSPLSNRWLFNPDRIFPRIFIRAIQLRCSLLRTKVRNSRGDRSGQSVLCRGNCGQPESPAHILQSCWITHDARCARHNRVAKDLARRLRNLGFTVFEELRVPAASSFIKPDVIAVRGGAAVVLHVSIVDDYRCQLAWTDKIAKYGTDSHKAAILSALHTMSCEVNSVSHSPVIISFRGIMFPSSCNVILRLGLPSYAVTDLFTNCS

SEQ ID NO: 25183 - protein, 902 aa, Paragonimus westermani
MKSAGTNWSQQESASFLKNADELAPSCPTRRDLHNRLLPLFSGRTVESIRESLYALSWQRNPVHIANLVTVSQTNVTSGTEFQAAENSEWFACSIQTVIIQLQSNSEASLQTDGLQAITRGLQAGIFTMVQAKSLLNMHAAQAFPYTWRLTTRRRARINVGALVTSKQIRRANYAAIQTLYHQRRKDAAFAVFSGNWRTAYKMNRGLPDSSNEYWSEVLSAHPHPDERPSRTILPPDWSLVDPITGDEVSRTLKQMENTAPGLDKLLPKHLKRMKADALAGYFNLFLLTQGCPIHLCRSRITLVPKVNNPSSPTELRPIAVSSTLIRCFHKILADRWNARLHLPALQFAFLHRDGCLEATSLLHALLRNSCATSSSLCAAFIDVSKAFDSISQDCIIRSAQAFGAPPPLTHYIADSYRNASVTLGSTVLRSQRGVRQGDPLSPLLFIMAMDEVLALSRPELGYQFHDTLVSGFAYADDLILLAENPTRLSEKLAAAASALELSGLQINTRKTKLMVIRGDHKHNVTAISNESIQFGPDTIRSLSAIDTVTYLGIPFTWKGKAFTNHRLQLRTMLDETTRAPLKPHQRLDLLRQHLIPKMNHSLILSRVHRNTLKAMDCTVRQFVRQWLRLPKDTPISYIHTPIRLGGLGIPSLSTTIPISRKSRLERLLSSQCPVLRNVVKDHSFGPILREVNVPVRVQGVVVTSKEEAHSAWSDKLYHSLDGCGLREVSRSPLSNRWLFNPDRIFPRIFIRAIQLRCSLLRTKVRNSRGDRSGQSVLCRGNCGQPESLAHILQSCWITHDARCARHNRVAKDLARRLRNLDYTVFEELRVPTASSFIKPDVIAVRGGAAVVLDVSIVDDYRCQLAWTDKIAKYGTDSHKAAILSTLHTMSCEVNSLSLIHL

SEQ ID NO: 25184 - protein, 1006 aa, Paragonimus westermani
MHRRRNDRVQDVDAQHATVFDCADCDRTFPTKIGLSQHRRHAHPVERNRENLNHMKSAGTNWSQQESASLLKYADELAPSCPTRRELHNRLLSLFPGRTVESIRTRLYTLSWQRNPVPTANPVTVSQTNVTSGTESQAAENPEWFACLIQTVITQLESNSEASLQTDGLLAIARGLQAGIFTMVQAKSLLNMHAAQAFPYTWRLNTRRRARINVGALVTSKQIRRANYAAIQTLYHQRRKDAAFAVFSGNWRTAYKMNRGLPDSSNEYWSEVLSAHPHPDERPSRTILPPDWSLVDPITGDEVSRTLKQMENTAPGLDKLLPKHLKRMKADALAGYFNLFLLTQGCPIHLCRSRITLVPKVNNPSSPTELRPIAVSSTLIRCFHKILADRWNARLHLPALQFAFLHRDGCLEATSLLHALLRNSCATSSSLCAAFIDVSKAFDSISQDCIIRSAQAFGAPPPLTHYIADSYRNASVTLGSTVLRSQRGVRQGDPLSPLLFIMAMDEVLALSRPELGYQFHDTLVSGFAYADDLILLAENPTRLSEKLAAAASALELSGLQINTRKTKLMVIRGDHKHNVTAISNESIQFGPDTIRSLSAIDTVTYLGIPFTWKGKAFTNHRLQLRTMLDETTRAPLKPHQRLDLLRQHLIPKMNHSLILSRVHRNTLKAMDCTVRQFVRQWLRLPKDTPISYIHTPIRLGGLGIPSLSTTIPISRKSRLERLLSSQCPVLRNVVKDHSFGPILREVNVPVRVQGVVVTSKEEAHSAWSNKLYHSLDGCGLREVSRSPLSNRWLFNPDRIFPRIFIRAIQLRCSLLRTKVRNSRGDRSGQSVLCRGNCGQPESLAHILQSCWITHDARCARHNRVAKDLARRLRNLDYTVFEELRVPTASSFIKPDVIAVRGGAAVVLDVSIVDDYRCQLAWTDKTAKYGTDSHKAAILSTLHTMSCEVNSVSHSPVIISFRGIMFPASCSAILRLGLPSYAVTDLCLLTVLGSLKTYDTYMRGTWR

SEQ ID NO: 25185 - protein, 888 aa, Paragonimus westermani
MWPNLQVERWLVGAYTESQAAENSKWFACFIQTVITQLESNSEASLQTDGLLAIARGLQAGIFTMVQAKSLLNMHAAQAFPYTWRLNTRRRARINVGALVTSKQIRRANYAAIQTLYHQRRKDAAFAVFSGNWRTAYKMNRGLPDSSNEYWSEVLSAHPHPDERPSRTILPPDWSLVDPITGDEVSRTLKQMENTAPGLDKLLPKHLKRMKADALAGYFNLFLLTQGCPIHLCRSRITLVPKVNNPSSPTELRPIAVSSTLIRCFHKILADRWNARLHLPALQFAFLHRDGCLEATSLLHALLRNSCATSSSLCAAFIDVSKAFDSISQDCIIRSAQAFGAPPPLTHYIADSYRNASVTLGSTVLRSQRGVRQGDPLSPLLFIMAMDEVLALSRPELGYQFHDTLVSGFAYADDLILLAENPTRLSEKLAAAASALELSGLQINTRKTKLMVIRGDHKHNVTAISNESIQFGPDTIRSLSAIDTVTYLGIPFTWKGKAFTNHRLQLRTMLDETTRAPLKPHQRLDLLRQHLIPKMNHSLILSRVHRNTLKAMDCTVRQFVRQWLRLPKDTPISYIHTPIRLGGLGIPSLSTTIPISRKSRLERLLSSQCPVLRNVVKDHSFGPILREVNVPVRVQGVVVTSKEEAHSAWSNKLYHSLDGCGLREVSRSPLSNRWLFNPDRIFPRIFIRAIQLRCSLLRTKVRNSRGDRSGQSVLCRGNCGQPESLAHILQSCWITHDARCARHNRVAKDLARRLRNLDYTVFEELRVPTASSFIKPDVIAVRGGAAVVLDVSIVDDYRCQLAWTDKTAKYGTDSHKAAILSTLHTMSCEVNSVSHSPVIISFRRIMFPSSCSAILRLGLPSYAVTDLCLLTVLGSLKTYDTYMRGTWR

SEQ ID NO: 25186 - protein, 1006 aa, Paragonimus westermani
MHRRRNDRVQDVDAQHATVFACADCDRTFPTKIGLSQHRRHAHPVERNRENLNHMKSAGTNWSQQESASLLKYADELAPSCPTRRELHNRLLSLFPGRTVESIRTRLYTLSWHRNPVPTANPVTVSQTNVTSGTESQAAENPEWFACLIQTVITQLESNSEASLQTDGLLAIARGLQAGIFTMVQAKSLLNMHAAQAFPYTWRLNTRRRARINVGALVTSKQIRRANYAAIQTLYHQRRKDAAFAVFSGNWRTAYKMNRGLPDSSNEYWSEVLSAHPHPDERPSRTILPPDWSLVDPITGDEVSRTLKQMENTAPGLDKLLPKHLKRMKADALAGYFNLFLLTQGCPIHLCRSRITLVPKVNNPSSPTELRPIAVSSTLIRCFHKILADRWNARLHLPALQFAFLHRDGCLEATSLLHALLRNSCATSSSLCAAFIDVSKAFDSISQDCIIRSAQAFGAPPPLTHYIADSYRNASVTLGSTVLRSQRGVRQGDPLSPLLFIMAMDEVLALSRPELGYQFHDTLVSGFAYADDLILLAENPTRLSEKLAAAASALELSGLQINTRKTKLMVIRGDHKHNVTAISNESIQFGPDTIRSLSAIDTVTYLGIPFTWKGKAFTNHRLQLRTMLDETTRAPLKPHQRLDLLRQHLIPKMNHSLILSRVHRNTLKAMDCTVRQFVRQWLRLPKDTPISYIHTPIRLGGLGIPSLSTTIPISRKSRLERLLSSQCPVLRNVVKDHSFGPILREVNVPVRVQGVVVTSKEEAHSAWSNKLYHSLDGCGLREVSRSPLSNRWLFNPDRIFPRIFIRAIQLRCSLLRTKVRNSRGDRSGQSVLCRGNCGQPESLAHILQSCWITHDARCARHNRVAKDLARRLRNLDYTVFEELRVPTASSFIKPDVIAVRGGAAVVLDVSIVDDYRCQLAWTDKTAKYGTDSHKAAILSTLHTMSCEVNSVSHSPVIISFRGIMFPASCSAILRLGLPSYAVTDLCLLTVLGSLKTYDTYMRGTWR

SEQ ID NO: 25187 - protein, 824 aa, Paragonimus westermani
MVQAKSLLNMHAAQAFPYTWRLTTRRRARINVGALVISKQIRRANYAAIQTLYHQRRKDAAFAVFSGNWRTAYKMNRGLPDSSNEYWSEVLSAHPHPDERPSRTILPPDWSLVDPITGDEVSRTLKQMENTAPGLDKLLPKHLKRMKADALAGYFNLFLLTQGCPIHLCRSRITLVPKVNNPSSPTELRPIAVSSTLIRCFHKILADRWNARLHLPALQFAFLHRDGCLEATSLLHALLRNSCATSSSLCAAFIDVSKAFDSISQDCIIRSAQAFGAPPPLTHYIADSYRNASVTLGSTVLRSQRGVRQGDPLSPLLFIMAMDEVLALSRPELGYQFHDTLVSGFAYADDLILLAENPTRLSEKLAAAASALELSGLQINTRKTKLMVIRGDHKHNVTAISNESIQFGPDTIRSLSAIDTVTYLGIPFTWKGKAFTNHRLQLRTMLDETTRAPLKPHQRLDLLRQHLIPKMNHSLILSRVHRNTLKAMDCTVRQFVRQWLRLPKDTPISYIHTPIRLGGLGIPSLSTTIPISRKSRLERLLSSQCPVLRNVVKDHSFGPILREVNVPVRVQGVVVTSKEEAHSAWSNKLYHSLDGCGLREVSRSPLSNRWLFNPDRIFPRIFIRAIQLRCSLLRTKVRNSRGDRSGQSVLCRGNCGQPESLAHILQSCWITHDARCARHNRVAKDLARRLRNLDYTVFEELRVPTASSFIKPDVIAVRGGAAVVLDVSIVDDYRCQLAWTDKTAKYGTDSHKAAILSTLHTMSCEVNSVSHSPVIISFRGIMFPASCSAILRLGLPSYAVTDLCLLTVLGSLKTYDTYMRGTWR

SEQ ID NO: 25188 - protein, 1004 aa, Paragonimus westermani
MHRRRNDREQEVEAQHATVFDCANCDRTFSTKIGFSQHRRHAHPVERNREDLNHMKSAGTNWSQQESASLLKYADELAPSCPTRRELHNRLLSLFPGRTVESIRTRLYTLSWQRNPVPTANPVTVSQTNVTSGTESQAAENPEWFACLIQTVITQLESNSEASLQTDGLLAIARGLQAGIFTMVQAKSLLNMHAAQAFPYTWRLNTRRRARINVGALVTSKQIRRANYAAIQTLYHQRRKDAAFAVFSGNWRTAYKMNRGLPDSSNEYWSEVLSAHPHPDERPSRTILPPDWSLVDPITGDEVSRTLKQMENTAPGLDKLLPKHLKRMKADALAGYFNLFLLTQGCPIHLCRSRITLVPKVNNPSSPTELRPIAVSSTLIRCFHKILADRWNARLHLPALQFAFLHRDGCLEATSLLHALLRNSCATSSSLCAAFIDVSKAFDSISQDCIIRSAQAFGAPPPLTHYIADSYRNASVTLGSTVLRSQRGVRQGDPLSPLLFIMAMDEVLALSRPELGYQFHDTLVSGFAYADDLILLAENPTRLSEKLAAAASALELSGLQINTRKTKLMVIRGDHKHNVTAISNESIQFGPDTIRSLSAIDTVTYLGIPFTWKGKAFTNHRLQLRTMLDETTRAPLKPHQRLDLLRQHLIPKMNHSLILSRVHRNTLKAMDCTVRQFVRQWLRLPKDTPISYIHTPIRLGGLGIPSLSTTIPISRKSRLERLLSSQCPVLRNVVKDHSFGPILREVNVPVRVQGVVVTSKEEAHSAWSNKLYHSLDGCGLREVSRSPLSNRWLFNPDRIFPRIFIRAIQLRCSLLRTKVRNSRGDRSGQSVHCRGSCGQPESLAHILQSCWITHDARCARHNRVAKDLARRLRNLGYTVFGELRVPTASSSIKPDVIAVRGGAAVVLDVTIVDDYQCQLAWTDKIVKYGTDSHKAAILFIIHTMSCDVNSVSHSPVIISFRGIMLSYSCSATLRLGLPSYAVTDLCLLTVLGSLKTCDTYMRGT

SEQ ID NO: 25189 - protein, 1006 aa, Paragonimus westermani
MHRRRNDREQEVDAQHATVFDCADCDRTFPTKIGLSQHRRHAHPVERNRENLNHMKSAGTNWSQQESASLLKYADELAPSCPTRRELHNRLLSLFPGRTVESIRTRLYTLSWQRNPVPTANPVTVSQTNVTSGTESQAAENPEWFACLIQTVITQLESNSEASLQTDGLLAIARGLQAGIFTMVQAKSLLNMHAAQAFPYTWRLNTRRRARINVGALVTSKQIRRANYAAIQTLYHQRRKDAAFAVFSGNWRTAYKMNRGLPDSSNEYWSEVLSAHPHPDERPSRTILPPDWSLVDPITGDEVSRTLKQMENTAPGLDKLLPKHLKRMKADALAGYFNLFLLTQGCPIHLCRSRITLVPKVNNPSSPTELRPIAVSSTLIRCFHKILADRWNARLHLPALQFAFLHRDGCLEATSLLHALLRNSCATSSSLCAAFIDVSKAFDSISQDCIIRSAQAFGAPPPLTHYIADSYRNASVTLGSTVLRSQRGVRQGDPLSPLLFIMAMDEVLALSRPELGYQFHDTLVSGFAYADDLILLAENPTRLSEKLAAAASALELSGLQINTRKTKLMVIRGDHKHNVTAISNESIQFGPDTIRSLSAIDTVTYLGIPFTWKGKAFTNHRLQLRTMLDETTRAPLKPHQRLDLLRQHLIPKMNHSLILSRVHRNTLKAMDCTVRQFVRQWLRLPKDTPISYIHTPIRLGGLGIPSLSTTIPISRKSRLERLLSSQCPVLRNVVKDHSFGPILREVNVPVRVQGVVVTSKEEAHSAWSNKLYHSLDGCGLREVSRSPLSNRWLFNPDRIFPRIFIRAIQLRCSLLRTKVRNSRGDRSGQSVLCRGNCGQPESLAHILQSCWITHDARCARHNRVAKDLARRLRNLDYTVFEELRVPTASSFIKPDVIAVRGGAAVVLDVSIVDDYRCQLAWTDKTAKYGTDSHKAAILSTLHTMSCEVNSVSHSPVIISFRGIMFPASCSAILRLGLPSYAVTDLCLLTVLGSLKTYDTYMRGTWR

SEQ ID NO: 25190 - protein, 1006 aa, Paragonimus westermani
MHRRRNDQEQDVDVQHATVFDCADCDRTFPTKIGLSQHRRQAHPVERNRENLNHMKSAGTNWSQQESASLLKYADELAPSCPTRRELHNRLLSLFPGRTVESIRTRLYTLSWQRNPVPTANPVTVSQTNVTSGTESQAAENPEWFACLIQTVITQLESNSEASLQTDGLLAIARGLQAGIFTMVQAKSLLNMHAAQAFPYTWRLNTRRRARINVGALVTSKQIRRANYAAIQTLYHQRRKDAAFAVFSGNWRTAYKMNRGLPDSSNEYWSEVLSAHPHPDERPSRTILPPDWSLVDPITGDEVSRTLKQMENTAPGLDKLLPKHLKRMKADALAGYFNLFLLTQGCPIHLCRSRITLVPKVNNPSSPTELRPIAVSSTLIRCFHKILADRWNARLHLPALQFAFLHRDGCLEATSLLHALLRNSCATSSSLCAAFIDVSKAFDSISQDCIIRSAQAFGAPPPLTHYIADSYRNASVTLGSTVLRSQRGVRQGDPLSPLLFIMAMDEVLALSRPELGYQFHDTLVSGFAYADDLILLAENPTRLSEKLAAAASALELSGLQINTRKTKLMVIRGDHKHNVTAISNESIQFGPDTIRSLSAIDTVTYLGIPFTWKGKAFTNHRLQLRTMLDETTRAPLKPHQRLDLLRQHLIPKMNHSLILSRVHRNTLKAMDCTVRQFVRQWLRLPKDTPISYIHTPIRLGGLGIPSLSTTIPISRKSRLERLLSSQCPVLRNVVKDHSFGPILREVNVPVRVQGVVVTSKEEAHSAWSNKLYHSLDGCGLREVSRSPLSNRWLFNPDRIFPRIFIRAIQLRCSLLRTKVRNSRGDRSGQSVLCRGNCGQPESLAHILQSCWITHDARCARHNRVAKDLARRLRNLDYTVFEELRVPTASSFIKPDVIAVRGGAAVVLDVSIVDDYRCQLAWTDKTAKYGTDSHKAAILSTLHTMSCEVNSVSHSPVIISFRGIMFPASCSAILRLGLPSYAVTDLCLLTVLGSLKTYDTYMRGTWR

SEQ ID NO: 25191 - protein, 1006 aa, Paragonimus westermani
MHRRRNDRVQDVDAQHATVFDCADCDRTFPTKIGLSQHRRHAHPVERNRENLNHMKSAGTNWSQQESASLLKYADELAPSCPTRRELHNRLLSLFPGRTVESIRTRLYTLSWQRNPVPTANPVTVSQTNVTSGTESQAAENPEWFACLIQTVITQLESNSEASLQTDGLLAIARGLQAGIFTMVQAKSLLNMHAAQAFPYTWRLTTRRRARINVGALVTSKQIRRANYAAIQTLYHQRRKDAAFAVFSGNWRTAYKMNRGLPDSSNEYWSEVLSAHPHPDERPSRTILPPDWSLVDPITGDEVSRTLKQMKNTAPGLDKLLPKHLKRMKADALAGYFNLFLLTQGCPIHLCRSRITLVPKVNNPSSPTELRPIAVSSTLIRCFHKILADRWNARLHLPALQFAFLHRDGCLEATSLLHALLRNSCATSSSLCAAFIDVSKAFDSISQDCIIRSAQAFGAPPPLTHYIADSYRNASVTLGSTVLRSQRGVRQGDPLSPLLFIMAMDEVLALSRPELGYQFHDTLVSGFAYADDLILLAENPTRLSEKLAAAASALELSGLQINTRKTKLMVIRGDHKHNVTAISNESIQFGPDTIRSLSAIDTVTYLGIPFTWKGKAFTNHRLQLRTMLDETTRAPLKPHQRLDLLRQHLIPKMNHSLILSRVHRNTLKAMDCTVRQFVRQWLRLPKDTPISYIHTPIRLGGLGIPSLSTTIPISRKSRLERLLSSQCPVLRNVVKDHSFGPILREVNVPVRVQGVVVTSKEEAHSAWSNKLYHSLDGCGLREVSRSPLSNRWLFNPDRIFPRIFIRAIQLRCSLLRTKVRNSRGDRSGQSVLCRGNCGQPESLAHILQSCWITHDARCARHNRVAKDLARRLRNLDYTVFEELRVPTASSFIKPDVIAVRGGAAVVLDVSIVDDYRCQLAWTDKIAKYGSDSHKAAILSTLHIRSREVNSLTHSPVIISFRGIMFPSSCSAILRLGLPSNAATDLCLLTVLGSLKTYDTCMRGTWR

SEQ ID NO: 25192 - protein, 987 aa, Paragonimus westermani
MKHPICDHTFPTKIGLSQHRRYAHPVERNRENLTHMKSAGTNWSQQESASLLKYADELAPSCPTRRELHNRLLSLFPGRTVESIRTRLYTLSWQRNPVPTANPVTVSQTNVTSGTESQAAENPEWFACLIQTVITQLESNSEASLQTDGLLAIARGLQAGIFTMVQAKSLLNMHAAQAFPYTWRLTTRRRARINVGALVTSKQIRRANYAAIQTLYHQRRKDAAFAVFSGNWRTAYKMNRGLPDSSNEYWSEVLSAHPHPDERPSRTILPPDWSLVDPITGDEVSRTLKQMENTAPGLDKLLPKHLKRMKADALAGYFNLFLLTQGCPIHLCRSRITLVPKVNNPSSPTELRPIAVSSTLIRCFHKILADRWNARLHLPALQFAFLHRDGCLEATSLLHALLRNSCATSSSLCAAFIDVSKAFDSISQDCIIRSAQAFGAPPPLTHYIADSYRNASVTLGSTVLRSQRGVRQGDPLSPLLFIMAMDEVLALSRPELGYQFHDTLVSGFAYADDLILLAENPTRLSEKLAAAASALELSGLQINTRKTKLMVIRGDHKHNVTAISNESIQFGPDTIRSLSAIDTVTYLGIPFTWKGKAFTNHRLQLRTMLDETTRAPLKPHQRLDLLRQHLIPKMNHSLILSRVHRNTLKAMDCTVRQFVRQWLRLPKDTPISYIHTPIRLGGLGIPSLSTTIPISRKSRLERLLSSQCPVLRNVVKDHSFGPILREVNVPVRVQGVVVTSKEEAHSAWSDKLYHSLDGCGLREVSRSPLSNRWLFNPDRIFPRIFIRAIQLRCSLLRTKVRNSRGDRSGQSVLCRGNCGQPESLAHILQSCWITHDARCARHNRVAKDLARRLRNLDYTVFEELRVPTASSFIKPDVIAVRGGAAVVLDVSIVDDYRCQLAWTDKIAKYGTDSHKAAILSTLHTLSCEVNSVFHSPVIISFRGIMFPSSCSAILRLGLPSYAVTDLCLLTALGSLKTCDTYMRGTWR

SEQ ID NO: 25193 - protein, 1006 aa, Paragonimus westermani
MHRRRNDRVQDVDAQHATVFDCADCDRTFPTKIGLSQHRRHAHPVERNRENLNHMKSAGTNWSQQESASLLKYADELAPSCPTRRELHNRLLSLFPGRTVESIRTRLYTLSWQRNPVPIANPVTVSQTNVTSGTESQAAENPEWFACLIQTVITQLESNSEASLQTDGLLAIARGLQAGIFTMVQAKSLLNMHAAQAFPYTWRLTTRRRARINVGALVTSKQIRRANYAAIQTLYHQRRKDAAFAVFSGNWRTAYKMNRGLPDSSNEYWSEVLSAHPHPDERPSRTILPPDWSLVDPITGDEVSRTLKQMENTAPGLDKLLPKHLKRMKADALAGYFNLFLLTQGCPIHLCRSRITLVPKVNNPSSPTELRPIAVSSTLIRCFHKILADRWNARLHLPALQFAFLHRDGCLEATSLLHALLRNSCATSSSLCAAFIDVSKAFDSISQDCIIRSAQAFGAPPPLTHYIADSYRNASVTLGSTVLRSQRGVRQGDPLSPLLFIMAMDEVLALSRPELGYQFHDTLVSGFAYADDLILLAENPTRLSEKLAAAASALELSGLQINTRKTKLMVIRGDHKHNVTAISNESIQFGPDTIRSLSAIDTVTYLGIPFTWKGKAFTNHRLQLRTMLDETTRAPLKPHQRLDLLRQHLIPKMNHSLILSRVHRNTLKAMDCTVRQFVRQWLRLPKDTPISYIHTPIRLGGLGIPSLSTTIPISRKSRLERLLSSQCPVLRNVVKDHSFGPILREVNVPVRVQGVVVTSKEEAHSAWSNKLYHSLDGCGLREVSRSPLSNRWLFNPDRIFPRIFIRAIQLRCSLLRTKVRNSRGDRSGQSVLCRGNCGQPESLAHILQSCWITHDARCARHNRVAKDLARRLRNLDYTVFEELRVPTASSFIKPDVIAVRGGAAVVLDVSIVDDYRCQLAWTDKTAKYGTDSHKAAILSTLHTMSCEVNSVSHSPVIISFRGIMFPASCSAILRLGLPSYAVTDLCLLTVLGSLKTYDTYMRGTWR

SEQ ID NO: 25194 - protein, 1006 aa, Paragonimus westermani
MHRRTNDREQDVDAQHATVFDCADCDRTFPTKIGLSQHRRHAHPVERNRENLNHMKSAGTNWSQQESASLLKYADELAPSCPTRRELHNRLLSLFPGRTVESIRTRLYTLSWQRNPVPTANPVTVSQTNVTSGTESQAAENPEWFACLIQTVITQLESNSEASLQTDGLLAIARGLQAGIFTMVQAKSLLNMHAAQAFPYTWRLNTRRRARINVGALVTSKQIRRANYAAIQTLYHQRRKDAAFAVFSGNWRTAYKMNRGLPDSSNEYWSEVLSAHPHPDERPSRTILPPDWSLVDPITGDEVSRTLKQMENTAPGLDKLLPKHLKRMKADALAGYFNLFLLTQGCPIHLCRSRITLVPKVNNPSSPTELRPIAVSSTLIRCFHKILADRWNARLHLPALQFAFLHRDGCLEATSLLHALLRNSCATSSSLCAAFIDVSKAFDSISQDCIIRSAQAFGAPPPLTHYIADSYRNASVTLGSTVLRSQRGVRQGDPLSPLLFIMAMDEVLALSRPELGYQFHDTLVSGFAYADDLILLAENPTRLSEKLAAAASALELSGLQINTRKTKLMVIRGDHKHNVTAISNESIQFGPDTIRSLSAIDTVTYLGIPFTWKGKAFTNHRLQLRTMLDETTRAPLKPHQRLDLLRQHLIPKMNHSLILSRVHRNTLKAMDCTVRQFVRQWLRLPKDTPISYIHTPIRLGGLGIPSLSTTIPISRKSRLERLLSSQCPVLRNVVKDHSFGPILREVNVPVRVQGVVVTSKEEAHSAWSNKLYHSLDGCGLREVSRSPLSNRWLFNPDRIFPRIFIRAIQLRCSLLRTKVRNSRGDRSGQSVLCRGNCGQPESLAHILQSCWITHDARCARHNRVAKDLARRLRNLDYTVFEELRVPTASSFIKPDVIAVRGGAAVVLDVSIVDDYRCQLAWTDKTAKYGTDSHKAAILSTLHTMSCEVNSVSHSPVIISFRGIMFPASCSAILRLGLPSYAVTDLCLLTVLGSLKTYDTYMRGTWR

SEQ ID NO: 25195 - protein, 1006 aa, Paragonimus westermani
MHRRRNDRVQDVDAQHATVFDCADCDRTFPTKIGLSQHRRHAHPVERNRENLNHMKSAGTNWSQQESASLLKYADELAPSCPTRRELHNRLLSLFPGRTVESIRTRLYTLSWQRNPVPTANPVTVSQTNVTSGTESQAAENPEWFACLIQTVITQLESNSEASLQTDGLLAIARGLQAGIFTMVQAKSLLNMHAAQAFPYTWRLNTRRRARINVGALVTSKQIRRANYAAIQTLYHQRRKDAAFAVFSGNWRTAYKMNRGLPDSSNEYWSEVLSAHPHPDERPSRTILPPDWSLVDPITGDEVSRTLKQMENTAPGLDKLLPKHLKRMKADALAGYFNLFLLTQGCPIHLCRSRITLVPKVNNPSSPTELRPIAVSSTLIRCFHKILADRWNARLHLPALQFAFLHRDGCLEATSLLHALLRNSCATSSSLCAAFIDVSKAFDSISQDCIIRSAQAFGAPPPLTHYIADSYRNASVTLGSTVLRSQRGVRQGDPLSPLLFIMAMDEVLALSRPELGYQFHDTLVSGFAYADDLILLAENPTRLSEKLAAAASALELSGLQINTRKTKLMVIRGDHKHNVTAISNESIQFGPDTIRSLSAIDTVTYLGIPFTWKGKAFTNHRLQLRTMLDETTRAPLKPHQRLDLLRQHLIPKMNHSLILSRVHRNTLKAMDCTVRQFVRQWLRLPKDTPISYIHTPIRLGGLSIPSLSTTIPISRKSRLERLLSSQCPVLRNVVKDHSFGPILREVNVPVRVQGVVVTSKEEAHSAWSNKLYHSLDGCGLREVSRSPLSNRWLFNPDRIFPRIFIRAIQLRCSLLRTKVRNSRGDRSGQSVLCRGNCGQPESLAHILQSCWITHDARCARHNRVAKDLARRLRNLGFTVFEELPVPTASSFIEPDVIAVRGGAAMVLDVSIVDDYRCQLAWADKTAKYGTDSHKAAILSTLHTMSCEVNSLSHSPVIISFRGIMFPFSCGAILRLGLPSYAVTDLCLLTVLGSMKTYDTYMRGTWR

SEQ ID NO: 25196 - protein, 1006 aa, Paragonimus westermani
MHRRRNDRVQDVDAQHATVFDCADCDRTFPTKIGISQHRRHAHPVERNRENLNHMKSAGTNWSQQESASLLKYADELAPSCPTRRELHNRLLSLFPGRTVESIRTRLYTLSWQRNPVPTANPVTVSQTNVTSGTESQAAENPEWFACLIQTVITQLESNSEASLQTDGLLAIARGLQAGIFTMVQAKSLLNMHAAQAFPYTWRLNTRRRARINVGALVTSKQIRRANYAAIQTLYHQRRKDAAFAVFSGNWRTAYKMNRGLPDSSNEYWSEVLSAHPHPDERPSRTILPPDWSLVDPITGDEVSRTLKQMENTAPGLDKLLPKHLKRMKADALAGYFNLFLLTQGCPIHLCRSRITLVPKVNNPSSPTELRPIAVSSTLIRCFHKILADRWNARLHLPALQFAFLHRDGCLEATSLLHALLRNSCATSSSLCAAFIDVSKAFDSISQDCIIRSAQAFGAPPPLTHYIADSYRNASVTLGSTVLRSQRGVRQGDPLSPLLFIMAMDEVLALSRPELGYQFHDTLVSGFAYADDLILLAENPTRLSEKLAAAASALELSGLQINTRKTKLMVIRGDHKHNVTAISNESIQFGPDTIRSLSAIDTVTYLGIPFTWKGKAFTNHRLQLRTMLDETTRAPLKPHQRLDLLRQHLIPKMNHSLILSRVHRNTLKAMDCTVRQFVRQWLRLPKDTPISYIHTPIRLGGLGIPSLSTTIPISRKSRLERLLSSQCPVLRNVVKDHSFGPILREVNVPVRVQGVVVTSKEEAHSAWSNKLYHSLDGCGLREVSRSPLSNRWLFNPDRIFPRIFIRAIQLRCSLLRTKVRNSRGDRSGQSVLCRGNCGQPESLAHILQSCWITHDARCARHNRVAKDLARRLRNLDYTVFEELRVPTASSFIKPDVIAVRGGAAVVLDVSIVDDYRCQLAWTDKTAKYGTDSHKAAILSTLHTMSCEVNSVSHSPVIISFRGIMFPASCSAILRLGLPSYAVTDLCLLTVLGSLKTYDTYMRGTWR

SEQ ID NO: 25197 - protein, 1006 aa, Paragonimus westermani
MHRRRNDRVQDVNAQHATVFDCADCDRTFPTKIGLSQHRRHAHPVERNRENIIHMKSAGTNWSQQESASLLKYADELAPSCPTRRDLHNRLLPLFPGRTVESIRTRLYALSWQRNPVPIANPVTVSQTNVTSGTESQAAENPEWFACLIQTVITQLESNSEASLQTDGLLAIARGLQAGIFTMVQAKSLLNMHAAQAFPYTWRLTTRRRARINVGALVTSKQIRRANYAAIQTLYHQRRKDAAFAVFSGNWRTAYKMNRGLPDSSNEYWSEVLSAHPHPDERPSRTILPPDWSLVDPITGDEVSRTLKQMENTAPGLDKLLPKHLKRMKADALAGYFNLFLLTQGCPIHLCRSRITLVPKVNNPSSPTELRPIAVSSTLIRCFHKILADRWNARLHLPALQFAFLHRDGCLEATSLLHALLRNSCATSSSLCAAFIDVSKAFDSISQDCIIRSAQAFGAPPPLTHYIADSYRNASVTLGSTVLRSQRGVRQGDPLSPLLFIMAMDEVLALSRPELGYQFHDTLVSGFAYADDLILLAENPTRLSEKLAAAASALELSGLQINTRKTKLMVIRGDHKHNVTAISNESIQFGPDTIRSLSAIDTVTYLGIPFTWKGKAFTNHRLQLRTMLDETTRAPLKPHQRLDLLRQHLIPKMNHSLILSRVHRNTLKAMDCTVRQFVRQWLRLPKDTPISYIHTPIRLGGLGIPSLSTTIPISRKSRLERLLSSQCPVLRNVVKDHSFGPILREVNVPVRVQGVVVTSKEEAHSAWSNKLYHSLDGCGLREVSRSPLSNRWLFNPDRIFPRIFIRAIQLRCSLLRTKVRNSRGDRSGQSVLCRGNCGQPESLAHILQSCWITHDARCARHNRVAKDLARRLRNLDYTVFEELRVPTASSFIKPDVIAVRGGAAVVLDVSIVDDYRCQLAWTDKTAKYGTDSHKAAILSTLHTMSCEVNSVSHSPVIISFRGIMFPASCSAILRLGLPSYAVTDLCLLTVLGSLKTYDTYMRGTWR

SEQ ID NO: 25198 - protein, 1006 aa, Paragonimus westermani
MHRRRNDRVQDVDAQHATVFDCADCDRTFPTKIGLSQHRRHAHPVERNRENLNHMKSAGTNWSQQESASLLKYADELAPSCPTRRELHNRLLSLFPGRTVESIRTRLYTLSWQRNPVPIANPATVSQTNVTSGTESQAAENPEWFACLIQTVITQLESNSEASLQTDGLLAIARGLQAGIFTMVQAKSLLNMHAAQAFPYTWRLTTRRRARINVGALVTSKQIRRANYAAIQTLYHQRRKDAAFAVFSGNWRTAYKMNRGLPDSSNEYWSEVLSAHPHPDERPSRTILPPDWSLVDPITGDEVSRTLKQMENTAPGLDKLLPKHLKRMKADALAGYFNLFLLTQGCPIHLCRSRITLVPKVNNPSSPTELRPIAVSSTLIRCFHKILADRWNARLHLPALQFAFLHRDGCLEATSLLHALLRNSCATSSSLCAAFIDVSKAFDSISQDCIIRSAQAFGAPPPLTHYIADSYRNASVTLGSTVLRSQRGVRQGDPLSPLLFIMAMDEVLALSRPELGYQFHDTLVSGFAYADDLILLAENPTRLSEKLAAAASALELSGLQINTRKTKLMVIRGDHKHNVTAISNESIQFGPDTIRSLSAIDTVTYLGIPFTWKGKAFTNHRLQLRTMLDETTRAPLKPHQRLDLLRQHLIPKMNHSLILSRVHRNTLKAMDCTVRQFVRQWLRLPKDTPISYIHTPIRLGGLGIPSLSTTIPISRKSRLERLLSSQCPVLRNVVKDHSFGPILREVNVPVRVQGVVVTSKEEAHSAWSNKLYHSLDGCGLREVSRSPLSNRWLFNPDRIFPRIFIRAIQLRCSLLRTKVRNSRGDRSGQSVLCRGNCGQPESLAHILQSCWITHDARCARHNRVAKDLARRLRNLDYTVFEELRVPTASSFIKPDVIAVRGGAAVVLDVSIVDDYRCQLAWTDKTAKYGTDSHKAAILSTLHTMSCEVNSVSHSPVIISFRGIMFPASCSAILRLGLPSYAVTDLCLLTVLGSLKTYDTYMRGTWR

SEQ ID NO: 25199 - protein, 1006 aa, Paragonimus westermani
MHRRRNDRVQDVNTQHATVFDCADCDRTFPTKIGLSQHRRHAHPVERNRENLNHMKSAGTNWSQQESAFLLKYADELAPSCPTRRDLHNRLLPLFPGRSVGSIRTRLFALSWQRNPVPTANPVTVSQTNVTSGTEFEAAENSEWFACSIQTVIIQLESNSEASVQTDGLLAIARDLQAGIFTMVQAKSLLNMHAAQAFLYTWRLNTRRRARINVGALVTSKQIRRANYAAIQKLYHQRRKDAAFAVFSGNWRTAYQMDRGLPDSSNEYWPEVLSAHPHPDERPSRTILPPDWSLVDPITGDEVTRTLKQMENIASGLDKLLPKHSKRIKADALTGYFNLFLLTQGCPIHLCRSCITLVPKVTNPSSPTELRPIAVSSTLIRCFHKILADRWNTRLHLPALQFAFLHRDGCLKATSLLHALFRNSCTTSSSLCAAFTDVFKAFDSISQDSIIRSAQAFGAPLPLTHYIADSYRNASVTLGSTVLRSQRGVRHGDLLSPLLFIMAMDEVLALSRPELGYQFHDTLVSGFAYADDLILLAENPTQISEKLSAAASALDLSGLQINTRKTKLMIIHGDHKHNVTTISNESIQFGPDTIRSLSAIDTVTYLGIPFTWEGKAFTNHRLQLRTMLDETTRAPLKPHQRLDLLRQHLIPKMNHSLILSRVHRNTLKAMDCTVRQFVRQWLRLPKDTPISYIHTPIRLGGLGIPSLSTTIPISHKSRLERLLSSQCPVLRNVVKDHSFGPILREVNVPVRVQGLVVTSKEEAHAMWTDKLYHSLDGCGLREVSRPALSSRWLFNPDRIFPRIFIRAIQLRCSLLRTKVGNSRGDRSRQSVLCRGNCGQKESPAHILQSCWITHNARCAQHNRVAKDLARRLRNLGFTVFEELRIPKASSFIKPDVIVVRGGAAVVLDVSIVDDYRCQLAWTDKIAKYGSDSHKAAILSTLHIRSREVNSLTHSPVIISFRGIMFPSSCSAILRLGLPSNAATDLCLLTVLGSLKTYDTCMRGTWR

SEQ ID NO: 25200 - protein, 820 aa, Tomocerus qinae
MRKCELVGGNIQSNPKNHKRSSRNISRREKYRRFQQMYENDRTRLARRILDGEIDKPEGEQIPGIAKVWGESFELKSVGTNIANMEAVSPLRKNVWVPITISDIGWLVTNTKNSAAGPDGLSVSKLKSIRKTILAKIFNLIMLHGQPLSSIKLSRTVLIPKIDKPQSATHYRPISISSTILRFINKILAKRLTDAANLDIRQRGFLPVDGCAENIAILEAIVSHAKQNIKSAYIACLDIKNAFGSVSHEAIIHALKLNGASEHFVRYVRQLYTNFQTEITSGDEKVTVNVNRGVLQGDPLSPILFNLVIDQLLRKLPTDIGCVIDGEVRTNGMAFADDLILSASTEIGMGCLLRKVESLAPTWGLEFNPRKCSYMALVASGKDKKIKVRADLALRLHGEKLKGINIMESYKYLGTFHGPAGQLSVKSQLGIYLDRLLRTPLKPQQKLFILKQYLIPRLLYTLTMHKVETTKLSKYDRMIRNFLTGEKQGVLHLPKSTPKAFFYANKAGLGILSLRAAIPHMIVQRFGRMKVSDSTLARAAFNSKVIQDKISGAKRALIRHEGRLIDSREEVIKYHRELLFQMVDGKALEEFNGVPCAHGWISDGTKKMSGQVYIESLKIRINALPTLARRARGKTMARECSAGCSRPETIHHVLQVCPRTHDARVKRHDSVAALLCNYLEQTKNTVYKEPHITTSAGLRKPDILAVNQAGTALYIDVQICGEWPLRTYHRKKVQYYRNSDLEEYARTQGASAVQWTTLIISYRGLVCKESYVGLKPFGINRAMLTSLVTLSLEKSTYIWHIFQRSTAHAWSRRKRPRPTV

SEQ ID NO: 25201 - protein, 887 aa, Menura novaehollandiae
MAKQVSDKRRLLAKGPSRTVPLSTEGNLTMGEEEHPPPAELPREGPLRLHCLETIREWLSLHKVTNYQKAFERILEGQDPQKVVNETCDECFGSLNMLCQITKATRVQKSRKPNRARSTKPYAMWMRKRAKKKGKYLRYQKLFYLNRGRLARIILDDVEALKCEVSPSIVHSVFKARWETSGQFTGLKSFLPHKDSDNTALQALITEKEVEKNIKEMSNNSAPGPDGITLGHLIEMDPEYSLLMETFNLLLLTGTTPDAMRECQTILIPKSTRADRLNDISNWRPITIAATVLRLFSRILTARLSKACPINPRQRGFIRAAGCSKNLQLLQLVIKHAKKEQRDPGIVFVDIAKAFDTICHQHIISGLMQRGVDPHIMHLIGNMYENIHTYIDTKKKTTDPIKILTGVKQGDPMSPLLFNLALDPLLCKLENMGEGCHQGGLKVTAMAFADDLVLLSDSWEGMCTNIKILETFCHLTGLKTQGEKCHGFYIKPTKDSYTINDCPVWTINGTPLNMTDPGHSEKYLGLQIDPWTGIADTGLSEKLVDWLQWIGDAPLKPLQKADILRTYTISRLVYLADHTDVKAGLLESLDLQIRSSVKEWLHLPPNTCDAILYSSCKDGGLDIIKLAAFIPSIQARRLHRLAQSSDFALTTFLRGEHLEQTYEKLWTRAGGDRENIPPIWEPIPIPERLFGEDEDASEWEVAVPKIRYPRPCNWRKNEYNKWKQLVSQGHGIETFENDNISNGWITRYRGIPHRKLITTLQLRANVYPTREFLARGRQDERIRTCRHCGADYETSAHIIGNCPMTQDARIKRHNSICERFSCEAKKKNWTTFSELHIRDDSNELYKLDLIFVKEGKAFVVDMTVRYEHSNSPLKDAANEKVKKYLPR

SEQ ID NO: 25202 - protein, 1232 aa, Lycocorax pyrrhopterus
MVQSVALRYVSTATQTDPLDLWVSEAKIPSSLVVLYEDRFDLVPLEFVNSRLVYKVGSHLGNVAECLASLPEPYEILPSGLVQEDVLECEVRESEEPVTPTVPPGVSDVPPLPGTPVVSVPDKNPSCPRCSTRFTRMMGLTDHLKKAHGQRKIWFRCSKCGRQNLKYHSIACHVPRCKGEACVVPTGSWVCEVCSRGFATKIGLGQHKRLKHPLVRNMERIVASHPKESSLRGAHKKVWTEEEEALLSQLVIRYAGSRNINQLIAEQMPSKTAKQISDKRRLLGKGPSKKVPSAEGDDLGRDEPPLSARGPSEGRLKLHYLDAIRLTLSASGFTTCQEAFRSVLEGQDPQVAVNEVYDKFRDGLTRLSHRRSSGVKSRRSHGRDASKTTAKWMQKRAVKRGKYLRYQKLFQVHRGKLAHIILDNTEALQCQIPPGVVHSAFKGRWETSAGFVGLGTFPVYREADNTMFQDLITEKEIDKNVREMRKTSAPGPDGITLGHIMKLDPKFSQLKEIFNLWLATGAIPDALRECRTVLIPKSSDEERLGDINNWRPITIGSVVFRLFSRIATARLARACPINPRQRGFICASGCSENLKLLQLLVRCAKQEHRDLGVVFVDIAKAFDTVRHQHIVAGLIQRGVDSHVVHLVSEMYRNITTYILTKEGKTDPINISSGVKQGDPMSPLLFNLALDPLLCKLEADGDGFHHGGYKLTAMAFADDLVLLSNSWEGMNRNIKILETFCNLTGLRTQGEKCHGFYIKPTKDSYTINDCPSWKICGSPLNMIDPGSSEKYLGTQIDPWTGFADSGLSTKLEGWLHQIRDAPLKPFQKVDILRTYAIPRLIYLADHTEVRSGLLESLDLSIRRAVKEWLHLPDSTCDAILYSRFKDGGLGLIKLAALIPSVQARRLHKLAQSSDGALVAFLKGEHLEQVFEKLWVRAGGVRESIPAIWEPVPKVEVVVEGDEALSVWEAPRSRTHFPKPCNWRKVEFNKWKQLVTQGHGIENFENDDISNGWLVHYRSIPHRKLITALQLRANVYPTREFLARGRRGVCARTCRHCGADYETAAHVIGNCPITQDARIKRHNSICETLSCEAKREGWTVFQEPHLRDEVNELFKPDLIFVKEEKALVVDVTVRYEHHNSSLKEAAAEKAKKYQRLLPQIRELTNAATIEFVGFPLGARGKWFEKNSELLQALGLSKTRLGRTARALASRALFSSVDIVHIFTSKARLYISPNK

SEQ ID NO: 25203 - protein, 837 aa, Zosterops borbonicus
MQKRARKRGKYLRYQKLFRFHRGRLARVILDNTEALQCQIPSSVVHNVFKARWETSGGFVGLGTFSVYREADNIAFQDLITEKEVDKNVNEMRKTSAPEPDEITLGHLLKLDPKFSRLTAILNLWLVTGTIPDALWDCRTVLIPKSSSEERLGDINNWRPITIASVVIRIFSMIAYARLSRACPIHPRQRGFISASGCSENIKLLQLLVRCAKQEHCHLGVVFMDIAKAFDTVSHKHIIAGLTRRGVDPHIVHLVSEMYKGITMYIVTRDGKTDPINISSGVKQGDPMSPLLFNLALDPLLCKLEAEGKGFHQGGFHVTAMAFADDLVLVSDSWEGMCYNMKILETFCNLTGVRTQGEKCHGFCIKPTRASYTINDCPAWQINGSPLHMIDPGCSEKYLGIQIDPWVGFADQGLVEKLEDWLHRIGDTPLKPLQKVDILRTYIIPRLVYLADHTEIRSGPLETLDLSIRRTVKEWLHLPPSTCDAVMYSRFKDGGLGLTKLATLIPSIQARRLHKLAQSSDEALVTFLKGEHLESMHDKLWLRAGGVKESIPSIFEPLPKREVVVEEGEALSEWEVPRSRTILPKPCNWRKVQFTTWKQLVSRGHGISNLENDTISNGWLVRYHGIPHRKLITALQLWANVYPTREFLARGRHDARVRSCRHCDAEFETSAHIIGNCPTTQDARIKRHNSICETLSNEAKRENWTVYQEPHLRDDKNELYKLDLILVKGTKAFVVDVTVRYEHSNSSLKEAAVEKARKYQGLLPQIRDLTNTKTVEFVGFPLGARGKWYEKNSELLLALGLSKTRLGRIARALASRALFSSVDIVHIFVSKNRSLLP

SEQ ID NO: 25204 - protein, 1204 aa, Erithacus rubecula
MVQLVSLRYISTATQTDPLDLRVATAAISSIPPTRHDVGFQLMSLEPIPPTRHNKGFQLKCLESIPPTRHDEGFQLKCLESIPPTRHDEGFQLKCLEFVNSSYNEEIRYYLGGIWDGLANLPEPYETLEGLADLPEPYETLPFRLVQGDVSECVRTVVEEPKSPEALPGLSSEGTPSGTPIVSVPDKNPFCPCCATRFTRMLGLIDHLKRNHGQKKIWFKCSKCGKQNLKYPSIACHLPRCKGEVCVVPTGDWACEVCQKSFTTKIGLGQHKRLAHPLVRNLERIEASHPKVPSLRGAHKKVWTEEEEALLSQLVMIYEGKKNINQLIMEHLPSKTAKQISDKRRLLMKVPSKGVLSQEEGVGSEDLPQSVDLPQEGLPQEGRLKLQYSVAIKRMFATYGFTSCQEAFAKILDGQDPQMVVNEVYEKFFGSPLELSQDGKSTRRRKSQKGQKASKTTTSWMRKRAKKKGKYLRYQRLFHLHRRRLARIILDDVEDLQCQLPSNIVHAAFKARWETPVGFKGLQSFPPHGRADNTAFQALITPKEVEKNLKEIAKTSAPGPDGITLGQLLKKDPKFSLLTEIFNLWLVAGTIPDLLRDCRTVLIPKSTDLEKVGDINNWRPITIASTVLRLFSRIVTARLTRACPINPRQRGFIRASGCSENLKLLQLVVRHAKREHCDLGVVFVDIAKAFDTISHEHIIMGLRQRGVDSHIVQLVVDLYKNINTFIAMKSGRTDPIKILRGVKQGDPMSPILFNLALDPLLCKLEKNGYGFQRGNLRITAMAFADDLVLLSDSWDGMCGNIKILETFCELTGLQTKGEKCHGFYIRPTRDAYTINDCPAWTINGTPLNMIDPGNSERYLGIQIDPWTGFADSGISKKLEEWLHRIRDAPLKPLQKVDILRTYTIPRLIYLADHTEVRGGPLEFLDLVVRNEVKGWLHLPPSTCDAILYSKCKDGGLGIIKLSALVPSIQARRLHRLAQSSDETLVQFLKGEHIEVLYEKLWLRAGGVKESIPTIWEPIPVSVSVVSGGGDVSEWEVPVPRPCYPRPCNWRKTEFNRWKHLVAQGHGIENFENDNISNGWLTQYRGIPHRKLITALQLRANVYPTREFLARGKKDVYVTTCRHCGADYETTAHIIGSCPITKDARIKRHNSICETLSNEAKREGWSVFQEPHIRDENQELPWAGGKRVRGPRGVLSGVPCRAGER

SEQ ID NO: 25205 - protein, 1302 aa, Erithacus rubecula
MVQSVSLRYISMATQTDPLDLRVATAAISSIPPTRHDEGFRLMCLESIPPTRHDKGFQLKCLESIPPTRHDKGFQLKCLESIPPTRHDKSFQLKCLESIPPTRHDEGFKLKCLEFVNSSYNEEIGYHLGGIWEGLADLPEPYETLPFRLVQGDVSECVRTVVEEPKSPEALPGLSSEGTPSGTPIVSVPDKNPFCPCCATRFTRMLGLIDHLKRNHGQKKIWFKCSKCGKQNLTYHSIACHLPRCKGEVCVVPTGDWACEVCQKSFTTKIGLGQHKRLAHPLVRNLQRIEASHPKVPSLRGAHKKVWTEEEEALLSQLVMIYEGKKNINQRIMEHLPSKTAKQISDKRRLLMKVPSKGVLSQEEGVGSEDLPQSVDLPQEGLPQEGRLKLQYSVAIKRMFATYGFTSCQEAFAKILDGQDPQMVVNEVYEKFFGSPLELSQDGKSTRRRKSQKGQKASKTTTSWMRKRAKKKGKYLRYQRLFHLHRRRLARIILDDVEDLQCQLPSNIVHAAFKARWETPVGFKGLQSFPPHGRADNTAFQALITPKEVEKNLKEIAKTSAPGPDGITLGQLLKKDPKFSLLTEIFNLWLVAGTIPDLLRDCRTVLIPKSTDLEKVGDINNWRPITIASTVLRLFSRIVTARLTRACPINPRQRGFIRASGCSENLKLLQLVVRHAKREHCDLGVVFVDIAKAFDTISHEHIIMGLRQRGVDSHIVQLAVDLYKNINTFIAMKSGRTDPIKILRGVKQGDPMSPILFNLALDPLLCKLEKNGYGFQRGNLRITAMAFADDLVLLSDSWDGMCGNIKILETFCELTGLQTKGEKCHGFYIRPTRDAYTINDCPAWTINGTPLNMIDPGNSERYLGIQIDPWTGFADSGISKKLEEWLHRIRDAPLKPLQKVDILRTYTIPRLIYLADHTEVRGGPLEFLDLVVRNEVKGWLHLPPSTCDAILYSKCKDGGLGTIKLSALVPSIQAGRLQRLAQSSDETLVQFLKGEHIEVLYEKLWLRAGGVKESIPTIWEPMPVSVSVVSGGGDVSEWEVPVPRPCYPRPCNWRKTEFNRWKHLVAQGHGIENFENDNISNGWLTQYRGIPHRKLITALQLRANVYPTREFLARGKKDVYVTTCRHCGADYETTAHIIGSCPITKDARIKRHNSICETLSNEAKREGWSVFQEPHIRDENQELFKPDLIFIKESKALVVDATVRYEHNNSSLKEAAAEKVKKYQCLLQQVKDLTNAEDIEFIGFPIGARGKWYEENFDLLLALGLSKTRLGKTARALASRALLSSVDIVHIFASKARTVVSN

SEQ ID NO: 25206 - protein, 1327 aa, Erithacus rubecula
MGEGPAVDFDNPHLDVSQFFPPNLTMVQSVSLRYISMATQTDPLDLRVATAAISSIPPTRHDEGFRLMCLESIPPTRHDKGFQLKCLESIPPTRHDKGFQLKCLESIPPTRHDKSFQLKCLESIPPTRHDEGFKLKCLEFVNSSYNEEIGYHLGGIWEGLADLPEPYETLPFWLVQGDVSECVRTVVEEPKSPEALPGLSSEGTPSGTPIVSVPDKNPFCPCCATRFTRMLGLIDHLKRNHGQKKIWFKCSKCGKQNLKYHSIACHLPRCKGEVCVVPTGDWACEVCQKSFTTKIGLGQHKRLAHPLVRNLQRIEASHPKVPSLRGAHKKVWTEEEEALLSQLVMIYEGKKNINQRIMEHLPSKTAKQISDKRRLLMKVPSKGVLSQEEGVGSEDLPQSVDLPQEGLPQEGRLKLQYSVAIKRTFATYGFTSCQEAFAKILDGQDPQMVVNEVYEKFFGSPLELSQDGKSTRRRKSQKGQKASKTTTSWMRKRAKKKGKYLRYQRLFHLHRRRLARIILDDVEDLQCQLPSNIVHAAFKARWETPVGFKGLQSFPPHGRADNTSFQALITPKEVEKNLKEIAKTSAPGPDGITLGQLLKKDPKFSLLTEIFNLWLVAGTIPDLLRDCRTVLIPKSTDLEKVGDINNWRPITIASTVLRLFSRIVTARLTRACPINPRQRGFIRASGCSKNLKLLQLVVRHAKREHCDLGVVFVDIAKAFDTISHEHIIMGLRQRGVDSHIVQLAVDLYKNINTFIAMKSGRTDPIKILRGVKQGDPMSPILFNLALDPLLCKLEKNGYGFQRGNLRITAMAFADDLVLLSDSWDGMCGNIKILETFCELTGLQTKGEKCHGFYIRPTRDAYTINDCPAWTINGTPLNMIDPGNSERYLGIQIDPWTGFADSGISKKLEEWLHRIRDAPLKPLQKVDILRTYTIPRLIYLADHTEVRGGPLEFLDLVVRNEVKGWLHLPPSTCDAILYSKCKDGGLGIIKLSALVPSIQAGRLQRLAQSSDETLVQFLKGEHIEVLYEKLWLRAGGVKESIPTIWEPMPVSVSVVSGGGDVSEWEVPVPRPCYPRPCNWRKTEFNRWKHLVAQGHGIENFENDNISNGWLTQYRGIPHRKLITALQLRANVYPTREFLARGKKDVYVTTCRHCGADYETTAHIIGSCPITKDARIKRHNSICETLSNEAKREGWSVFQEPHIRDENQELFKPDMIFIKESKALVVDATVRYEHNNSSLKEAAAEKVKKYQCLLQQVKDLTNAEDIEFIGFPIGARGKWYEENFDLLLALGLSKTRLGKTARALASRALLSSVDIVHIFASKARTVVSN

SEQ ID NO: 25207 - protein, 1180 aa, Lanius collurio
MVQSATLRYVSTGTQTDPLDLRVKGADIPSPPMVLSEERFDLVSLEFVNSNLAFISGFQLGSTRECLADLPEPYEILPLRQVGDVQSECEIREHGEPKTPEAPPGTSEEATPIGTPVVSVPDKNPSCPRCMTRFTRMLGLVDHLKQAHGQRKIWFRCSKCGRQNLKYHSIVCHVPRCKGEVCVVPTGDWVCEVCSRGFATKIGLGQHKRLKHPLVRNEERIVASHPKVSSLRGAHKRVWTEEEETLLSQLVIQYAGRRNINQLIMEHIPSKTAKQISDKRRLMAKGPSVVPSIVGVPLGREEPPQSVEGPREGQLKLRYVESICVKLKAGRFTSCQEAFQKILDGSDPQVVVNEVYERFQDSLDRPGLTPRGPKSQRARGRKASKGTTKWMQKRAKKRWQYLRYQRLFQFQRGRLARVILDSTETLKCQIPSGTIHNAYQARWESSVCFTGLETFPVYREADNTAFQDLITEKEIGKNVNEMRKSSAPGPDGITLGHLVKIDPKFSQLSEIFNLWLMTGTVPDALRECRTVLIPKSSCEERLGDINNWRPITIASMVFRLFSRIATARLARACPINPRQRGFICASGCSENLKLLQLLVKCAKQERCHLGVVFVDIAKAFDTVCHQHILAGLVKRGVDPHIVHLVSEMYRNIKTYIITKEGKTDPINIRSGVKQGDPMSPLLFNLALDPLLCKLETEGKGFHHGGFQVTAMAFADDLVLLSDSWDGMQYNIQILETFCELTGLRTQGEKCHGFYIKPTKDSYTINDCPVWQINGTPLNMIDPGSSEKYLGVQIDPWVGFADPVLSSKLEEWLHRISDAPLKPFQKMDILRTYTIPRLIYLADHTEVTAGLLESLDLLIRKVVKEWLHLPPSTCDAILYSKFKDGGLGLIKLAALIPSIQARRLHKLAQSSDGTLVAFLKGEHLERIYEKLWVRAGGVRGSIPSIWEPIQQVVQVVSEEEAVSEWEAPRPRICLPKPCDWRKVEFNKWKQLVVQGHGIANFENDNISNGWLLRYRGIPHRKLITALQLRANVYPTREFLARGRQEGSVRSCRHCGAEYETSAHAIGNCPITQDARIKRHNSICETLGREAKREKWTVFQEPHLRDDKNELYKPDLIFVKGEKALVVDVTVRYEHSNSSLKEAAAEKARKYQHLVPQICEITNASAVEFLGFPLGARGKWFE

SEQ ID NO: 25208 - protein, 1232 aa, Eopsaltria australis
MVQLLGLRFISTGTQTDPLDLRVDLAMVVSPPASQSEDVGFHLVNLEFVNSRFGYDPGIILENVREELAKFPEPFEALPPRPPISVGSADAQGDGEEPKTPEAPPGTKEGVTPVATPVVSVPDKNPSCPLCATRFTRMLGLIDHLQRAHRQKKIWFKCSKCGRQNLKYHSIVCHVPHCKGEVCVVPTGAWVCEVCQKGFPTKSGLGQHKRSMHPLVRNLERIAASHPKESSLKGAHKKVWTEEELALLKRLMVTYAGNRNINKLIAEHIPSKTAKQISDKRRLLMKSPSDVVTTGEEGVLQEGTEDQAQVVALPKEGRLKLHYWDSIKKGLSEGRFTRCKRAFECILEGEDPQKVVNDCYEECFGDLGSLSQIKSKGSRSQRPQSQKASRKTANWMQKRAKKRGKYLRYQKLFDLHRGRLARVILDNSDALQCDIPSDIVYSNFKARWESSAEFKGLEPFLSYREADNTKFRALITEKEVEKNLSEVKRTSAPGPDGFTVGHLKKWDPKYSLLSNSFNLWLATGTSPDALRACRTVLIPKSSDPERLRDVNNWRPITIASMVLRLFSRVLTARLDRACLIHPRQRGFIRASGCSENLKLLQLVVKYAKSEHKDLGVVFVDIAKAFDTVCHRHIIKGLEQRGLDPHLIHLIGEMYENITTCITTKKGQTDPIKILTGVKQGDPMSPLLFNLAIDPLLCKLEQIGKGFHHGGMNITAMSFADDLVLLSDSWDGMRDNIKILEAFCDRTGLKTQGEKCHGFYIKATRDAYTINDCPIWTIGGTPLNMIDPGHSEKYLGTWVDPWTGFADTGLSEKLEKWLHQIGDSPLKPLQKVDILRTYTIPRLVYLADHTEVTAGLLESLDLQIRAAVKGWLHLAPSTCDGLFYPSCKDGGLGILKLVALIPSIQARRLHRLAQSSDETLKVFLKDSHLDSLYEKLWVRAGGVKESTPRIWEPIPGLENVVVGEEELSEWEAPVQKFRYPRPCNWRKTEFHKWKQLVSQGHGVENFENDKISNGWITRYKGIPHRKLITALQLRANVYPTREFLARGRHGDCIRSCRHCGAEFETTTHIIGNCAITQDARIKRHNNICEILSREAKKENWTVFQEPHIRDEDNELFKPDLIFVKEEKAIVVDVTVRYEHSNSSLKDAAAEKVRKYQPLLNQIEELTNAIVVDFVGFPLGVRGKWFPKNSELLSALGLSKTGLEKTARTLASRALLSSVDIVHIFSSQARSILP

SEQ ID NO: 25209 - protein, 1232 aa, Eopsaltria australis
MVQSLGLRYISTGTQTDPLDHRVKSANVVPSPASQLEDVGLHLVNLEFVNSKFDYEPGINLANVREELAKFPEPFEALPSRPPISVGSADAQGDGEEPKTPEAPPGSKEGVTPVATPVVFVPDKTPSCPLCATRFTRMLGLIDHLQRAHGQKKIWFKCSKCGRQNLKYHSIVCHVPHCKGEVCVVPMGAWVCEVCQKGFPTKIGLGQHKRSMHPLVRNLERIAASHPKESSLKGAHKKVWTEEELALLKRLMVTYAGNRNINKLIAEHIPSKTAKQISDKRRLLMKSPSDVVTTGEEGVLQEGTEDQAQVVSLPKEGRLKLHYWDSIKKGLSVGRFTRCKRAFERILEGEDPQKVVNDCYEECFGDLGSLSQIKSKGSRSQRPQSQKASRKTANWMQKRAKKRGKYLRYQKLFDLHRGRLARVILDNSDALQCDIPSDIVYSNFKARWESSAEFKGLEPFLSYREADNTKFRALITEKEVEKNLSEVKRTSAPGPDGFTVGHLKKWDPKYSLLSNSFNLWLATGTIPDALRACRTVLIPKSSDPERLRDVNNWRPITIASMVLGLFSRILTARLDRACPIHPRQRGFIRASGCSENLKLLQLVVKYAKSEHKDLGVVFVDIAKAFDTVCHRHIIKGLEQRGLDPHLIHLIGEMYENITTCITTKKGQTDPIKILTGVKQGDPMSPLLFNLAIDPLLCKLEQIGKGFHHGGMNITAMAFADDLVLLSDSWDGMRDNIKILEAFCDRTGLKTQGEKCHGFYIKATRDAYTINDCPTWTIGGTPLNMIDPGHSEKYLGTWVDPWTGFADPGLSEKLEKWLHQIGDSPLKPLQKVDILRTYTIPRLVYLADHTEVTAGLLESLDLQIRAAVKGWLHLPPSTCDGLFYPSCKDGGLGILKLVALIPSIQARRLHRLAQSLDETLKVFLKDSHLDSLYEKLWVRAGGVKESIPRIWEPIPGLENVVVGDEELSEWEAPVQKFRYPRPCNWRKSEFQKWKQLVAQGHGVENFENDKISNGWITRYKGIPHRKLITALQLRANVYPTREFLARGRHGDCVRSCRHCGAEFETTAHIIGNCAITQDARIKRHNNICEILSREAKKENWTVFQEPHIRDEDNELFKPDLIFVKEEKAIVVDVTVRYEHSNSSLKDAAAEKVRKYQPLLNQIEELTNAIVVDFVGFPLGVRGKWFPKNSELLSALGLSKTGLEKTARTLASRALLSSVDIVHIFSSQARSILP

SEQ ID NO: 25210 - protein, 1232 aa, Eopsaltria australis
MVQLLGLRFISTGTQTDPLDLRVDLAMVVSPPASQSEDVGFHLVNLEFVNSRFGYDPGIILENVREELAKFPEPFEALPSRPPISVGNDGAQGDGEEPNTPEAPPGSREGVTPAVTPVLSVPDKTPSCPPCTIQFTRMLGLTDHLQRAHGQKKIWFKCSKCGRQNLKYHSIVCHVPHCKGEVCVVPTGAWVCEGCQKGFPTKIGLGQHKRSMHPLVRNLERIAVSHPKESSLRGAHKKVWTEEEEALLKRLMVTYAGNNNISKLIAEHIPSKTTKQISDKRRLLMKSPSDVVTTGEEGVLQEGTEDQAQVVALPKEGRLKLHYWDSIKKGLSEGRFTRCKRAFECILEGEDPQKVVNDCYEECFGDLGSLSQIKSKGSRSQRSQSQKASRKTANWMQKRAKKRGKYLRYQKLFDLHRGRLARVILHNSDALQCDIPSDIVYSNFKARWESSAEFKGLEPFLSYKEADNTKFRALITEKEVEKNLSEVKRTSAPGPDGFTVGHLKKWDPKYSLLSNSFNLWLATGTIPDALRACRTVLIPKSSDPERLRDVNNWRPITIASMVLGLFSRILTARLDRACPIHPRQRGFIRASGCSENLKLLQLVVKYAKSEHKDLGVVFVDIAKAFDTVCHRHIIKGLEQRGLDPHLIHLIGEMYENITTCITTKKGQTDPIKILTGVKQGDPMSPLLFNLAIDPLLCKLEQIGKGFHHGGMNITAMAFADDLVLLSDSWDGMRDNIKILEAFCDRTGLKTQGEKCHGFYIKATRDAYTINDCPTWTIGGTPLNMIDPGHSEKYLGTWVDPWTGFADPGLSEKLEKWLHQIGDSPLKPLQKVDILRTYTIPRLVYLADHTEVTAGLLESLDLQIRAAVKGWLHLPPSTCDGLFYPSCKDGGLGILKLVALIPSIQARRLHRLAQSSDETLKVFLKDSHLDSLYEKLWVRAGGVKESIPRIWEPIPGLENVVVGDEELSEWEAPVQKFRYPRPCNWRKSEFQKWKQLVAQGHGVENFENDKISNGWITRYKGIPHRKLITALQLRANVYPTREFLARGRHGDCVRSCRHCGAEFETTAHIIGNCAITQDARIKRHNNICEILSREAKKENWTVFQEPHIRDEDNELFKPDLIFVKEEKAIVVDVTVRYEHSNSSLKDAAAEKVRKYQPLLNQIEELTNAIVVDFVGFPLGVRGKWFPKNSELLSALGLSKTRLEKTARTLASRALLSSVDIVHIFSSQARSILP

SEQ ID NO: 25211 - protein, 1232 aa, Eopsaltria australis
MVQLLGLRFISTGTQTDPLDLRVDLATVVSPPASQSEDVGFHLVNLEFVNSRFGYDPGIILENVREELAKFPEPFEALPSRPPISVGSADAQGDGEEPKTPEAPPGNKEGVTPVATPVVSVPDKTPSCPLCATRFTRMLGLIDHLQRAHGQKKIWFKCSKCGRQNLKYHSIVCHVPHCKGEVCVVPTGAWVCEVCQKGFPTKIGLGQHKRSMHPLVRNLERIAASHPKESSLKGAHKKVWTEEELALLKRLMVTYAGNRNINKLIAEHIPSKTTKQIRDKRRLLMKSPSDVVTTGEEGVLQEGTEDQAQVVSLPKEGRLKLHYWDSIKKGLSVGRFTRCKRAFERILEGEDPQKVVNDCYEECFGDLGSLSQIKSKGSRSQRPQSQKASRKTANWMQKRAKKRGKYLRYQKLFDLHRGRLARVILDNSDALQCDIPSDIVYSNFKARWESSAEFKGLEPFLSYKEADNTKFRALITEKEVEKNLSEVKRTSAPGPDGFTVGHLKKWDPKYSLLSNSFNLWLATGTIPDALRACRTVLIPKSSDPERLRDVNNWRPITIASMVLRLFSRVLTARLDRACPIHPRQRGFIRASGCSENLKLLQLVVKYAKSEHKDLGVVFVDIAKAFDTVCHRHIIKGLEQRGLDPHLIHLIGEMYENITTCITTKKGQTDPIKILTGVKQGDPMSPLLFNLAIDPLLCKLEQIGKGFHHGGMNITAMAFADDLVLLSDSWDGMRDNIKILEAFCDRTGLKTQGEKCHGFYIKATRDAYTINDCPTWTIGGTPLNMIDPGHSEKYLGTWVDPWTGFADPGLSEKLEKWLHQIGDSPLKPLQKVDILRTYTIPRLVYLADHTEVTAGLLESLDLQIRAAVKGWLHLPPSTCDGLFYPSCKDGGLGILKLVALIPSIQARRLHRLAQSSDETLKVFLKDSHLDSLYEKLWVRAGGVKESIPRIWEPIPGLENVVVGDEELSEWEAPVQKFRYPRPCNWRKSEFQKWKQLVAQGHGVENFENDKISNGWITRYKGIPHRKLITALQLRANVYPTREFLARGRHGDCVRSCRHCGAEFETTAHIIGNCAITQDARIKRHNNICEILSREAKKENWTVFQEPHIRDEDNELFKPDLIFVKEEKAIVVDVTVRYEHSNSSLKDAAAEKVRKYQPLLNQIEELTNAIVVDFVGFPLGVRGKWFPKNSELLSALGLSKTRLEKTARTLASRALLSSVDIVHIFSSQARSILP

SEQ ID NO: 25212 - protein, 838 aa, Corvus brachyrhynchos
MQKRAVKKGKYLRYQRLFQIHRGRLARAILDNVEALQCQIPSGDIHKAFKDRWETSVGFSGLESFPIYREADNTVFRDMISEKEIGKNLNEMSKTSAPGPDGITLGHLIKADPKFSQLKEIFNLWLATGTLPDALRDCRTVLIPKSSNEERLGDINNWRPITIASVVFRLFSRIANARLVRACPINPRQRGFISASGCSENLKLLQLLVKKAKQEHRSLGVVFVGIAKAFDTVCHQHIIAGLVKRGVDSHIVHLIGEMYKNIKTYIVTKNGKTDPINIRSGVKQGDPMSPLLFNLALDPLLCKLETEGFGFHHGGFKITAMAFADDLVLLSDSWEGMCFNIKILETFCEHTGLRTQGEKCHGFYIKPTKDAYTINDCPAWQIGRTPLNMIDPGSSEKYLGTQIDPWTGFADPKLPEKLEVWLNRIASAPLKPLQKTDILRTYTIPRLIYLADHTDVKSGLLESLDLMIKKAVKEWLHLPTSTCDAILYSKFKDGGLGLIKLAALIPSIQARRLHKLAQSSDGTLVSFLKGEHLELFYEKLWIKAGGVRETIPQIWDPIPVMEIVSESSEALSEWETPRSKLHLPRPCDWRKVEFNKWKHLVAQGHGIGNFENDKISNDWLLHYRGIPHRKLITALQLRAHVYPTREFLARGRHDVCVRSCRHCGALYESAAHVIGNCPMTQEARIKRHNSICETLSNEAKRENWTVFQEPHLRDEENELFKPDLIFVKEAKALVVDVTVRYEHSNSSLKEAAAEKAKKYQRLLPQIQDLTNVTSVEFTGFPLGARGKWYEKNSELLEAMGLSKTRLGRLARTLASRALFSSVDIVHMFVSKARIPVPV

SEQ ID NO: 25213 - protein, 1232 aa, Eopsaltria australis
MVQSLGLRFISTGTQTDPLDHRVKSANVVPSPASQLEDVGLHLVNLEFVNSKFGYEPGINLANVREELAKFPEPFEALPSRPPISVGSADAQGDGEEPKTPEAPPGNKEGVTPVATPVVSVPDKTPSCPLCATQFTRMLGLIDHLQRAHGQKKIWFKCSKCGRQNLKYHSIVCHVPHCKGEVCVVPTGAWVCEVCQKGFPTKIGLGQHKRSMHPLVRNLERIAASHPKESSLRGAHKKVWTEEELALLKRLMVTYAGNRNINKLIAEHIPSKTAKQISDKRRLLMKSPSDVVTTGEEGVLQEGTEDQAQVVSLPKEGRLKLHYWDSIKKGLSVGRFTRCKRAFERILEGEDPQKVVNDCYEECFGDLGSLSQIKSKGSRSQRPQSQKASRKTANWMQKRAKKRGKYLRYQKLFDLHRGRLARVILDNSDALQCDIPSDIVYSNFKARWESSAEFKGLEPFLSYKEADNTKFRALITEKEVEKNLSEVKRTSAPGPDGFTVGHLKKWDPKYSLLSNSFNLWLATGTIPDALRACRTVLIPKSSDPERLRDVNNWRPITIASMVLRLFSRVLTARLDRACPIHPRQRGFIRASGCSENLKLLQLVVKYAKSEHKDLGVVFVDIAKAFDTVCHRHIIKGLEQRGLDPHLIHLIGEMYENITTCITTKKGQTDPIKILTGVKQGDPMSPLLFNLAIDPLLCKLEQIGKGFHHGGMNITAMAFADDLVLLSDSWDGMRDNIKILEAFCDRTGLKTQGEKCHGFYIKATRDAYTINDCPTWTIGGTPLNMIDPGHSEKYLGTWVDPWTGFADPGLSEKLEKWLHQIGDSPLKPLQKVDILRTYTIPRLVYLADHTEVTAGLLESLDLQIRAAVKGWLHLPPSTCDGLFYPSCKDGGLGILKLVALIPSIQARRLHRLAQSSDETLKVFLKDSHLDSLYEKLWVRAGGVKESIPRIWEPIPGLENVVVGDEELSEWEAPVQKFRYPRPCNWRKSEFQKWKQLVAQGHGVENFENDKISNGWITRYKGIPHRKLITALQLRANVYPTREFLARGRHGDCVRSCRHCGAEFETTAHIIGNCAITQDARIKRHNNICEILSREAKKENWTVFQEPHIRDEDNELFKPDLIFVKEEKAIVVDVTVRYEHSNSSLKDAAAEKVRKYQPLLNQIEELTNAIVVDFVGFPLGVRGKWFPKNSELLSALGLSKTRLEKTARTLASRALLSSVDIVHIFSSQARSILP

SEQ ID NO: 25214 - protein, 1230 aa, Eopsaltria australis
MVQSLGLRYISTGTQTDPLDLRVESAKVVPPPASQLEDVGLHLVNLEFVNFGYEPGINLENVREELAKFPEPFEALPPGPPISVGNDGAQGDGEEPKTPEAPPGSREGVTPAVTPVLSVPDKTPSCPLCATRFTRMLGLIDHLQRAHRQKKIWFKCSKCGKQNLKYHSIVCHVPHCKGEVCVVPTGAWVCEVCQKGFPTKIGLGQYKRSMHPLGRNLERIAASHPKESSLRGAHNKVWTEEELALLKRLMVTYAGNRNNNKLTAEHIPSKTTKQISDKRRLLMKSPSDVVTTGEEGVLQEGTEDQAQVVSLPKEGRLKLHYWDSINKGLSAGRFTRCKRAFESILEGEDPQKVVNDCYEECFGDLGSLNQIKSKGSRSQRPQSQKASRKTANWMQKRAKKRGKYLRYQKLFDLHRGRLVRVILDNSDALQCDIPSDIVYSNFKARWESSAEFKGLEPFLSYKEADNTKFRALITEKEVEKNLSEVKRTSAPGPDGFTVGHLNKWDPKYSLLSNSFNLWLATGTIPDALRACRTVLIPKSSDPERLRDVNNWRPITIASMVLRLFSRILTARLDRACPIHPRQRGFIRASGCSENLKLLQLVVKYAKSEHKDLGVVFVDIAKAFDTVCHRHIIKGLEQRGLDPHLIHLIGEMYENITTCITTKKGQTDPIKILTGVKQGDPMSPLLFNLAIDPLLCKLEQIGKGFHHGGMNITAMAFADDLVLLSDSWDGMRDNIKILEALCDRTGLKTQGEKCHGFYIKATRDAYTINDCPIWTIGGTPLNMIDPGHSEKYLGTWVDPWTGFADPGLSEKLEKWLHQIGDSPLKPLQKVDILRTYTIPRLVYLADHTEVTAGLLESLDLQIRAAVKGWLHLPPSTCDGLFYPSCKDGGLGILKLVALIPSIQALRLHRLAQSSDETLKVFLKDSHLDSLYEKLWVRAGGVKESIPRIWEPIPGLENVVVGDEELSEWEAPVQKFRYPRPCNWRKTEFHKWKQLVAQGHGVENFENDKISNGWITRYKGIPHRKLITALQLRANVYPTREFLARGRHGDCIRSCRHCGAEFETTTHIIGNCAITQDARIKRHNNICEILSREAKKENWTVFQEPHIRDEDNELFKPDLIFVKEEKAIVVDVTVRYEHSNSSLKDAAAEKVRKYQPLLNQIEELTNAIVVDFVGFPVGVRGKWFPKNSELLSALGLSKTRLEKTARTLASRALLSSVDIVHIFSSQARSILP

SEQ ID NO: 25215 - protein, 1232 aa, Eopsaltria australis
MVQSLGLRFISTGTQTDPLDLRVESAKVVSPPASQSEDVGFHLVNLEFVNSRFGYDPGIILESVREELAKFPEPFEALPSRPPRSVGSADAQGDGEEPKTPEAPPGSKEGVTPVATPVVSVPDKTPSCPLCATRFTRMLGLIDHLQRAHGQKKIGFKCSKCGRQNLKYHSIVCHVPHCKGEVCVVPTGAWVCEVCRKGFPTKIGLGQHKRLMHPLVRNLERIAASHPKESSLKGAHKKVWTEEELALLKRLMVTYAGNRNINKLIAEHIPSKTAKQISDKRRLLMKSPSDVVTTGEEGVLQEGTEDQAQVVSLPKEGHLKLHYWDSIKKGLSVGRFTRCKRAFERILEGEDPQKVVNDCYEECFGDLGSLSQIKSKGSRSQRPQSQKASRKTANWMRKRAKKRGKYLLYQRLFDLHRGRLARVILDNSDALQCDIPSDIVYLNFKARWESSAEFKGLEPFLFYKEADNTKFRALITEKEVEKNLSEVKRTSAPGPDGLTVGHLKKWDPKYSLLSNSFNLWLAIGTIPDALRACRTVLIPKSSDPERLRDVNNWRPITIASMVLRFFSRVLTARLDRACPIHPRQRGFIRASGCSENLKLLQLVVKYAKSEHKDLGVVFVDIAKAFDTVCHRHIIKGLEQRGLDPHLIHLIGEMYENITTCSTTKKGQTDPIKILTGVKQGDPMSPLLFNLAIDPLLCKLEQIGKGFHHGGMNITAMAFADDLVLLSDSWDGMRDNIKILEAFCDRTGLKTQGEKCHGFYLKATRDAYTINDCPIWTIGGTPLNMIDPGHSEKYLGTCVDPWTGFADPGLSEKLEKWLHQIGDSPLKPLQKVDILRTYTILRLVYLADHTEVTAGLLESLDLQIRAAVKGWLHLPPSTCDGLFYASCTDGGLGILKLVALIPSIQARRLHRLAQSSDETLKVFLKDSHLDALYEKLWVRAGGVKESIPRIWEPIPGLENVVVGDEELSEWEAPVQKFRYPRPCNGRKSEFQKWKQLAAQGHGVENFENDKISNGWITRYKGIPHRKLINALQLRANVYPTREFLARGRHGDCVRSCRHCGAEFETTAHIIGNCAITQDARIKRHNNICEILSREAKKENWTVFQEPHIRDEDNELFKPDLIFVKEEKAIVVDVTVRYEHSNSSLKDAAAEKVRKYQPLLNQIEELTNAIVVDFVGFPLGARGKWFAKNSELLSALGLSKTRLEKTARTLASRALLSSVDIVHIFSSQARSIVP

SEQ ID NO: 25216 - protein, 948 aa, Eopsaltria australis
MKSPSDVVTTGEEGVLQEGTEDQAQVVSLPKEGHLKLHYWDSIKKGLSVGRFTRCKRAFERILEGEDPQKVVNDCYEECFGDLGSLSQIKSKGSRSQRPQSQKASRKTANWMRQRAKKRGKYLRYQRLFDLHRGRLARVILDNSDALQCDIPSDIVYLNFKARWESSAEFKGLEPFLSYKEADNTKFRALITEKEVEKNLSEVKRTSAPGPDGLTVGHLKKCDPKYSLLSNSFNLWLATGTSPDALRACRTVLIPKSSDPERLRDVNNWRPITIASMVLRLFSRVLTARLDRACPIHPRQRGFIRASGCSENLKLLQLVVKYAKSEHKDLGVVFVDIAKAFDTVCHRHIIKGLEQRGLDPHLIHLIGEMYENITTCITTKKGQTDHIKILTGVKQGDPMSPLLFNLAIDPLLCKLEQIGKGFHHGGMNITAMAFADDLVLLSDSWDGMRDNIKILEAFCDRTGLKTQGEKCHGFYIKATRDAYTINDCPIWTIGGTPLNMIDPGHSEKYLGTWVDPWTGFADPGLSEKLEKWLHQIGDSPLKPLQKVDILRTYTIPRLVYLADHTEVTAGLLESLDLQIRAAVKGWLHLPPSTCDGLFYASCKDGGLGILKVVALIPSIQARRLHRLAQSSDETLKVFLKDSHLDALYEKLWVRAGGVQESIPRIWEPIPGLENVVVGDEELSEWEAPVQKFRYPRPCNWRKSEFQKWKQLAAQGHGVENVENDKISNGWITRYKGIPHRKLITALQLRANVYPTREFLARGRHGDCVRSCRHCGAEFETTAHIIGNCAITQDARIKRHTNICEILSREAKKENWTVFQEPHIRDEDNELFKPDLIFVKEEKAIVVDVTVRYEHSNSSLKDAAAETVRKYQPLLNQIEELTNAIVVDFVGFPLGARGKWFAKNSELLSALGLSKTRLEKTARTLASRALLSSVDIVHIFSSQARSIVP

SEQ ID NO: 25217 - protein, 1122 aa, Corvus kubaryi
MQGLIVHLKKAHGCRKIWFRCSKCGKQNLKYHSIACHAPQCKGEGHMAPTGSWICEVCSRGFATKIGLGQHKRLQHPIVRNAEQIVASHPKETSLRGAHKRAWTEEEEALLNQLVVKFAGSRNINQLIAEHLPSKTPKQISDKRRLLGKGPSRKVQSREGGDAGREEPSQSAKRQSEGHLRLHYRDAIKLKLSAGEFIMYQEAFEEIIDGQDPQLVVNEVYEKFRDSVVELNQKGSKPRRPRRPKGQKASGKTTKWMQKRAVKKGKYLRYQKLFQIHRGRLARTILDNVEALQCQIPSGVIHKAFKERWETSVCFSGLETFPVYREADNTMFRDMISEKEIGKNLREISKTSAPGPDGITLGHLIKADPRFSQLKEIFNLWLATRTLPDALRDCRTVLIPKSSNEEKLGDINNWRPITIASVVFRLFSRIVNERLARACPINPRQRGFISASGCSENLKLLQLLVKKAKQEHRSLGVVFVDIAKAFDTVCHQHIIAGLVKRGVDSHIIHLIGEMYKNIKTYIVTKNGTTDPINICSGVKQGDPMSPLLFNLALDPLLCKLETEGHGFHHGGFKITAMAFADNLVLLKDSWEGMCYNIKILETFCKLSGLRTQGEKCHGFYIKPTKDAYTINDCPVWQVGGTPLNMIDPGGSEKYLGAQIDPWTGFADPKLPEKLEEWLHRIGSAPLKPLQKVDILRTYTIPRLIYLADHTDAKSGLLESLDLMIKKAVKEWLHLPTSTCDAILYSRFKDGGLGLIKLVALIPSIQARRLHKLAQSSDGTLVSFLKGERLELLYEKLWIKAGGVRESIPQIWDPIPMMEIVSEGSEALSEGEAPRSKLHLPRPCDWRKVEFKKWKHLVAQGHGIENFENDKISNDWLVHYCSIPHRKLITALQLRANVYPTREFLARGRHDVCVRSCRHCGTVYESAAHVIGNCPITQEARIKRHNLICETLSQEAKRENWTVFQEPHLRDEENELFKPDLIFVKEAKALVVDVTVPYEHSNSSLKEAAEEKVKKYQRLLPQIQDLTNVTSVEFAGFPLGARGKWYEKNSELLEAMELSKTRLGRLARTLASRALFSSVDIVQRSHCLVVPPDTRKGNKVDLCPSVNEGVISPLPIAGIPTQW

SEQ ID NO: 25218 - protein, 1232 aa, Eopsaltria australis
MVQSLGLRFISTGTQTDPLDLRVDSATVVSPPASQSEDVGFHLVNLEFVNSRFGYDPGIILESVREELAKFPEPFEALPSRPPISVGSADAQGDGEEPKTPEAPPGSKEGVTPVATPVVSVPDKTPSCPLCATRFTRMLGLIDHLQRAHGQKKIWFKCSKCGRQNLKYHSIVCHVPHCKGEVCVVPTGAWVCEVCRKGFPTKIGLGQHKRLMHPLVRNLERIAASHPKESSLKGAHKKVWTEEELALLKRLMVTYAGNRNINKLIAEHIPSKTAKQISDKRRLLMKSPSDVVTTGEEGVLQEGTEDQAQVVSLPKEGHLKLHYWDSIKKGLSVGRFTRCKRAFERILEGEDPQKVVNDCYEECFGDLGSLSQIKSKGSRSQRPQSQKASRKTANWMRKRAKKRGKYLRYQRLFDLHRGRLARVILDNSDALQCDIPSDIVYLNFKARWESSAEFKGLEPFLSYKEADNTKFRALITEKEVEKNLSEVKRTSAPGPDGLTVGHLKKWDPKYSLLSNSFNLWLTTGTIPDALRACRTVLIPKSSDPERLRDVNNWRPITIASMVLRLFSRVLTARLDRACPIHPRQRGFIRASGCSENLKLLQLVVKYAKSEHKDLGVVFVDIAKAFDTVCHRHIIKGLEQRGLDPHLIHLIGEMYENITTCITTKKGQTDPIKILTGVKQGDPMSPLLFNLAIDPLLCKLEQIGKGFHHGGMNITAMAFADDLVLLSDSWDGMRDNIKILEAFCDRTGLKTQGEKCHGFYIKATRDAYTINDCPIWTIGGTPLNMIDPGHSEKYLGTWVDPWTGFADPGLSEKLEKWLHQIGDSPLKPLQKVDILRTYTIPRLVYLADHTEVTAGLLESLDLQIRAAVKGWLHLPPSTCDGLFYASCKDGGLGILKLVALIPSIQARRLHRLAQSSDETLKVFLKDSHLDVLYEKLWVRAGGVKESIPRIWEPIPGLENVVVGDEELSEWEAPVQKFRYPRPCNWRKSEFQKWKQLAAQGHGVENFENDKISNGWITRYKGIPHRKLITALQLRANVYPTREFLARGRHGDCVRSCRHCGAEFETTAHIIGNCAITQDARIKRHNNICEILSREAKKENWTVFQEPHIRDEDNELFKPDLIFVKEEKAIVVDVTVRYEHSNSSLKDAAAEKVRKYQPLLNQIEELTNAIVVDFVGFPLGARGKWFAKNSELLSALGLSKTRLEKTARTLASRALLSSVDIVHIFSSQARSIVP

SEQ ID NO: 25219 - protein, 1232 aa, Eopsaltria australis
MVQSLGLRFISTGTQTDPLDLRVDSATVVSPPASQSEDVGFHLVNLEFVNSRFGYDPGIILESVREELAKFPEPFEALPSRPPISVGSADAQGDGEEPKTPEAPPGSKEGVTPVATPVVSVPDKTPSCPLCATRFTRMLGLIDHLQRAHGQKKIWFKCSKCGRQNLKYHSIVCHVPHCKGEVCVVPTGAWVCEVCRKGFPTKIGLGQHKRLMHPLVRNLERIAASHPKESSLKGAHKKVWTEEELALLKRLMVTYAGNRNINKLIAEHIPSKTAKQISDKRRLLMKSPSDVVTTGEEGVLQEGTEDQAQVVSLPKEGHLKLHYWDSIKKGLSVGRFTRCKRAFERILEGEDPQKVVNDCYEECFGDLGSLSQIKSKGSRSQRPQSQKASRKTANWMRKRAKKRGKYLRYQRLFDLHRGRLARVILDNSDALQCDIPSDIVYLNFKARWESSAEFKGLEPFLSYKEADNTKFRALITEKEVEKNLSEVKRTSAPGPDGLTVGHLKKWDPKYSLLSNSFNLWLATGTIPDALRACRTVLIPKSSDPERLRDVNNWRPITIASMVLRLFSRVLTARLDRACPIHPRQRGFIRASGCSENLKLLQLVVKYAKSEHKDLGVVFVDIAKAFDTVCHRHIIKGLEQRGLDPHLIHLIGEMYENITTCITTKKGQTDPIKILTGVKQGDPMSPLLFNLAIDPLLCKLEQIGKGFHHGGMNITAMAFADDLVLLSDSWDGMRDNIKILEAFCDRTGLKTQGEKCHGFYIKATRDAYTINDCPIWTIGGTPLNMIDPGHSEKYLGTWVDPWTGFADPGLSEKLEKWLHQIGDSPLKPLQKVDILRTYTIPRLVYLADHTEVTAGLLESLDLQIRAAVKGWLHLPPSTCDGLFYASCKDGGLGILKLVALIPSIQARRLHRLAQSSDETLKVFLKDSHLDALYEKLWVRAGGVKESIPRIWEPIPGLENVVVGDEELSEWEAPVQKFRYPRPCNWRKSEFQKWKQLAAQGHGVENFENDKISNGWITRYKGIPHRKLITALQLRANVYPTREFLARGRHGDCVRSCRHCGAEFETTAHIIGNCAITQDARIKRHNNICEILSREAKKENWTVFQEPHIRDEDNELFKPDLIFVKEEKAIVVDVTVRYEHSNSSLKDAAAEKVRKYQPLLNQIEELTNAIVVDFVGFPLGARGKWFAKNSELLSALGLSKTRLEKTARTLASRALLSSVDIVHIFSSQARSIVP

SEQ ID NO: 25220 - protein, 1232 aa, Eopsaltria australis
MVQSLGLRFISTGTQTDPLDHRVKSANVVPPPASQLEDVGLHLVNLEFVNSKFGYEPGINLANVREELAKFPEPFEALPSRPPISVGSADAQGDGEEPKTPEAPPGNKEGVTPVATPVVSVPDKTPSCPLCATRFTRMLGLIDHLQCAHGQKKIWFKCSKCGRQNLKYHSIVCHVPHCKGEVCVVPMGAWVCEVCQKGFPTKIGLGQHKRSMHPLVRNLERIAASHPTESSLRGAHKKVWTEEELALLKRLMVTYAGNRNINKLIAEHIPSKTAKQISDKRRLLMKSPSDVVTTGEEGVLQEGTEDQAQVVALPKEGRLKLHYWDSIKKGLSVGRFTRCKRAFERILEGEDPQKVVNECYEECFGDLGSLSQIKSKGSRSQRPQSQKASRKTANWMRKRAKKRGKYLRYQKLFDLHRGRLARVILDNSDALQCDIPSDIVYSNFKARWESSAEFKGLEPFLSYREADNTKFRALITEKEVEKNLSEVKRTSAPGPDGFTVGHLKKWDPKYSLLSNSFNLWLATGTIPDALRACRTVLIPKSSDPERLRDVNNWRPITIASMVLRLFSRILTARLDRACPIHPRQRGFIRASGCSENLKLLQLVVKSAKSEHKDLGVVFVDIAKAFDTVCHRHIIKGLEQRGLDPHLIHLIGEMYENITTCITTKKGQTDPIKILTGVKQGDPMSPLLFNLAIDPLLCKLEQIGKGFHHGGMNITAMAFADDLVLLSDSWDGMRDNIKILEAFCDLTGLKTQGEKCHGFYIKATRDAYTINDCPIWTIGGTPLNMIDPGHSEKYLGTWVDPWTGFADPGLSEKLEKWLHQIGDSPLKPLQKVDILRTYTIPRLVYLADHTEVTAGLLESLDLQIRAAVKGWLHLAPSTCDGLFYPSCKDGGLGILKLVALIPSIQARRLHRLAQSSDETLKVLLKDSHLDALYEKLWVRAGGVKESIPRIWEPIPGLENVVVGDEELSEWEAPVQKFRYPRPCNWRKSEFQKWKQLAAQGHGVENFENDKISNGWITRYKGIPHRKLITALQLRATVYPTREFLARGRHGDCVRSCRHCGAEFETTAHIIGNCAITQDARIKRHNNICEILSREAKKENWTVFQEPHIRDEDNELFKPDLIFVKEEKAIVVDVTVRYEHSNSSLKDAAAEKIIKYQRLLNQVEELTNAIVVDFVGFPLGARGKWYEKNSELLSALGLSKTRLEKTARTLASRALLSSVDIVHIFSNKLRSILP

SEQ ID NO: 25221 - protein, 1232 aa, Lycocorax pyrrhopterus
MVQSVALRYVSTATQTDPLDLWVSEAKIPSSLVVLYEDRFDLVPLEFVNSRLVYKVGSHLGNVAECLASLPEPYEILPSGLVQEDVLECEVRESEEPVTPTVPPGVSDVPPLPGTPVVSVPDKNPSCPRCSTRFTRMMGLTDHLKKAHGQRKIWFRCSKCGRQNLKYHSIACHVPRCKGEACVVPTGSWVCEVCSRGFATKIGLGQHKRLKHPLVRNMERIVASHPKESSLRGAHKKVWTEEEEALLSQLVIRYAGSRNINQLIAEQMPSKTAKQISDKRRLLGKGPSKKVPSAEGDDLGRDEPPLSARGPSEGRLKLHYLDAIRLTLSASGFTTCQEAFRSVLEGQDPQVAVNEVYDKFRDGLTRLSHRRSSGVKSRRSHGRDASKTTTKWMQKRAVKRGKYLRYQKLFQVHRGKLAHIILDNTEALQCQIPPGVVHSAFKGRWETSAGFVGLGTFPVYREADNTMFQDLITEKEIDKNVREMRKTSAPGPDGITLGHIMKLDPKFSQLKEIFNLWLATGAIPDALRECRTVLIPKSSDEERLGDINNWRPITIGSVVFRLFSRIATARLARACPINPRQRGFICASGCSENLKLLQLLVRCAKQEHRDLGVVFVDIAKAFDTVRHQHIVAGLIQRGVDSHVVHLVSEMYRNITTYILTKEGKTDPINISSGVKQGDPMSPLLFNLALDPLLCKLEADGDGFHHGGYKLTAMAFADDLVLLSNSWEGMNRNIKILETFCNLTGLRTQGEKCHGFYIKPTKDSYTINDCPSWKICGSPLNMIDPGSSEKYLGTQIDPWTGFADSGLSTKLEGWLHQIRDAPLKPFQKVDILRTYAIPRLIYLADHTEVRSGLLESLDLSIRRAVKEWLHLPDSTCDAILYSRFKDGGLGLIKLAALIPSVQARRLHKLAQSSDGALVAFLKGEHLEQVFEKLWVRAGGVRESIPAIWEPVPKVEVVVEGDEALSVWEAPRSRTHFPKPCNWRKVEFNKWKQLVTQGHGIENFENDDISNGWLVHYRSIPHRKLITALQLRANVYPTREFLARGRRGVCARTCRHCGADYETAAHVIGNCPITQDARIKRHNSICETLSCEAKREGWTVFQEPHLRDEVNELFKPDLIFVKEEKALVVDVTVRYEHHNSSLKEAAAEKAKKYQRLLPQIRELTNAATIEFVGFPLGARGKWFEKNSELLQALGLSKTRLGRTARALASRALFSSVDIVHIFTSKARLYISPNK

SEQ ID NO: 25222 - protein, 940 aa, Eopsaltria australis
MTGEEGVLQEGTEDQAQVVSLPKEGHLKLHYWDSIKKGLSVGRFTRCKRAFERILEGEDPQKVVNDCYEECFGDLGSLSQIKSKGSRSQRPQSQKASRKTANWMRKRAKKRGKYLRYQRLFDLHRGRLARVILDNSDALQCDIPSDIVYLNFKARWESSAEFKGLEPFLSYKEADNTKFRALITEKEVEKNLSEVKRTSAPGPDGLTVGHLKKWDPKYSLLSNSFNLWLATGTIPDALRACRTVLIPKSSDPERLRDVNNWRPITIASMVLRLFSRVLTARLDRACPIHPRQRGFIRASGCSENLKLLQLVVKSAKSEHKDLGVVFVDIAKAFDTVCHRHIIKGLEQRGLDPHLIHLIGEMYENITTCITTKKGQTDPIKILTGVKQGDPMSPLLFNLAIDPLLCKLEQIGKGFHHGGMNITAMAFADDLVLLSDSWDGMRDNIKILEAFCDRTGLKTQGEKCHGFYIKATRDAYTINDCPIWTIGGTPLNMIDPGHSEKYLGTWVDPWTGFADPGLSEKLEKWLHQIGDSPLKPLQKVDILRTYTIPRLVYLADHTEVTAGLLESLDLQIRAAVKGWLHLPPSTCDGLFYASCKDGGLGILKLVALIPSIQARRLHRLAQSSDETLKVFLKDSHLDVLYEKLWVRAGGVKESIPRIWEPIPGLENVVVGDEELSEWEAPVQKFRYPRPCNWRKSEFQKWKQLAAQGHGVENFENDKISNGWITRYKGIPHRKLITALQLRANVYPTREFLARGRHGDCVRSCRHCGAEFETTAHIIGNCAITQDARIKRHNNICEILSREAKKENWTVFQEPHIRDEDNELFKPDLIFVKEEKAIVVDVTVRYEHSNSSLKDAAAEKVRKYQPLLNQIEELTNAIVVDFVGFPLGARGKWFAKNSELLSALGLSKTRLEKTARTLASRALLSSVDIVHIFSSQARSIVP

SEQ ID NO: 25223 - protein, 1232 aa, Eopsaltria australis
MVQSLGLRFISTGTQTDPLDLRVDSATVVSPPASPSEDVGFHLVNLEFVNSRFGYDPGIILESVREELAKFPEPFEALPSRPPISVGSVDAQGDGEEPKTPEAPPGSKEGVTPVATPVVSVPDKTPSCPLCATRFTRMLGLIDHLQRAHGQKKIWFMCSKCGRQNLKYHSIVCHVPHCKGEVCVVPTGAWVGEVCRKGFPTKIGLGQHKRLMHPLVRNLERIAASHPKESSLKGAHKKVWTEEELALLKRRMVTYAGNRNINKLIAEHIPSKTAKQISDKRRLLMKSPSDVVATGEEGVLQEGTEDQAQVVSLPKEGHLKLHYWDSIKKGWSVGRFTRCKRAFERILEGEDPQKVVNDCYEECFGDLGSLSQIKSKGSRSQRPQSQKASRKTANWMRKRAKKRGKYLRYQRLFDLHRGRLARVILDNSDALQCDIPSDIVYLNFKARWESSAEFKGLEPFLSYKEADNTKFRALITEKEVEKNLSEVKRTSAPGPDGLTVGHLKKWDPKYSLLSNSFNLWLATGTIPDALRACRTVLIPKSSDPERLRDVNNWRPITIASMVLRLFSRVLTARLDRACPIHPRQRGFIRASGCSENLKLLQLVVKYAKSEHKDLGVVFVDIAKAFDTVCHRHIIKGLEQRGLDPHLIHLIGEMYENITTCITTKKGQTDPIKILTGVKQGDPMSPLLFNLAIDPLLCKLEQIGNGFHHGGMNITAMAFADDLVLLSDSWDGMRDNIKILEAFCDRTGLKTQGEKCHGFYIKATRDAYTINDCPIWTIGGTPLNMIDPGHSEKYLGTWVDPWTGFADPGLSEKLEKWLHQIGDSTLKPLQKVDILRTYTIPRLVYLADHTEVTAGLLESLDLQIRAAVKGGLHLPPSTCDGLFYASCKDGGLGILKLVALIPSIQARRLHRLAQSSDETLKVFLKDSHLDVLYEKLWVRAGGVKESIPRIWEPIPGLENVVAGDEELSEWEAPVQKFRYPRPCNWRKSEFQKWKQLAAQGHGVENFENDKLSNGWITRYKGIPHRKLITALQLRANVYPTREFLARGRHGDCVRSCRHCGAEFETTAHIVGNCAITQDARIKRHNNICEILSHEAKKENWTVFQEPHIRDEDNELFKPDLIFVKEEKAIVVDVTVRYEHSNSSLKDAAAEKVRKYQPLLNQIEELTNAIVVDFVGFPLGARGKWFAKNSELLSALGLSKTRLEKTARTLASRALPSSVDIVHIFSSQARSIVP

SEQ ID NO: 25224 - protein, 1232 aa, Eopsaltria australis
MVQSLGLRFISTGTQTDPLDLRVESAKVVSPPASQSEDVGFHLVNLEFVNSRFGYDPGIILESVREELAKFPEPFEALPSRPPISVGSADAQGDGEEPKTPEAPPGSKEGVTPVATPVVSVPDKTPSCPLCATRFTRMLGLIDHLQRAHGQKKIWFKCSKCGRQNLKYHRIVCHVPHCKGEVCVVPTGAWVCEVCRKGFPTKIGLGQHKRLMHPLVRNLERIAASHPKESSLKGAHKKVWTEEELALLKRLMVTYAGNRNINKLIAEHIPSKTAKQISDKRRLLMKSPSDMVTTGEEGVLQEGTEDQAQVVSLPKEGHLKLHYWDSIKKGLSVGRFTRCKRAFERILEGEDPQKVVNDCYEECFGDLGSLSQIKSKGSRSQRPQSQKASRKTANWMRKRAKKRGKYLRYQRLFDLHRGRLARVILDNSDALQCDIPSDSVYLNFKARWESSAEFKGLEPFLSYKEADNTKFRALITEKEVEKNLSEVKRTSAPGPDGFTVGHLKKWDPKYSLLSNSFNLWLATGTIPDALRACRTVLIPKSSDPERLRDVNNWRPITIASMVLRLFSRVLTARLDRACPIHPRQRGFIRASGCSENLKLLQLVVKYAKSEHKYLGVVFVDIAKAFDTVCHRHIIKGLEQRGLDPHLIHLIGEMYETITTCITTKKGQTDPIKILTGVKQGDPMSPLLFNLAIDPLLCKLEQIGKGFHHGGMNITAMAFADDLVLLSDSWDGMRDNIKILEAFCDRTGLKTQGEKCHGFYIKATRDAYTINDCPIWTIGGTPLNMIDPGHSEKYLGTWVDPWTGFADPGLSEKLEKWLHQIGDSPLKPLQKVDILRTYTIPRLVYLADHTEVTAGLLESLDLQIRAAVKGWLHLPPSTCDGLFYASCKDGGLGILKLVALIPSIQARRLHRLAQSSDETLKVFLKDSHLDALYEKLWVRAGGVKESIPRIWEPIPGLENVVVGDEELSEWEAPVQKFRYPRPCNWRKSEFQKWKQLAAQGHGVENFENDTISNGWITRYKGIPHRKLITALQLRANVYPTREFLARGRHGDCVRSCRHCGAEFETTAHIVGNCAITQDARIKRHNNICEILSHEAKKENWTVFQEPHIRDEDNELFKPDLIFVKEEKAIVVDVTVRYEHSNSSLKDAAAEKVRKYQPLLNQIEELTNAIVVDFVGFPLGARGKWFAKNSELLSALGLSKTRLEKTARTLASRALLSSVDSVHIFSSQARSIVP

SEQ ID NO: 25225 - protein, 1230 aa, Phylloscopus whistleri
MVQSVLLRYVSTATQTDPLDLRVIGATIPSPPLVLGEERFDLVPLEFVNSKWVSRVGFQLVDTEECLAQLPEPYEILPSRQAGDVSSECETGDSQEPKTPEAPPGVSDEVTRVGTRIVSLPDKNPSCPRCLTRFTRMLGLIEHLKKTHGQRKIYFKCSKCGKQNLKYHSICCHIPRCKGEECVVPTGDWVCEVCSRGFATKVGLAQHKRLKHPLVRNVERIAASRPKQSSSRGAHKKAWTEEEEALLSQLVRRFAGRRNINQLIMEHIPTKTAKQISDKRRLLGKGPSRIQLAEGREVGIEERSQSAIGPREGQLKLHYRDTIRLKLSAGGFTSCQEAFEKILEGQDPQVVANLVYKEFQDRLAKLGQRVPRGSDRRRPVDRKASKSTTKWMQKRAKKKGKYLRFQKLFQLHRGRLARVILDDTEALQCQIPSGIVHEAFKARWETSGNFKGLESFPVYGEADNTCFRTLITEREIEKNLREISKASAPGPDGITLGHLIKLDPKLSRLCEIFNLWLCTGTIPDALRDCRTVLIPKSSAVERLGDINNWRPITIASMVLRLFSRIATARLVRACPIHPRQRGFISALGCSENLKLLQLVVKCAKQEHKQLGVVFVDIAKAFDTVSHAHIISGLEQRGVDPHIVHLIGEMYRDINTYINTKHGKTDPINIGAGVKQGDPMSPVLFNLALDPLLCKLEAEGKGFHQGEFRVAAMAFADDLVLLSDSWDGMAHNIKILEAFCDLTGLRMQGEKCHGFYIKPTKDSYTINDCPAWQICGSPLGMIDPGSSEKYLGVQIDPWVGFADSGLSEKLSGWLHRIGRAPLKPLQKVDILRTYTIARLIYLADHTEVTAGLLESLDMQVRTAVKEWLHLPPSTCDGILYSKFKDGGLGLIKLAALIPSIQARRLQKLVQSSDGTLLQFLKREHLELIFEKLWLRAGGSRESIPSIWEPTPQIEVAVEGGEALSEWEAPRSRLRFPKPSDWRKVEFVKWKHRIVQGHGISNFENDNISNSWLRHYRGIPHRKLITALQLRVNVYPTREFLGRGRHDVFIRSCRHCEAAYETTAHAIGTCPVTQEARIKRHNSICETLAQEAKREDWTVFQEPHLRDEHKELFKPDLILVKGEKALVVDVTVRYEHNNSSLKEAAVEKAKKYQRLLQQIIELTNAKTVEFFGFPLGARGKWYEKNSELLGTLGLSKTRLGRIARALASRALFSSVDIVHIFSSKSRTYEPQK

SEQ ID NO: 25226 - protein, 1167 aa, Entomyzon cyanotis
MFWAGHNHHTSRPLTGDFYITDGGDDERPGTSSDAVPGTSAGVAPGTPVVCVPDKSPRCPCCASRFTSMLALIDHLKRRHGQRKIWFKCSTCGKQNLKYQSIACHVPSCKGTARAAPTGDWTCEVCRRGFSTKIGLAQHKRSVHPVTRNLERIAASRPRASAPRGAPRSVWTEEEEALLRQLMVTHAGEKNINKVIAEHIPSKTPKQVCEKRRLFRRAAAASVPSGQAGEPQSGGETPTRPSASPRDGHLQVCYWDDIRKGLSEGRFTRCQGAFERLLAGEDPQVVVNECFEACFGGLGKRRQNRKGTGHRRSQRSQSQQSSRKPANWMRKRAQRRGKYLRYQKLFDLHRGRLARIILDSTDALQCEVPSGTVHSNFSARWDSSGAFRGLESFRPHAEADNTMFRALITNREVAKNVGEMKRTSAPGPDGLTVSHLLKMDPQYSLLTETFNLWLASGTIPDALRQCRTVLIPKSADPEKLRDVNHWRPITIASVVFRLFSRILTARLTRACPISPRQRGFIHAAGCSENLKLLQLVVKHAKAGHRELGVVFVDIAKAFDTICHRHILEGLDQRGVDPHFIRLVGKMYENIVTYISTKEGKTDPIKILTGVKQGDPMSPLLFNLALDPLLCKLDKRGRGFQQAGLRITAMAFADDLVLLSDSWEGMNSNIKILEAFCELTGLKTEGDKCHGFYIKPTRDSYTINDCPAWTINGTPLNMTEPGHAEKYLGAWIDPWTGFADAGLPVKLEDWLHRIDAAPLKPLQKVDILRTYTIPRLLYLADHTNVTMGLLESLDRSIRTAVKGWLHLPPSTCDGLMYSRCTDGGLGLMKLAALIPSVQARRLHRLAQSSDESLVTFLRGERLESLYEKLWVRAGGTKEDIPHIWEPTPGPAMEVGGDEGLSEWEAPVQKVRYPRPCNWRKSEFQKWTRLGAQGHGIGTFENDKISNAWISRYRGIPHRKLITALQLRANVYPTREFLARGAHGERSRSCRHCGAELETCAHIIGNCPRTQEARIRRHNAICETLGNVAKAGHWTVYQEPRLRDEGGELFKPDLILVKGDRALVVDVTVRYEHKSSSLQDAAAEKAEKYRGLLTQIQDLTRARHVEFVGFPVGARGKWYERNSELLQALGLSKTRLQRTARALAARALFASVDILHIFCSRARSRVQRK

SEQ ID NO: 25227 - protein, 948 aa, Sylvia atricapilla
MMKGPSEQVPPVEDVSLGRGEPSQSAEGPREGRLKLHYMDSSRLRLSAGRFASCQEAFQKIIDGCDPQVVVNEVYEKFQEDLNRLDRKPVGPRSQKSRGRDASKVTTKWMQKRAKKRWRYLRYQRMFQFQRGRLARVILDSTETLQCQIPPDIIHNAFQVRWETSAGFKGLETFPVYRDADNTMFQELLTEKEIGKNVREVRKSSAPGPDRITLGHLIKLDPKFSRLKEIFNLWLVTGTVPDALRDCRTVLIPKSSNEEKLGDINNWRPITIASMVFRLFSRIATARLVRACPINPRQRGFICASGCSKNLKLFQLLVKCAKQEHRHLGVVFVDIAKAFDTVCHQHILTGLIKRGVDPHIVHLVSEMYKNITTYIITKKGRTDPINICSGVKQGDPMSPLLFNLALDPLLCKLEAEGKGFHHDGFQVTAMAFADDLVLLSDSWDGMRYNIRILETFCELTGLRTQGEKCHGFYIKLTKDSYTINNYPAWEVNGTPLNTIDPGSSEKYLGIQIDPWVGFADPGLSRKLEEWLHRIGDAPLKPFQKVDILRTYTIPRLIYLADHTEVTSGLLESLDLLIRRVVKEWLHLPPSTCDAILYSKFKDGGLGLIKLAALIPSIQARRLHKLAQSSDGVLVSFLKGIHLERVYEKLWLRAGGVRESIPLIWEPIPQIVQIVSGEEALSEWEAPRLQTPLPKPCDWRKVEFNKWKQLVTQGHGIANFENDNISNGWLIHYRSIPHRKLITALQLRANVYPTREFLARGRREGARSCRHCGAEYETSAHVIGNCPITQDARIKRHNSICETLSCEAKRENWTVFQEPHLRDEQNELYKPDLIFVKGGKALVVDVTVRYEHSNSSLKEAAAEKARKYQHLVSQIRELTNASEIEFVGFPLGARGKWFEKNSQLLQALGLSKTRLGRIAWALASRALFSSVDIVHIFSSRSRTIESQNE

SEQ ID NO: 25228 - protein, 1229 aa, Passer domesticus
MVQSLALRYISIGTQTDPLDLVVKDAKVPSKPSVPREEGINLVCQEFFNSVIEVEHGFYPGKAWEGLAKLPEPYEIVPLEPAQEGAECPALWLQRSLKHQKLLPGLVTEVHQQEHLLYLYPDKNPSCPRCLTRFTRMSGMIDHLTRAHGQKKVIFKCSKCGKQNLNYHSIACHVPRCKGAVCVVPTGEWVCEVCQRGFTTKIGLGQHKRLQHPLVRNLERIEASHPKVSPLRGAHKKVWTEEEEALLVQLAEMFAGKRNINQLIVEHIPSKTAKQISDKRRLLGKGPSVKHQKEPEGGSRVVQQTRSAKGPKEGQLKLHYQDAIRMGLSAGRFARYKEAFDKVLKGQNPQEVVNEVFAEFQSSLDVQGPKRSNRGRRSQKGHGRDASKITTNWMRKRAIRRGKFLHFQMLYELHRRPLARIILDSSDTLQCQLPSSVVHEYFKIRWDTSGEFGGLVDFPPHAEADNTMFKGLITEKEIEKNVTEMSKSSAPGPDGISLGHLIKKDPGFSQLTEIFNLWLLAGTIPDALRDCRTVLIPKSSEMEKLGDINNWRPITIGSVVIRLFSRIANARLCKACPINPRQRGFIYASVCAENLKLLQLVVKYAKREHKHLGVVFVDIAKAFDTVNHQHVIEGLVQRGVDPHIVKVVREMYENIKTYISLGREKTDPIYIRSGVKQGDPMSPLLFNLVIDPLLCKLESEGEGFHHGELKITAMAFADDLVLLSDSWEGMDCNIKILESFCDLTGLRTQGNKCHGFYIKLTRDSYTINDCPPWEIKGSPLRMIDPGSSEKYLGTWIDPWTGFADSGLTEKLTDWLHRIGSSPLKPLQKVEILRTYTIQRLVYLADHTEVNMGPLEILDLLIRKAVKEWLHLPPSTCDAILYSSFKDGGLGLIRLAALIPSIQARRLHRLAQSSDVALLDFLKGEHLELLFERLWIRAGGRKESIPQIWEPIPGLEGGGDESRSEWEVPAPKIRYPKPCNWRKTEFQKWIQLVAQGHGIENFENDNISNAWIRHYRGIPHRKFITALQIRANVYPRREFLARGRRENIVQSCRHCGARFETVAHIVGTCPITQNARIKRHNNIFEILSKEAKKADWTVFQEPHLWDEVNELFKPDLIFVRDSKAIVVDVTVRYEHSNTSLREAAAEKAKKYQRLHQQIQHLTNAVDIKYVGFPMGARGKWYPKNAELLSALGLSKTRLERTARALASQVLFASVDIVHIFVSKARSIVPL

SEQ ID NO: 25229 - protein, 1240 aa, Junco hyemalis
MVQSLALRYISTATQTDPLDLRVTEIELASQYREEGIKLVTVEFLNSKLVKDDGIQQANVWEYLGQLPEPYEISPMGAGQEKVLSAEGSVEEPRTSEAECGRRDIDEPQTPEALHVPATVVSSPKTPVIPMPDKQPSCPQCEARFTRMLGLIDHLKRVHGQRKIIFRCAKCGKQNLRYHSISCHIPRCKGTTCVAPTGEWVCEVCHRGFATKIGLGQHKRIRHPLVRNLERIAASQPKVPSARGAHRRVWSEEEEALLMQLVEKYNGKRNINQLIAEHIPTKTAKQISDKRRILAKHLVVRDQEDPAGDVETEHLSEPVHSPKEGHLKQHYRNLIKTGLSVGKFTMYREAFEKFVNGQDPGCVVNDVYNEFLGILGEPKQNTSMGRSRKKKVHDQKSGKTPNWMSKRAIKKGKFLRFQYLFKIHRRRLARIILDSTEALQCQIPSNDVHDHFKARWDTSGIFSGLSNFPPYKEVNNMVFEALITDKEVEKNVKEMCKTSAPGPDGFTLGQISAKDPKFSRLTEIFNLWLVTGTIPDALRDCRTVLIPKSSDAERLGDINNWRPITIGSVVIRLFSRIATARLSQACPINPRQRGFIRASGCAENLKLLQLVVKTAKREHKHLGVVFVDIAKAFDTVSHQHVFEGLVQRGVDSHVIELVREMYRDVRTCISVGKGKTDPIYIRSGVKQGDPMSPLLFNLAMDPLLCKLENGGKGFHHGDWKTTAMAFADDLVLLSDSWDGMCHNIKILETFCNLTGLNTKGEKCHGFYIKPTKDSYTINECPAWVINGSPLNMIDPGCSERYLGTWVDPWITFADPRLSEKLTDWLQRIGRSPLKPLQKVDILRTYTIPRMIYLADHTEVKVSLLESLDQLIRNTVKEWLHLPQSTCDAILYSSFKDGGLGLIRLVALIPSIQARRLHRLAQSSDETLVNYLKDIHLERLFESLWLKAGGSRESIPSIWEPLPMVDLGDNDEARLEWEAPTPKISYPKPCNWRKLEFQKWTRLVSQGHGIENFENDEISNAWLRRFGGIPHRKLITALQLRANVYPTREFLARGRHENFVQSCRHCGATLETTAHIVGNCATTQEARIKRHNAICEALSEVAKREGWIVYEEPHLRDEVNELFKPDLIFVKGSKAVVVDVTVRYEHSDTSLKEAASEKARKYQRLQKQIEELTNVKDIEYVGFPMGARGKWYGKNTELLTALGLSKTRLERTARALASKVLFASVDIVHLFVSKARSTVPV

SEQ ID NO: 25230 - protein, 1260 aa, Oreotrochilus melanogaster
MVQLWTQFLSIGTQTNWVDTVSIPNKNWNLNILALADADLVLNNLEFLHSDCITPADPAYCNSNYNINLGLYPEAYEEPPLNIPIQSGHKNIEGSSLASEDSGVPSPVSTILTNSTPVIKMPDKNPSCPCCGSRLQKITALIDHLKRVHGTHKILFQCTKCCRTTDSYHSTACHIPKCNNSANVSVGAFTCGECERSFTTKIGLSQHKRLAHPVVRNLERILASQPKSTSLRGKHKQCWSEENVKLLKMLEKVFKDKRNINQLIAEYMPTKTAKQISEKRRQLAENQQEVPKTDNDYNNLKEQLMTEAPPISSNSIETLTSHYRNTINDWLQSRNFLTLRKTFKRALKGNRDPIELVNKAFNKHYKYLLYREDQRAAADNNPRESTNEHPPGTPKEWMKKRSKKRGTYMRYQKLFQTNKTKLANIILDDMESLQCTISKEEVYNTFKSRWETPGRFLGLGAFQAYQPTDNSAFKTMISAREIIKNVKQMNQHSAAGPDKVTLKNLIKLDPGFKSIRELFNLWLYTGKIPDVIKDCTTTLIAKTTRPDRLLDINNWRPITIGSIVLRLFSRILTSRLTKACPINPRQRGFIKSSGCSENLKLLQIIIQYAKRQHMPLGVVFVDLAKAFDTVSHQHIITSLKERGVDDHIISLIANMYHNTNTRIKLSDGQSDPISIQIGVKQGDPMSPLLFNLAVDPLLNKLETIGNGFHIHCKTVTAMAFADDLVLLSDSWEGMKNNIAIVEAFCALTGLKTQGEKCHGFFIEPTKDSYKINDCAPWTIGGTPLNMIEPGNSEKYLGLQIDPWNGIRRPELIPKVKKWLNQIEKAPLKPFQKLDILKTYTIPRLLYSADHANVKITTLESIDLQIRTAVKAWLHLAPSTCDAFLYSSTLNGGLGLTRLAKLVPSMQVRRLHRLAQSTDEVIRSIVKSENIEQEYKKLWVAAGGNKDKVPRIWDPGSAITISEIITNDDMSEWEAPPTKTVYPKPTNWRRDEFKSWTKLPSQGRGIENFEDDKISNDWLVHYQGIHHRKLLTALQLRTNTYCTREFLARGRKDSQNASCRHCNAENETCAHIIGYCPAVQDARIKRHNQICDILSEEAKKKEWLVYPEPHLRDDCNNLFKPDLIFLKDQKAVVVDVTIRYEANSDSLALAAQEKVQKYQHLTPQIQELTNASTVQFVGFPIGARGKWYSKNSDLLVELGLSKTRRVKVARRLANRALFSSVDIVHMFASKSRSGSVIDCKLDCCSNKNSWDCRDGTVKRIS

SEQ ID NO: 25231 - protein, 1035 aa, Hycleus cichorii
MSSIGNDDQMTHAQEFIHISTPSDFSNEFPGSGTQILSPRVIPPETNNNISSAISTGDPNHPSNFPSTSKSNECGSSPHIQSPEYINNNGELGAFGVSRAMGQRTCSTGAMSRVGGIVHFRSSEPYFDVPTASAVTSFNVQPSPNETIIADNDVSNSSQNNYRTIGREMSFAEIITKAANDFETTKPELSRLARIALSESRKDLATALDGWIASTFRVSRNKNLNNRRNQGNRVPNYGSGHRGRGDRAARYKKAQDLFVKNKKMLADIILSGRPMEGPSETPTLANVEELYGNIFETTTPIGKLPREASRDVVQLNFPIKETDIANAKANWKFSAPGPDGIAVREVARYSDSELSIVFNIILYRNCIPPSWTTLRTTLIPKTGDPTAATNWRPITVGSALQRLLHRIISIRLSGMIKLHPAQRGFVGTDGTLANCLIVDYFIRSRSESMLPYNVVSLDIRKAFDMVPHQLIRRALLSHGLRGVWMDYILNTLEGVSTIIRVGNQFTRPIVLKRGVRQGDPLSPLLFNLVMDELFYRLDDLGVGGNIDESERCIAVAFADDVVLLTNTVNDMKVALRETEKFLTERGMAINPCKCHAVSASLVSRKIMPSPRPTFYVNKQALPMVLQTNTFRYLGHEFDSRGVMKPCVPNLNLWMRHLCRAPLKPHQKLVLLKQHIIPKLLYGLQNPKLTSKVLRDADRLIRMASKEFLHLNIHTPNPLIHAKIKYGGLGIMELSSSVPNIFLHRLSSLMQSEDDIILSRVLRSQRLSSLVGRLNNIIGDIPIDQKWLDMISQGPLSKGLEACCEDSASRNFIDNKPFGWTGRDYVRAIQLRTANLPTRAIPSNPPEQRRCRAGCRNDESLAHVLQVCPVTHDARVRRHNEIAKKVVSHCRRKRMEVEEEPHVRHPDGTLYKPDLVVHTDSNTIVVADVQVAWASDNTLESVWKRKEAVYNCPKFRYAAGKRWPNQKLIFTPIILEARGIWPRANRPAEELLKIDRQLKLSCVNSVLKWGSSIHKIFNRCVWRTGPGPPGGFFRQR

SEQ ID NO: 25232 - protein, 1426 aa, Hycleus cichorii
MASDARGHGPETSRTRQGTVEILDDPAAGAGEDLAMNKDNGSVLGPAATGRALRKRKNINYRESDGGFSIAAGMPPPQSPPQANRNQRNLAANEGKHLSPQNNHVGRDTKSKISNRTEFVIKNSSNLATNQYAGTRIDVDDYETVDDIADDKSSSEESDKIDQNVRTRDNRNNCPKCSKYFKTKSGLTRHLKKACAPRTSCLYCRRNFPSYSSVKQHEKLVHIAEYQQEQLENCLEICDVCDAAFSNFAGLRQHHRIRHPQVPFAGIQKLMEVVASEESKLGGRMNYKHVISATGLTYDQIRRIRENASYKEILSKMSLNSDNNHLNPNQDHIEELPLVGISGEGVVDDLHQNEYQTTPSSAKTSETDKFNSNDLHSTSRVDESDFRRKTRLQAFRETSNFNNVGTSCAGAYRNPSQQPLSADKTSRVNNTITTAIFRRSLGLPSASRSDLTFTQQSATRRISDDTQFNNSYTLHEGSISGLRVDNQENLLHCRINPETNQSMRDIRISGRSNDLPSSSRTCGSRFRSNADQQTSGGAFVSNINNKVSLQESYRAINQGATFADIITNAASVFEVTRPHLSRLAKTALTANRNDLSGAIDEWIAATFKRSRNGTSNVRRAHNNQTPNYGLRHGGRGERAARYKKAQDLFVKNKKMLTDIILSGRSMDGPSETPTVQEVEELYGSIFETSVSLGKLPRTTARDITHLNFPIRETDVANAKANWRLSAPGPDNVAVRDVARFSNLELSVVFNIILYRNCLPPSWKTLRTTLIPKGGDPKLATNWRPITVGSAIQRLLHRIISIRLSGITKLHPAQRGFVGIDGTLANCLIVDHFIKSRSESLLPYNVVSLDIRKAFDMVPHQLIRRALCSHGFRGVWMDYILSTLEGTSTIIRVGNDYTRPITLKRGVRQGDPLSPLLFNLVMDELLYKLDDLGVGGHIGESERCTAVAFADDVVLLSDVVRDMKVALSETQKFFVERGMMLNPTKCHAISASVVGGRIVPSPRPTFYIDGNALPMVLQTNSFRYLGHEFDSRGVMRPCLPNLNIWMRQLCRAPLKPHQKLVLLKQHILPKLLFGLQNPKLTTKVLKEADRLIRMAAKQFLHLNIHTPNALIHAKIKSGGLGIVELSSSIPNIFLHRITSLMQADGDIVLSSVLQSQRLSRLVERLNNMVGSVPIDQKWMDLIAQGPLSKGLEACCEDSASRTWIDNIPFGWTGKDFVRAIQLRTANLPTRAIPSNPPELRRCRAGCRNDESLAHVLQVCPITHDSRVKRHNEISKKVAAHCRRRHMEVEEEPHVRHPDGTLYKPDLAVHTNGNMIVVADVQVAWASDNSLESVWRRKEGVYNCPKFRQAAEKRWPNKSFVFTPIILEARGIWPRSNKPAEEHLKIDRQLKLSCVNSVLKWGSSIHRMFNRCVWRTGPGPPGGFFRQT

SEQ ID NO: 25233 - protein, 1065 aa, Hycleus cichorii
MQVDNVECCDICDAVFSNFSGLRQHHRLRHPSIPFGGTLKLMETVAREEIKLNYRMNYKCMISRTGLTYDQIRRLREKASYKEILEKLSASNANRITSGSDSEESKSDSSKGKSPGKVYQDRRTSRHFSPVASNATGTSRTIETVTPLRVLPSSSRDSACYDEPNIPRIDRIDGSLSREPDSYPNMEAQTEYRAINRDLSFADIITDASAKFATSKPSLSRLANVALSESRQVLSKELDDWITKNFKVARNRKTNYQQGRSNRTSNCGWGLHGSGARASRYKKAQDLFIKNKKMLTDIILTGRTMDGPSVIPEIQDVEELYGSIFETTAPTNNLPRHKSKEVIQLNFPIKESDVANAKSGWRFSAPGADGVTVKDVARFSDLDLSIFYNIILYRNCMPTSWTMLRTTLIPKGGDLREATNWRPITVGSALQRLLHRILSLRISNLVKLHPAQRGFIGIDGTLANCLIVDHFIRSRSQNTLPYNVVSLDIRKAFDTVPHQIIKRALMSHGLRGVWADYILNTIDGASTTIRIGNTYTRPIDIRRGVRQGDPLSPLLFNMVMDELFHVLDALGVGGQVSESDKCISVAFADDVILLTNIVDDMKKALSETEKFFIDRGMMLNPSKCHAISASVISGRVIPSSNRKFFIDGHALPMVVQTNNFKYLGHTFDSRGVLKPSLPNLNIWLRQLCRAPLKPHQKLVLLKQHIIPKLLYGLQNPRFTNKTLKEADRLIRMATKNFLHLNIHTPNALIHAKIRYGGLGVMELASSIPNILLHRLTSLMQADNDIVLSSVLRSQCLSALFEKLNNIVGTEPIDQKWINLISQGPLSKGLEACSEDSASRGWIDFKPFGWTGRDFVRAIQLRTANLPTRAIPSNPPDQRRCRGGCRNDETLAHVLQVCPVTHDVRVKRHNEIAKKLATHCRRRRMDVEEEPQVRHPDGTLYKPDLVVHTGENTMVVADVQVTWASDNTLESVWRRKQKIYDCEKFRYAAAKRWPNRGIVFTPIILEARGIWPRANKPAEDILKIDRQLKLSCVCTVLKWGSSIHRMFNRCVWRTGPGPPGGFFRHA

SEQ ID NO: 25234 - protein, 1437 aa, Hycleus cichorii
MASDARGQGPETSCTRQGTVDVLDDPAAGAGEDLAMKMDEGSVSLSAAPRRALRKRKPINYRESDGGFSTAACTPSTQSPPQTNHSGKDQAAIEGKHLNPQYTHVGRDTKSKISNRTEFVFKNSSNLATNQHAGTKTDVDNIVTIDDVPNCTSSSDESDIIDQSVRTRNNRNNCPKCDKYFKTKSGLTRHLKKACAPRTICLYCNRNFPSYSSVKQHERLVHIAEYQQEQLDSCLEICDVCDAAFSNFAGLRQHHRIRHPQVPFAGIQKLMEVVASEESKLGGRMNYKHVISATGLTYDQIRRIRENASYKEILSNMLTNTDNDQTLHSQHPVGELTSVNASGDMLVNDAPQNEDLTMPSLATTSETDKLTSEITTTNKWRRSYDLPSTSSVDGSDNRPRTRLQISRETFNSNNLKANYTGTYRNPSPQVLSADKTPTVNNITTTATFRRSLRVSSASNVDPTCLNQSTSQQVSHDIRFDNSDAVDSALIVDSKADYREDSRCYRINTETNSTMRNIARARLSNDLPTNSRTCGSHLRSNMHQQTSSGTFVSNIDRKVDIQESYRAINQGATFADIITNAARVFETSRPHLSRLAKTALTANRNDLSKAIDDWIGVTFKRSRNGTSNVRRPHNNQIPNYGLRRSGRGERAARYKKAQDLFIKNKKMLTDIILSGRPMDESTETPTVQDVEELYGSIFETTTSLGKLSRTTARDIIHLNFPIRETDVANAKANWRLSAPGPDNVAVRDVARFSNLELSVVFNIILYRNCLPPSWRTLRTTLIPKGGDPKQATNWRPITVGSAIQRLLHRIISIRLSGIAKLHPAQRGFVGIDGTLANCLIVDHFIKSRSESLLPYNVVSLDIRKAFDMVPHQLIRRALCSHGFRGVWMDYILNTLEGTSTIIRVGNAYTRPITLKRGVRQGDPLSPLLFNLVIDELFYRLDDLGVGGHVDDSERCTAVAFADDVVLLSDVVKDMKVALSQTEKFFVERGMMLNPAKCHAVSASVIDRKITPSPRPTFYVDGHALPMVLQTNSFRYLGHEFDSRGVMKPCLPNLNVWMRQLCRAPLKPHQKLVLLKQHIIPKLLYGLQNPKLTSKVLKEADRLIRMAAKQFLHLNIHTPNALIHAKIKYGGLGIMELSSSIPSIFLHRITSLMQADSDIVLSKVLLSQRLSRLVEQLNNMVGSVPIGQRWMDLIAQGPLSKGLEACCEDSASRTWIDNIPFGWTGKDYVRAIQLRTANLATRAIPSNPPELRRCRAGCRNDESLAHVLQVCPITHDFRVKRHNEISKKVAAHCRRRHMEVEEEPHVRHPDGTLYKPDLVVHTNSNTIVVADVQVAWASDHSLESVWRRKEGVYNCPKFRQAAERRWPNKSFIFTPIILEARGIWPRSNKSAEEQLKIDRQLKLSCVNSVLKWGSSIHRMFNRCVWRTGPGPPGGFFRQT

SEQ ID NO: 25235 - protein, 1104 aa, Menidia beryllina
MTTSKLKQSTLTGVEYTVRCYCGKICKSTRGLKQHQSRSKCRTAAAQEQRTDPGSGQTLENSSQEAPHSAEDLSATELPQHQRPTQRNTPPTTPIQLARRERINWPKMADRSAWTQLDDDLDGILEASASGSAHRKIDALTTIVYNLAKERFGTMVRKGQRQLQQLNRREREIRRLRSEIKALNKRFKISSPTEKEGIKDLTSKVREQLCRVRRAENIRKQRRKKEKRRSQFIKDPYSFTKSLLGQQKSGSLSSTKMEVEEFLAEAHGDPNRSRGLGANHNISRPEKPTVELNGKEPTWQEVRDVVHKAKSSAAPGPSGIPYKVYKKCPKLLKRLWKTMRKIWAKGTIPPSWKLAEGCFVPKEEGSSAISQFRTISLLNVECKIFFSVLARRITSYMMQNHYINPSIQKGGIPGFSGCLEHTSMITQLIHEAKRKKSDLTVIWLDLANAYGSIPHDLIQEGLDHYFIPEAIRGLISNYLAGFRLRFTSSLFTTNWLDLQKGIPTGCTISPILFIMGMNILLTAAEGITRGPRLESGVVQPVLRAFMDDITVTTVTHVQARWVLDTLGSVASWAGMLFKARKSRSMVIKKGRVTGKFSLQVQGEIIPPIEGNPVKCLGKWFNASLTDGANVAEAVKQTEEWLKKIDKSLLPGKFKTWLYQHGLLPRLLWLLTVYEFPMTTVELIERRTNKHLRKWLGIPPSFSSVGLYIRSGQLQLPLSSVVEEYKVAKCRVVLSLRHSNDDLISQAGMTTRSGRKWAANAAVDQAVSSLKLRDIVGNQCIHRQGLGSAKFQTWGGANTGTRRGMVQMEVRSREEEKRVARAVQQGSQGAWTKWDLPRRKVTWRELWRLEPYRISFLLRSVYDTLPSPVHLHTWGLREDPLCRLCGKRGTLAHILSGCKTSLTQGRYRWRHDKVLLSLADTIERERVKKRPADTTAQRAITFLKEGAARPPQSTRRKRTSILQAASSWEMRVDVGRRLQFPEVVQTTLRPDIVLWSSKERKIILVELTVPWEEGCEEAHERKAAKYQQLAQDCRDRGWQAWVFPVEIGCRGFPARSVWNFLSAIGMDEHSKKQAARRMGEEAERASCWIWSKREEESWKPGADGQ

SEQ ID NO: 25236 - protein, 1055 aa, Fundulus heteroclitus
MTDQGSGQTLENSSQEAPHSAEDLSATELPQHQRPTQRNTPPTTPIKLARRERINWPKMADSSAWMQLDDDLDGILEATASGSVHRKIDALTTIVYNLAKERFGTKVRKGQRQLQQQPNRREREIRRLRSEIKALNKRFKTSSPTEKEGIKDLTSKVREQLCRVRRAENIRKQRRKKEKRRSQFIKDPYSFTKSLLGQQKSGSLSSTKMEVEEFLAEAHGDPNRSRGLGANHNISRPEKPTIELNGKEPTWQEVRDVVHKAKSSAAPGPSGIPYKVYKKCPKLLKRLWKIMRKIWAKGTIPPSWKLAEGCFVPKEEGSSTISQFRTISLLNVECKIFFSVLARRITSYMMQNHYINPSIQKGGIPGFSGCLEHTSMITQLIHEAKRKKSDLTVIWLDLANAYGSIPHDLIQEGLDHYFIPETIRGLISNYLAGFRLRFTSSLFTTNWLDLQKGIPTGCTISPILFIMGMNILLTAAEGITRGPRLESGVVQPVLRAFMDDITVTTVTHVQARWVLDTLGSVASWAGMLFKARKSRSMVIKKGRVTGKFSLQVQGEIIPPIEGNPVKCLGKWFNASLTDGANVAEAVKQTEEWLKKIDKSLLPGKFKTWLYQHGLLPRLLWLLTVYEFPMTTVELIERRTNKHLRRWLGIPPSFSSVGLYIRSGQLQLPLSSVVEEYKVAKCRVVLSLRDSNDDLISQAGMTTRSGRKWAANAAVDQAVSSLKLRDIVGNQCIHRQGLGSAQFQTWGGANTGTRRGMVQMEVRSREEEKRVARAVQQGSQGAWTKWDLPRRKVTWRELWRLEPYRISFLLRSVYDTLPSPVHLHTWGLREDPLCKLCGKRGTLAHILSGCKTSLTQGRYRWRHDKVLLSLADTIERERVKKRPADTTAQRAITFLKEGAARPQSTRRKRTSILQAASSWEMRVDVGKRLQFPEVVQTTLRPDIVLWSSKERKIILVELTVPWEEGCEEAHERKATKYQQLAQDCRDRGWQAWVFPVEIGCRGFPARSAWNFLSAIGMDERSKKEAARRMGEEAERASCWIWSKREEESWKPGADGQ

SEQ ID NO: 25237 - protein, 1101 aa, Fundulus heteroclitus
MSGVKRRQLVGWGRRRNVPHAGFGARERRKAGSQEQMGSELATHCGPTNWRVLWFRAETPSEGWTPPEDLSATELPQHQRPTQRNTPPTTPIQLARRERINWPKMADSSAWMQLDDDLDGILEATASGSVHRKIDALTTIVYNLAKERFGTKVRKGQRQLQQQPNRREREIRRLRSEIKALNKRFKTSSPTEKEGIKDLTSKVREQLCRVRRAENIRKQRRKKEKRRSQFIKDPYSFTKSLLGQQKSGSLSSTKMEVEEFLAEAHGDPNRSRGLGANHNISRPEKPTIELNGKEPTWQEVRDVVHKAKSSAAPGPSGIPYKVYKKCPKLLKRLWKTMRKIWAKGTIPPSWKLAEGCFVPKEEGSSTISQFRTISLLNVECKIFFSVLARRITSYMMQNHYINPSIQKGGIPGFSGCLEHTSMITQLIHEAKRKKSDLTVIWLDLANAYGSIPHDLIQEGLDHYFIPETIRGLISNYLAGFRLRFTSSLFTTNWLDLQKGIPTGCTISPILFIMGMNILLTAAEGITRGPRLESGVVQPVLRAFMDDITVTTVTHVQARWVLDTLGSVASWAGMLFKARKSRSMVIKKGRVTGKFSLQVQGEIISPIEGNPVKCLGKWFNASLTDGANVAEAVKQTEEWLKKIDKSLLPGKFKTWLYQHGLLPRLLWLLTVYEFPMTTVELIERRTNKHLRRWLGIPPSFSSVGLYIRSGQLQLPLSSVVEEYKVAKCRVVLSLRDSNDDLISQAGMTTRSGRKWAANAAVDQAVSSLKLRDIVGNQCIHRQGLGSAQFQTWGGANTGTRRGMVQMEVRSREEEKRVARAVQQGSQGAWTKWDLPRRKVTWRELWRLEPYRISFLLRSVYDTLPSPVHLHTWGLREDPLCKLCGKRGTLAHILSGCKTSLTQGRYRWRHDKVLLSLADTIERERVKKRPADTTAQRAITFLKEGAARPQSTRRKRTSILQAASSWEMRVDVGKRLQFPEVVQTTLRPDIVLWASKERKIILVELTVPWEEGCEEAHERKAAKYQQLAQDCRDRGWQAWVFPVEIGCRGFPARSAWNFLSAIGMDERSKKEAARRMGEEAERASCWIWSKREEESWKPGADGQ

SEQ ID NO: 25238 - protein, 1104 aa, Fundulus heteroclitus
MTTSKLKQSTLTGVEYTVRCHCGKICKSTRGLKQHQSRSKCRTPAAQEQRTDPGSGQTLENSSQEAPHSAEDLSATELPQHQRPTQRNTPPTTPIQLARRERINWPKMADSSAWMQLDDDLDGILEATASGSVHRKIDALTTIVYNLAKERFGTKVRKGQRQLQQQPNRREREIRRLRSEIKALNKRFKTSSPTEKEGIKDLTSKVREQLCRVRRAENIRKQRRKKEKRRSQFIKDPYSFTKSLLGQQKSGSLSSTKMEVEEFLAEAHGDPNRSRGLGANHNISRPEKPTIELNGKEPTWQEVRDVVHKAKSSAAPGPSGIPYKVYKKCPKLLKRLWKTMRKIWAKGTIPPSWKLAEGCFVPKEEGSSTISQFRTISLLNVECKIFFSVLARRITSYMMQNHYINPSIQKGGIPGFSGCLEHTSMITQLIHEAKRKKSDLTVIWLDLANAYGSIPHDLIQEGLDHYFIPETIRGLISNYLAGFRLRFTSSLFTTNWLDLQKGIPTGCTISPILFIMGMNILLTAAEGITRGPRLESGVVQPVLRAFMDDITVTTVTHVQARWVLDTLGSVASWAGMLFKARKSRSMVIKKGRVTGKFSLQVQGEIIPPIEGNPVKCLGKWFNASLTDGANVAEAVKQTEEWLKKIDKSLLPGKFKTWLYQHGLLPRLLWLLTVYEFPMTTVELIERRTNKHLRRWLGIPPSFSSVGLYIRSGQLQLPLSSVVEEYKVAKCRVVLSLRDSNDDLISQAGMTTRSGRKWAANAAVDQAVSSLKLRDIVGNQCIHRQGLGSARFQTWGGANTGTRRGMVQMEVRSREEEKRVARAVQQGSQGAWTKWDLPRRKVTWRELWRLESYRISFLLRSVYDTLPSPVHLHTWGLREDPLCKLCGKRGTLAHILSGCKTSLTQGRYRWRHDKVLLSLADTIERERVKKRPADTTAQRAITFHKEGAARPQSTRRKRTSILQAASSWEMRVDVGKRLQFPEVVQTTLRPDIVLWSSKERKIILVELTVPWEEGCEEAHERKAAKYQQLAQDCRDRGWQAWVFPVEIGCRGFPARSAWNFLSAIGMDERSKKEAARRMGEEAERASCWIWSKREEESWKPGADGQ

SEQ ID NO: 25239 - protein, 1104 aa, Fundulus heteroclitus
MTTSKLKQSTLTGVEYTVRCHCGKICKSTRGLKQHQSRSKCRTPAAQEQRTDPGSGQTLENSSQEAPHSAEDLSATELPQHQRPTQRNTPPTTPIQLARRERINWPKMADSSAWMQLDDDLDGILEATASGSVHRKIDALTTIVYNLAKERFGTKVRKGQRQLQQQPNRREREIRRLRSEIKALNKRFKTSSPTEKEGIKDLTSKVREQLCRVRRAENIRKQRRKKEKRRSQFIKDPYSFTKSLLGQQKSGSLSSTKMEVEEFLAEAHGDPNRSRGLGANHNISRPEKPTIELNGKEPTWQEVRDVVHKAKSSAAPGPSGIPYKVYKKCPKLLKRLWKTMRKIWAKGTIPPSWKLAEGCFVPKEEGSSTISQFRTISLLNVECKIFFSVLARRITSYMMQNHYINPSIQKGGIPGFSGCLEHTSMITQLIHEAKRKKSDLTVIWLDLANAYGSIPHDLIQEGLDHYFIPETIRGLISNYLAGFRLRFTSSLFTTNWLDLQKGIPTGCTISPILFIMGMNILLTAAEGITQGPRLESGVVQPVLRAFMDDITVTTVTHVQARWVLDTLGSVASWAGMLFKARKSRSMVIKKGRVTGKFSFQVQGEIIPSIEGNPVKCLGKWFNASLTDGANVAEAVKQTEEWLKKIDKSLLPGKFKTWLYQHGLLPRLLWLLTVYEFPMTTVELIERRTNKHLRRWLGIPPSFSSVGLYIRSGQLQLPLSSVVEEYKVAKCRVVLSLRDSNDDLISQAGMTTRSGRKWAANAAVDQAVSSLKLRDIVGNQCIHRQGLGSAQFQTWGGANTGTRRGMVQMEVRSREEEKRVARAVQQGSQGAWTKWDLPRRKVTWRELWRLEPYRISFLLRSVYDTLPSPVHLHTWGLREDPLCKLCGKRGTLAHILSGCKTSLTQGRYRWRHDKVLLSLADTIERERVKKRPADTTAQRAITFLKEGAARPQSTRRKRTSILQAASSWEMRVDVGKRLQFPEVVQTTLRPDIVLWSSKERKIILVELTVPWEEGCEEAHERKAAKYQQLAQDCRDRGWQAWVFPVEIGCRGFPARSAWNFLSAIGMDERSKKEAARRMGEEAERASCWIWSKREEESWKPGADGQ

SEQ ID NO: 25240 - protein, 930 aa, Fundulus heteroclitus
MADSSAWMQLDDDLDGILEATASGSVHRKIDALTTIVYNLAKERFGTMVRKGQRQLQQQPNRREREIRRLRSEIKALNKRFKTSSPTEKEGIKDLTSKVREQLCRVRRAENIRKQRRKKEKRRSQFIKDPYSFTKSLLGQQKSGSLSSTKMEVEEFLAEAHGDPNRSRGLGANHNISRPEKPTIELNGKEPTWQEVRDVVHKAKSSAAPGPSGIPYKVYKKCPKLLKRLWKTMRKIWAKGTIPPSWKLAEGCFVPKEEGSSTISQFRTISLLNVECKIFFSVLARRITSYMMQNHYINPSIQKGGIPGFSGCLEHTSMITQLIHEAKRKKSDLTVIWLDLANAYGSIPHDLIQEGLDHYFIPETIRGLISNYLAGFRLRFTSSLFTTNWLDLQKGIPTGCTISPILFIMGMNILLTAAEGITRGPRLESGVVQPVLRAFMDDITVTTVTHVQARWVLDTLGSVASWAGMLFKARKSRSMVIKKGRVTGKFSLQVQGEIIPPIEGNPVKCLGKWFNASLTDGANVAEAVKQTEEWLKKIDKSLLPGKFKTWLYQHGLLPRLLWLLTVYEFPMTTVELIERRTNKHLRRWLGIPPSFSSVGLYIRSGQLQLPLSSVVEEYKVAKCRVVLSLRDSNDDLISQAGMTTRSGRKWAANAAVDQAVSSLKLRDIVGNQCIHRQGLGSAQFQTWGGANTGTRRGMVQMEVRSREEEKRVARAVQQGSQGAWTKWDLPRRKVTWRELWRLEPYRISFLLRSVYDTLPSPVHLHTWGLREDPLCKLCGKRGTLAHILSGCKTSLTQGRYRWRHDKVLLSLADTIERERVKKRPADTTAQRAITFLKEGAARPQSTRRKRTSILQAASSWEMRVDVGKRLQFPEVVQTTLRPDIVLWSSKERKIILVELTVPWEEGCEEAHERKAAKYQQLAQDCRDRGW

SEQ ID NO: 25241 - protein, 1104 aa, Fundulus heteroclitus
MTKSKLKQSTLTGVEYTVRCHCGKICKSTRGLKQHQSRSKCRTPAAQEQRTDPGSGQTLENSSQEAPHSAEDLSATELPQHQRPTQRNTPPTTPIQLARRERINWPKMADSSAWMQLDDDLDGILEATASGSVHRKIDALTTIVYNLAKERFGTKVRKGQRQLQQQPNRREREIRRLRSEIKALNKRFKTSSPTEKEGIKDLTSKVREQLCRVRRAENIRKQRRKKEKRRSQFIKDPYSFTKSLLGQQKSGSLSSTKMEVEEFLAEAHGDPNRSRGLGANHNISRPEKPTIELNGKEPTWQEVRDVVHKAKSSAAPGPSGIPYKVYKKCPKLLKRLWKTMRKIWAKGTIPPSWKLAEGCFVPKEEGSSTISQFRTISLLNVECKIFFSVLARRITSYMMQNHYINPSIQKGGIPGFSGCLEHTSMITQLIHEAKHKKSDLTVIWLDLANAYGSIPHDLIQEGLDHYFIPETIRGLISNYLAGFRLRFTSSLFTTNWLDLQKGIPTGCTISPILFIMGMNILLTAAEGITRGPRLESGVVQPVLRAFMDDITVTTVTHVQARWVLDTLGSVASWAGMLFKARKSRSMVIKKGRVTGKFSLQVQGEIIPPIEGNPVKCLGKWFNASLTDGANVAEAVKQTEEWLKKIDKSLLPGKFKTWLYQHGLLPRLLWLLTVYEFPMTTVELIERRTNKHLRRWLGIPPSFSSVGLYIRSGQLQLPLSSVVEEYKVAKCRVVLSLRDSNDDLISQAGMTTRSGRKWAANAAVDQAVSSLKLRDIVGNQCIHRQGLGSARFQTWGGANTGTRRGMVQMEVRSREEEKRVARAVQQGSQGAWTKWDLPRRKVTWRELWRLEPYRISFLLRSVYDTLPSPVHLHTWGLREDPLCKLCGKRGTLAHILSGCKTSLTQGRYRWRHDKVLLSLADTIERERVKKRPADTTAQRAITFHKEGAARPQSTRRKRTSILQAASSWEMRVDVGKRLQFPEVVQTTLRPDIVLWSSKERKIILVELTVPWEEGCEEAHERKAAKYQQLAQDCRDRGWQAWVFPVEIGCRGFPARSAWNFLSAIGMDERSKKEAARRMGEEAERASCWIWSKREEESWKPGADGQ

SEQ ID NO: 25242 - protein, 1018 aa, Tenualosa ilisha
MADDKAWIQLDDDLEGILETTTAGPVYRKTDAITTIAYNLAKERFGTMEQKGQRQPQQQPNRREREIRRLRSEMKALNKLFKTSSQTEREGIKDLTAELREQLRRLRRAEYLRKQRRSKDKKRAQFVKDPYSFTKTILGQQRSGSLSSTKSEVEQFLVEAHSDPNRCQGLGANHNISRPGRPTIELNVKEPTWQEVQDIVRKARSSAAPGPSGIPYKVYKKCPKLLRRLWKTMRKIWAKGTIPSSWKLAEGCFVPKEEKSSTISQFRTISLLSVECKIFSVLARRITTYMTQNQYVNTSIQKGGIPGFSGGLEHTSMISQLIQEARQKKSDLTVIWLDLANAYGSIPHDLIQEGLDHYYIPMAIRGMITSYLAGFRLRFTSAFFTTSWLDLQKGIPTGCTISPILFIMGMNLLLSAAEGITRGPKLESGVVQPVLRAFMDDITVTTVTHVQARWVLETLGSVASWAGMLFKARKSRSMVIKKGKVISKFSLKVQDEVIPSIEGNPIKCLGKWFNASLTDGANVAEAVKQTEKWLKKIDKSFLPGKFKTWLYQHGLLPRLLWLFTVYEFPMTTIEVIERKINKHLRRWLGIPPSFSAVGLYIRSGQLQLSLSSVVEEYKVAKCRVVLSLRDSNDDLIKQAGITTRSGRKWAANTAVEQAIGSLKLRDIVGNQCVHRQGLGSAQFQTWGGADTRTRRGMVQAEVRSREEERRVARAVQQGSQGAWTRWDLPRRIVTWRELWRLEPYRISFLLRSVYDTLPSPAQLHLWGLREDPLCKLCSQKGTLAHVLSRCKTSLTQGRYRWRHDKVLLSLADTIERERVKKRPAHTTAVKTITFLKEGARPVQTPRGKRPSILHAADSWEMRVDHGRRLQFPDVVQTSLRPDIVLWSTKDQKIILVELTVPWEEGCEEAHERKAAKYQHLAQDCRDRGWQAWVFPVEVGCRGFPAKSTWSFLSALGMDEQSKKQAARRLGEEAERASCWIWSRREEESWKPGADGQRAGHSLWAHQLEGVVVGGRNTQ

SEQ ID NO: 25243 - protein, 997 aa, Thalassophryne amazonica
MVDDKAWIQLEDDIEGILEVTVAGSVHRKIDAITTIIYNLAKERFGTIEQKGQCQPQQQPNRREREIRQLRSEIKALSKRFKTSSLTKREGIRDLTTELRGQLRRLRRAEQLRKQRRKKEKKRAQFVRDPYSFTKTLLGQQRSGSLSSSKAEVEEFLVEAYSDPNRGQGLGTNHNISRPGKPTIELNVKEPTWQEVKDIVRKAKSSAAPGPSGIPYKVYKKCPKLLRRLWKIMRKIWARGIIPPSWKLAEGCFVPKEERSSTISQFRTISLLSVECKIFFSVLARRITTYMIQNQYINTSIQKGGIPGFSGCLEHTSMISQLIQEARQKKSDLTVVWLDLANAYGSISHNLIQEGLDHYSIPMAIRGLINNYLACFRLRFSSAFFTTSWLDLQKGIPTGCTISPILFIMGMNLLLSAAEGITRGPKLESSVEQPVLRAFMDDITVTTVTHVQARWVLETLGSVATWAGMLFKARKSRSMVIRKGRVTSKFSLKVQGEVIPSIEGSPIKCLGKWFNASMTDGANVAEAVKQTEEWLKKIDKSLLPGKFKTWLYQHGLLPRLLWLFTVYEFPMTTIEVIERKINKHLRSWLGIPPSFSAVGLYIRSGQLQLPLSSVVEEYKVAKCRVVLSLRNSNDDLIKQAGITTRSGRKWSANTAVEQAIGSLKLRDIAGNQCVHRQGFGSAQFQTWGGANMRTRRGMVQAEVRNREEEKRVARAVQQGSQGAWTKWDLPRRKVTWRELWRLEPYRISFLLRSVYDTLPSPVHLHTWGLREDPLCKLCSQKGTLAHILSGCKISLTQGRYRWRHDKVLLSLADTIERERVKKRPVHTTAGRMITFLKEGARPVQTTKRIRPSILHAASSWEMRVDVGSRLQFPEVVQTSLRPDIVLWSAKDQKIILVELTVPWEEGCEEAHERKAAKYQPLAQECRDRGWQAWVFPVEIGCRGFPAKSTWSFLCAIGMDEQSKKQAARRMGEEAERASCWIWSKREEESWKPGADGQ

SEQ ID NO: 25244 - protein, 1104 aa, Thalassophryne amazonica
MTTRKLKQSTLTGVEYTVRCHCGKICKSTRGLKQHQSRSKCGTSATPVQRTDPESGQTMETYSQEAPHSAEDLSAPELPQHQKPANVNSPPVTSTQLAKRERIRWPKMVDDKAWIQLEDDIEGILEVTVAGSVHRKIDAITTIIYNLAKERFGIIEQKGQCQPQQQPNRREREIRQLRSEIKALSKRFNTSSLTEREGIRDLTTELRGQLRRLRRAEQLRKQRRKKEKKRAQFVRDPYSFTKTLLGQQRSGSLSSCKSEVEEFLVEAYSDPNRGQGLGTNHNISRPGKPTIELNVKEPTWQEVKDIVRKAKSSAAPGPSGIPYKVYKKCPKLLRRLWKIMRKIWAKGIIPPSWKLAEGCFVPKEERSSTISQFRAISLLSVECKIFFSVLARRITTYMIQNQYINTSTQKGGIPGFSGCLEHTSMISQLIQEARQKKSDLTVVWLDLANAYGSISHNLIQEGLDHYSIPMAIRGLINNYLAGFRLRFSSALFTTSWLDLQKGIPTGCTISPILFIMGMNLLLSAAEGITRGPKLESSVEQPVLRAFMDDITVTTVTHVQARWVLETLGSVATWAGMLFKARKSRSMVIRKGRVTSKFSLKVQGEVIPSIEGSPIKCLGKWFNASMTDGANVAEAVKQTEEWLKKIDKSLLPGKFKTWLYQYGLLPRLLWLFTVYEFPMTTIEVIERKMNKHLRRWLGIPPSFSAVGLYIRSGQLQLPLSSVVEEYKVAKCRVVLSLRNSNDDLIKQVGITTRSGRKWSANTAVEQAIGSLKLRDIAGNQCVHRQGFGSAQFQTWGGANMRTRRGMVQAEVRNREEEKRVARAVQQGSQGAWTKWDLPRRKVTWRELWRLEPYRISFLLRSVYDTLPSPVHLHTWGLREDPLCKLCSQKGTLAHILSGCKISLTQGWYRWCHDKVLLSLADTIERERVKKRPVHTTAGRMITFLKEGARPVQTTKRIRPSILHAASSWEMRVDVGSRLQFPEVVQTSLHPDIVLWSAKDQKIILVELTVPWEEGCEEAHERKAAKYQPLAQECRDRGWQAWVFPVEIGCRGFPAKSTWSFLSAIGMDEQSKKQAARRMGEEAERASCWIWSKREEESWKPGADGQ

SEQ ID NO: 25245 - protein, 1102 aa, Sphaeramia orbicularis
MTSRKLKQTTLTGEEWIVRCHCGKVCRSTRGLKQHQSRSRCRPSATQVQRTGLESGQTMENSSQEAPHSAGDLSALEQPQHHGPVRENPFPVTLTYPAKRERIQWPKMSDCKVWTQLDNDLDGILEATLSGPVQRKVDSIATIVYSLARERFGTIERKGQLQQQQPNRREREIRHLRSEIKALNKLFKTSSPTEKEGIKDLTSKLRGQLCKVRRAEYLRQQRRKKEKRRAQFVKNPYNFTKSLLGQRKSGSLSSSKQEVEEFLLEAHRDPNRNQGLGTHHEIFRPGNPSIELNEKEPSWQEVQDIVRRAKSSAAPGPSGIPYKVYKKCPKLLRRLWKIMRKIWAKGTVPPSWKLAEGCFVPKEEGSSAISQFRTISLLSVECKIFFSVLAKRITSYMMQNRYINISIQKGGIPGFSGCLEHTSMISHLIQEAKQKKGDLTIVWLDLANAYGSIPHDLIREGLDHYHIPQRIQDMINTYLAGFKLRFSSALFTTNWLDLQKGIPTGCTISPILFIIAMNLLISAAEGITRGPKLESGIVQPVLRAFMDDITITTVTHVQARWVLETLGSVASWAGMLFKARKSRCLIIKKGKVTSKFSLQVQGEVIPSIEGNPIKCLGKWFNASLTDGANVDEAVKQTEEWLRRIDRSLLPGKFKTWLYQHGLLPRLLWLFTVYEFPMTAVEAIERKINKYLRRWLGIPPSFSSVGLYIRSGQLQLPLSSVVEEYKVAKCRVVLSLRNSNDELVKQAGVTTRSRCKWAANTAVEQAVSALKLRDIIGNQCVHRQGLGTAHFQTWRDANVRSRRDMVQAEVRSREEERRIARAVEQSSQGAWTKWDLPSRKVTWAELWRLEPYRISFLLRSVYDTLPSPSHLHTWGLREDPLCKLCSQRGTLAHILSGCKTALTQGRYRWRHDKVLLSLADTIERERGKKRPAGVATKSAITFIKEGARPIHTIKTKPNILQTASSWEMRVDVGRRLQFPEVVQTTLRPDIVLWSPKDQKIILVELTVPWEEGCEEAHERKASKYQSLIQDCRDKGWQAWLFPVEIGCRGFPAQSAWRLLSALGLDEQNKKQAVRRMGEEAERASCWIWSKREEESWRPGAGGQ

SEQ ID NO: 25246 - protein, 1101 aa, Trachurus trachurus
MRKLKQTTLTGEEFTTRCYCGKVCRSTRGLRQHQSRSRCGTAAAQVQRTDPRSGQTMENSSQEAPHSAEDLSALEQPQHQRPAHTNPPLVTPIHSARRERIKWPKTSDNTIWMQLNDDLDGILEAISSGPAHKKVDSITTIAYNLAKERFGTMERKGQPQQQKEPNRREREIRRLRSEIKALNKQYKISSPTEKEGIKDLTSKLREQLCKVRRAEYLRQQRRKKEKRRAQFVKDPYSFTKTLLGQQKSGTLSSSRAEVEEFLSEAHSDANKSQGLGANRNISRPGKPTAELNVKEPTWQEIQDIVRKAKSSAAPGPSGMPYKVYKKCPKLLRRLWKVMRKIWTKGTIPPSWKLAEGCFVPKEEGSSTISQFRTISLLNVECKIFFSVLARRITSYMMQNHYINTSIQKGGIQGFSGCLEHTAMISQLIREAKQKRGDLTVVWLDLANAYGSIPHDLIQEGLDHYYIPVAIRDMINSYLAGFKLRFTSALFTTSWLDLQKGIPTGCTISPILFIMGMNLLITAAEGITRGPKLESGIVQPALRAFMDDITITTVTHVQARWVLETLGSVASWAGMLFKARKCRRLIIKKGKVTSKFCLQVQGEVIPSIEDSPIKYLGKWFNASLTDGTNVAEAVKQTEEWLKKIDKSLLPGKFKTWLYQHGLLPRLLWLFTVYEFPMTVVEVIERKTNKHLRRWLGIPPSFSSVGLYIRSGQLQLPLSSVVEEYKVAKCRVVLSLRDSNDDLVKQAGVTTRSGRKWAADKAVEQAVSSLKLRDIIGNQCVHRQGLGSAHFQSWGGASARTRRDMVQAEVRSREEEKRTARAVEQGSQGAWTKWDLPKRKVTWQELWRLEPYRISFLLRSVYDTLPSPSHLHTWGLREDPLCKLCGQRGTLAHILSGCKTALTQGRYRWRHDKVLLSLADTIERERVKKRAAGTATGRTITFLREGARPTPTARRKSNILQSARSWEMRVDVGRRLQFPEVVQTTLRPDIVLWSTKDQKIILVELTVPWEEGCEVAHERKALKYQPLIQDCRDKGWQAWLFPVEVGCRGFPAKSAWRLMSALGVDERSKKQAARRMGEEAERASCWIWSKREEESWRPGAGGQ

SEQ ID NO: 25247 - protein, 894 aa, Pimephales promelas
MCKLRRAEYLRQQRKKKAKRRMQFLKDPFSFTRTLLGQRKSGTLSSSKSEVEEFLREAHSDPFRGGGLGQNNSIRKPEEPSVELNTKEPTWQEMQDIIRKAKASAAPGPSGIPYKVYKHCPQLLKRLWRILRKIWAKGSVPPSWKLAEGCFVPKEEGSSSIAQFRTISLLSVECKIFFSVLAKRLTSYMTQNQYINTSIQKGGVPGFSGCLEHISMITQLIQEAKQKKSDLTVIWLDLANAYGSVPHDLIQEGLDHYHIPMAIRDMISSYLGGIKLRFTAGQFTTNWQDLQKGIPTGCTISPILFVMGMNLLVGAAEGVTRGPTLESGISQPVLRAFMDDITITTGTHVQARWVLETLGAVATWARMSFKANKSRSLVIRKGKPTGRFSLHVQGEAIPSIEDNPVKCLGKWFDVSLSDRANAKNTVEQAEEWLKKIDKSKLPGKFKTWLYQHGLLPRLLWLFTMYELPMTAVEGIERKTNKHLRRWLGIPPSFSTVGLYVRSGQLQLPLSSIVEEFKVAKCRVLLSLRDSKDELVRQAGVMTRSGRKWAASTAVEQAESALRLRDILGSPCIGRRGLGSAHFQQWRSAGVKSRQEMVQAEVRAREEERRMARAVEQGSQGAWTKWDLPKRKISWQELWRLEPYRISFLLRSVYDTLPSPAHLHVWGLREDPNCKLCGQKGTLAHILSGCKTALTQGRYRWRHDKVLLSLADILEQERCRKRPAGMGLKRAITFIKEGERPVLTKPSKPNLLQNARSWEMRVDVGKRLQFPGVVLTALRPDIVLWSTEGKKIILVELTVPWEEGCEVAHERKALKYQSLLQDCKDKGWQAWLFPVEVGCRGFPAKSTWRLLSALGMDERRKKQAVRRMGEEAERASCWIWNRREEESWKPGADGQ

SEQ ID NO: 25248 - protein, 882 aa, Pimephales promelas
MWKKKAKRRMQFLKDPFSFTRTLLGQRKSGTLSSSKSEVEEFLREAHSDPFRGGGLGQNNSIRKPEEPSVELNTKEPTWQEMQDIIRKAKASAAPGPSGIPYKVYKHCPQLLKRLWRILRKIWAKGSVPPSWKLAEGCFVPKEEGSSSIAQFRTISLLSVECKIFFSVLAKRLTSYMTQNQYINTSIQKGGVPGFSGCLEHTSMITQLIQEAKQKKSDLTVIWLDLANAYGSVPHDLIQEGLDHYHIPMAIRDMISSYLGGIKLRFTAGQFTTNWQDLQKGIPTGCTISPILFVMGMNLLVGAAEGVTRGPTLESGISQPVLRAFMDDITITTGTHVQARWVLETLGAVATWARMSFKANKSRSLVIRKGKPTGRFSLHVQGEAIPSIEDNPVKCLGKWFDVSLSDRANAKNTVEQAEEWLKKIDKSKLPGKFKTWLYQHGLLPRLLWLFTMYELPMTAVEGIERKTNKHLRRWLGIPPSFSTVGLYIRSGQLQLPLSSIVEEFKVAKCRVLLSLRDSKDELVRQAGVMTRSGRKWAASTAVEQAESALRLRDILGSPCIGRRGLGSAHFQQWRSAGVKSRQEMVQAEVRAREEERRMARAVEQGSQGAWTKWDLPKRKISWQELWRLEPYRISFLLRSVYDTLPSPAHLHVWGLREDPNCKLCGQKGTLAHILSGCKTALTQGRYRWRHDKVLLSLADILEQERCRKRPAGMGLKRAITFIKEGERPVLTKPSKPNLLQNARSWEMRVDVGKRLQFPGVVLTALRPDIVLWSTEGKKIILVELTVPWEEGCEVAHERKALKYQSLLQDCKDKGWQAWLFPVEVGCRGFPAKSTWRLLSALGMDERRKKQAVRRMGEEAERASCWIWNRREEESWKPGADGQ

SEQ ID NO: 25249 - protein, 894 aa, Pimephales promelas
MCKLRRAEYLRQQRKKKAKRRMQFLKDPFSFTRTLLGQRKSGTLSSSKSEVEEFLREAHSDPFRGGGLGQNNSIRKPEEPSVELNTKEPTWQEMQDIIRKAKASAAPGPSGIPYKVYKHCPQLLKRLWRILRKIWAKGSVPPSWKLAEGCFVPKEEGSSSIAQFRTISLLSVECKIFFSVLAKRLTSYMTQNQYINTSIQKGGVPGFSGCLEHTSMITQLIQEAKQKKSDLTVIWLDLANAYGSVPHDLIQEGLDHYHIPMAIRDMISSYLGGIKLRFTAGQFTTNWQDLQKGIPTGCTISPILFVMGMNLLVGAAEGVTRGPRLESGISQPVLRAFMDDITITTGTHVQARWVLETLGAVATWARMSFKANKSRSLVIRKGKPTGRFSLHVQGEAIPSIEDNPVKCLGKWFDVSLSDRANAKNTVEQAEEWLKKIDKSKLPGKFKTWLYQHGLLPRLLWLFTMYELPMTAVEGIERKTNKHLRRWLGIPPSFSTVGLYIRSGQLQLPLSSIVEEFKVAKCRVLLSLRDSKDELVRQAGVMTRSGRKWAASTAVEQAESALRLRDILGSPCIGRRGLGSAHFQQWRSAGVKSRQEMVQAEVRAREEERRMARAVEQGSQGAWTKWDLPKRKISWQELWRLEPYRISFLLRSVYDTLPSPAHLHVWGLREDPNCKLCGQKGTLAHILSGCKTALTQGRYRWRHDKVLLSLADILEQERCRKRPAGMGLKRAITFIKEGERPVLTKPSKPNLLQNARSWEMRVDVGKRLQFPGVVLTALRPDIVLWSTEGKKIILVELTVPWEEGCEVAHERKALKYQSLLQDCKDKGWQAWLFPVEVGCRGFPAKSTWRLLSALGMDERRKKQAVRRMGEEAERASCWIWNRREEESWKPGADGQ

SEQ ID NO: 25250 - protein, 894 aa, Pimephales promelas
MCKLRRAEYLRQQRKKKAKRRMQFLKDPFSFTRTLLGQRKSGTLSSSKSEVEEFLREAHSDPFRGGGLGQNNSIRKPEEPSVELNTKEPTWQEMQDIIRKAKASAAPGPSGIPYKVYKHCPQLLKRLWRILRKIWAKGSVPPSWKLAEGCFVPKEEGSSSIAQFRTISLLSVECKIFFSVLAKRLTSYMTQNQYINTSIQKGGVPGFSGCLEHTSMITQLIQEAKQKKSDLTVIWLDLANAYGSVPHDLIQEGLDHYHIPMAIRDMISSYLGGIKLRFTAGQFTTNWQDLQKGIPTGCTISPILFVMGMNLLVGAAEGVTRGPTLESGISQPVLRAFMDDITITTGTHVQARWVLETLGAVATWARMSFKANKSRSLVIRKGKPTGRFSLHVQGEAIPSIEDNPVKCLGKWFDVSLSDRANAKNTVEQAEEWLKKIDKSKLPGKFKTWLYQHGLLPRLLWLFTMYELPMTAVEGIERKTNKHLRRWLGIPPSFSTVGLYVRSGQLQLPLSSIVEEFKVAKCRVLLSLRDSKDELVRQAGVMTRSGRKWAASTAVEQAESALRLRDILGSPCIGRRGLGSAHFQQWRSAGVKSRQEMVQAEVRAREEERRMARAVEQGSQGAWTKWDLPKRKISWQELWRLEPYRISFLLRSVYDTLPSPAHLHVWGLREDPNCKLCGQKGTLAHILSGCKTALTQGRYRWRHDKVLLSLADILEQERCRKRPAGMGLKRAITFIKEGERPVLTKPSKPNLLQNARSWEMRVDVGKRLQFPGVVLTALRPDIVLWSTEGKKIILVELTVPWEEGCEVAHERKALKYQSLLQDCKDKGWQAWLFPVEVGCRGFPAKSTWRLLSALGMDERRKKQAVRRMGEEAERASCWIWNRREEESWKPGADGQ

SEQ ID NO: 25251 - protein, 1249 aa, Lasioglossum lativentre
MIMVFSHPDNRHILFYFFMDSTIIEELVASDAESPVPGTSVTDLSVPQGDQYDDTARLTVTNTMSGTGPITIQVPLLTDQIGCPACERINANHHFLSLGDLNKHLKSKHLKVAIRWECHKCQKLYDGLHKAVCHHAKCRGVEIRNPDATLIQCQGCPAQFDSTRGLATHERHRHPELRNLKRQTKQAAPSVQPIVRRGNRVWTDNEIDLLKQLEVEYGNCRFLNIKIQKHLPNKTTKQISDKRRDLKLALARTVQRSAQMNMAEDSRSSDTRDPGPAETIPAQEESSPEDIVDAVGNNNNLSNPIEVDYSEWRDSLRQKINRAVVGSESVQISNLLYSLKQIAESVDNNQEVLKDQIENFITKQLTPFLVENEAIANNNNNNTHANKLNKGKNRNNNNNNNNNINNNNNINNRNKNNNNNRSSKISINKSIHNLHRNINNNNPNDKSNHKRKTKKNHRRKYMYARCQDLFNECPKKLAELIVNHDEFVIKPPLPPPKEEDIKELYVDLWETPGPARINLGLKNLPKRKLKEFFTPFSGEEIKEKISKIRTKTAAGPDGLLKRHLLIPDLPVILANLFNILCLANYYPEIWKVNRTTLIPKPNKDVDNIGNWRPITISSIISRIFSSLIDIRLRSVITQNLRQKGFTSENGCAHNTSLLNDILTHCKLSEGGVFTILDISKAFDTVPHEMIRVGLNSKGIPDKIIELINQMYDNCSTKIRACEGKTVSVKLKRGVKQGDSLSPLLFNLSIEHLLDELEEKSIGLSTKEGPNVPVLAFADDLVLLAKNTDEAQLQLNMVVSFLRKLNMDLSAKKCSSFEIITKEDTWFVNNPKLRISDREEIPGTEPGEVLRYLGAHIGPWKGMHCGTIVPEIVNLIIRTRVLPLKPQQKIYLIINYIIPRFIYHLTICPPSDSVLKLLDSEIRQQIKEILHLATSTATGFFYTPRNCGGLGLPRLEHITKLAVLKSALKKRESLDPAISGLINEAYEKKLKTIANSLRINWPATIDDVDKAKRRLKKEYMLQWETLRSQSQGVKEYYQDKIGNSWLTEYNLLKPSRFIDAIHLRTNTFGNRTTLRRANKNVDVLCRKCKAQAETLGHILGLCQYTKGLRIKRHDEIKNFVAEISKSENDIFIEPSITVGNKSYRPDLIIKNEQRFFIVDITVRYENKDYLRKAREEKINKYNPCLSYLKNKFKINEGEVLPIVVGSRGVIPGDTRDDLSKKLRVKKHQIKTIALIALRSSIELANIFIDS

SEQ ID NO: 25252 - protein, 1249 aa, Lasioglossum lativentre
MIMVFSHPDNRHILFYFFMDSTIIEELVASDAESPVPGTSATDLSVPQGDQYDDTARLTVTNTMSGTGPITIQVPLLTDQIGCPACERINANHHFLSLGDLNKHLKSKHLKVAIRWECHKCQKLYDGLHKAVCHHAKCRGVEIRNPDATLIQCQGCPAQFDSTRGLATHERHRHPELRNLKRQTKQAAPSVQPIVRRGNRVWTDNEIDLLKQLEVEYGNCRFLNIKIQKHLPNKTTKQISDKRRDLKLALARTVQRSAQMNMAEDSRSSDTRDPGPAETIPAQEESSPEDIVDAVGNNNNLSNPIEVDYSEWRDSLRQKINRAVVGSESVQISNLLYSLKQIAESVDNNQEVLKDQIENFITKQLTPFLVENEAIANNNNNNTHANKLNKGKNRNNNNNNNNNINNNNNINNRNKNNNNNRSSKISINKSIHNLHRNINNNNPNDKSNHKRKTKKNHRRKYMYARCQDLFNECPKKLAELIVNHDEFVIKPPLPPPKEEDIKELYVDLWETPGPARINLGLKNLPKRKLKEFFTPFSGEEIKEKISKIRTKTAAGPDGLLKRHLLIPDLPVILANLFNILCLANYYPEIWKVNRTTLIPKPNKDVDNIGNWRPITISSIISRIFSSLIDIRLRSVITQNLRQKGFTSENGCAHNTSLLNDILTHCKLSEGGVFTILDISKAFDTVPHEMIRVGLNSKGIPDKIIELINQMYDNCSTKIRACEGKTVSVKLKRGVKQGDSLSPLLFNLSIEHLLDELEEKSIGLSTKEGPNVPVLAFADDLVLLAKNTDEAQLQLNMVFSFLRKLNMDLSAKKCSSFEIITKEDTWFVNNPKLRISDREEIPGTEPGEVLRYLGAHIGPWKGMHCGTIVPEIVNLIIRTRVLPLKPQQKIYLIINYIIPRFIYHLTICPPSDSVLKLLDSEIRQQIKEILHLATSTATGFFYTPRNCGGLGLPRLEHITKLAVLKSALKKRESLDPAISGLINEAYEKKLKTIANSLRINWPATIDDVDKAKRRLKKEYMLQWETLRSQSQGVKEYYQDKIGNSWLTEYNLLKPSRFIDAIHLRTNTFGNRTTLRRANKNVDVLCRKCKAQAETLGHILGLCQYTKGLRIKRHDEIKNFVAEISKSENDIFIEPSITVGNKSYRPDLIIKNEQRFFIVDITVRYENKDYLRKAREEKINKYNPCLSYLKNKFKINEGEVLPIVVGSRGVIPGDTRDDLSKKLRVKKHQIKTIALIALRSSIELANIFIDS

SEQ ID NO: 25253 - protein, 961 aa, Conopomorpha cramerella
MSQNVGPNTPAPLSQDGYVQCPTCSQPRFFKGQKGLKIHCSRQHRSNPPPITASNSGVSSGSSGTHGVDSDAPLWQLLGRYKRSFPVVKRIPRGARVSVAGALSSCIRNVVDKNDVQSWTDFFTFAYRVLHVSKSRELSLTQKIRNNCARSGSLEKINVGLGFRFDLNSRVASKIEDGDVRGAARLLFSSDTMAPQDAETLSALRAKHPSRSPDCQLPTEPNGFDPSPSEVLVDDVLSGIMSFKSGSAAGLDGLSPQHLKDLVCGVTGDQGRTLLFELSRLVNLMLEGQVCADVTNVLYGANLIALKKKDGGIRPIAVGEFVRRLASKICCKSLLPELSLKFRPTQLGFGTPGGCEAAVHAARTLLKLGDSEVFLKIDIRNAFNSVCRGVMLSRVRECIPMYYKYIWQCYSGAPSLVFGDNLILSDIGCQQGDPLGPAIFSLAIHPVLEALNSRFNVWYLDDGTLAGEASVVLSDLKHIIQAFHPMGLELNYDKCELFIGNSVGSVERDNIVAEFNSVAPGIQIVDASSLCLLGAPILDAAIPSFSDGLTSTFESAIDRLKQIHPHYAYVIIRFCLFVPKLLYVLRCSELWRFTPFLEALEGILRSTMSGVLNVAFTDDGWVQATLPIRFGGIGIRSIRGVALPAFLSSAHSIRDLFGTIIRPSLGDVEISGLAEGVQAWRAIAVSEDVPENKSAQKQWDEPLCKLTADSLLNGAVNLSEKARLIAAVQPDSGHWLNALPSMHTGTLLDRNSLSFAVRLRLGLRSTEPHRCRCGVMVDDRGRHGLSCQRSAGRQSRHACINDVIRRALVSVGVPSVLEPVGLSRSDGKRPDGMSLVPWVQGLPLVWDATCVDTFADSHVNACASTGGSAAASAERNKRRKYACLPAGYIFVPFGVETLGPWGPEARAFFRQLAGRLIEHTGNPRAGSYLAQRISLAIQRGNALSVFGTLPREEGLGSVFNI

SEQ ID NO: 25254 - protein, 961 aa, Conopomorpha cramerella
MSQNVGPNTPAPLSQDGYVQCPTCSQPRFFKGQKGLKIHCSRQHRSNPPPITASNSGVSSGSSGTHGVDSDAPLWQLLGRYKRSFPVVKRIPRGARVSVAGALSSCIRNVVDKNDVQSWTDFFTFAYRVLHVSKSRELSLTQKIRNNCARSGSLEKINVGLGFRFDLNSRVASKIEDGDVRGAARLLFSSDTMAPQDAETLSALRAKHPSRSPDCQLPTEPNGFDPSPSEVLVDDVLSGIMSFKSGSAAGLDGLSPQHLKDLVCGVTGDQGRTLLFELSRLVNLMLEGQVCADVTNVLYGANLIALKKKDGGIRPIAVGEFVRRLASKICCKSLLPELSLKFRPTQLGFGTPGGCEAAVHAARTLLKLGDSEVFLKIDIRNAFNSVCRGVMLSRVRECIPMYYKYIWQCYSGAPSLVFGDNLILSDIGCQQGDPLGPAIFSLAIHPVLEALNSRFNVWYLDDGTLAGEASVVLSDLKHIIQAFHPMGLELNYDKCELFIGNSVGSVERDNIVAEFNSVAPGIQIVDASSLCLLGAPILDAAIPSFSDGLTSTFESAIDRLKQIHPHYAYVIIRFCLFVPKLLYVLRCSELWRFTPFLEALEGILRSTMSGVLNVAFTDDGWVQATLPIRFGGIGIRSIRGVALPAFLSSAHSIRDLFGTIIRPSLGDVEISGLAEGVQAWRAIAVSEDVPENKSAQKQWDEPLCKLTADSLLNGAVNLSEKARLIAAVQPDSGHWLNALPSMHTGTLLDRNSLSFAVRLRLGLRSTEPHRCRCGVMVDDRGRHGLSCQRSAGRQSRHACINDVIRRALVSVGVPSVLEPVGLSRSDGKRPDGMSLVPWVQGLPLVWDATCVDTFADSHVNACASTGGSAAASAERNKRRKYACLPAGYIFVPFGVETLGPWGPEARAFFRQLAGRLIEHTGNPRAGSYLAQRISLAIQRGNALSVFGALPREEGLGSVFNI

SEQ ID NO: 25255 - protein, 1471 aa, Pomphorhynchus laevis
MTLTINYCSQPEQLKCNMCDFCAVSKKSIYKALCNHYENAHSITDLIYKCSRCLNFQSDKITSIANHYKVCKRNFLNHNEIPANDVEESINQQNSDIINIVYPAPDDNKISCPQCRKTYIGRQRHSALVSHFSDKHANKDFVFFCENCERPVTKIYHCMRVHYKNCIAAKGNVDLENDKCKGEKVGSCQQTTDCQCHRLIYRGSSMTTITCPVCKADFKGRSRHRIFAEHFRSSHNSMTYCYECEHCSTILSDNVKVVQGHYSVCARMVSAGYTIPRGKKRDANNSSLTSVLDDKSSSHILTSIASIKCVNESLLNIGPKYSPDGMSFISGQTVCENSTSTEQNASTNISFDNGCTSSVLIYPDHLKVTNNSSKSIVSNLTVHKFVDQVVSTMNQSNLSSQYGDDNLSDPDYVPNNSSDEFTNLDRCPEMYDNFSFLPAQAIEIITTELARPDLNHRYSNFLSRMLTNIATFRDAPSINDINCLMFDVTSYFRPRQVRFSPSTYDRAKKLGVVPLSFSRSSTCLMRSIAMMVFNNPVRWTWVAKDLIFHIERHKDYYTKLINTRTCIGLHLNDIIKQMKSNVFCSSDVVLQSAAEVYKSSFKIIGSEVEHDRLYFPEITNARIDRVHYLAEISKDHIVPCVLIKGSSKKSQKNLTRRRNRGLYFSNTKKLVKEIMGENHQIQCPLTPKEVQTHYTNIFKKDVSRVNVNAGNTRIKFHNYKQLASLISPEEVLTTIRNSPANASPGPDCITLTDLKKYDPHGCILAIIYNFCMSARYMPNSWRCHRSILLPKTGKLKFDDCELGKRSRDIDNWRPITVSSTIARTLHKLLLKRITNSFVFRSRQAAFSTSGCAKNIQLVQLFQKYCNQNMQPYCLAFLDVKSAFDTLDHDALFVALSNAGCPNFLLDYIRSSYDSCDTRFALKEGETNAVLIERGVKQGDPLSTFLFSVALDEALADLSPSSQGYEDENISISHTAYADDIVLFANDKHKMQSALDELNNRLRCYGLRFRPQKCFSLMSNFTGRLRNDSQKPFVNIENTAIPCSYRGYGIKYLGVFLFGGDTEEQYCNEIKAYLARLESSCLSPTQKVHILNDYLIPRITYRLSNSDLCVTAIERLNQFVRTTCKKILKIPHYINNGFIHLPPSLGGLGIRSLLFEALSPRLRACNWIEQQFPKLLSSSNHQRLFVLWKKHIRHDFDDNLSNAENFHKTLKEEWAKDLTQAAGLQILNDDFVVNDLCKFRYLTKPHRIFVDHVKMRVGLLPSRSVLHRIERSRDKACRHCGAFSETNLHAINECNYSTSAMVKRHDAVQGRFVHALRMRNEGRCAIYERNRIRSDNGEYFEPDLVIVNQAQKKAAIVDIAVAYETCRDKISLVQSTKETKYKLIVPAVARQHNINSNDVEVVGIVVGSRGTYNKHLLKRLAKFGLGRKTAHNLAVTAAEQSIRVFNYFTQRNSFYVRRNCASQAWRITNNAF

SEQ ID NO: 25256 - protein, 799 aa, Emydura subglobosa
MTVLMYKKGDREDPSNWRPISLCSTMYKLYASCLAARITDWAVRGGAVSPTQKGFMSCEGCYEHNFILQSALQTARRDRRRCAVAWLDLTNAFGSMPHQHIFTTLEEFGMPGDFIRLLRELYEGSTTTIRSTEGETAEIPIRRGVKQGCPLSPIIFNLAMEPLIRAASSNPGGFQVQGERVNILAYADDLVLMADDPKSLQDMLAVTSRAADWMGLHFNAKKCASLDVDGRQRAAVQATVFRIQDDPMTPLKEGQAYQHLGTPTGFRAQQTPEDTIKEILSDADKIDKSLLAPWQKINALNTFLIPRISFVLRGSAVAKVPLNKADSTIRRLVKGWLSLPMRASNELTYIGHKQGGANVMRMGDLCDIAVITHAFRLLTCPDTTVSSIATRALSQAVRKRIRQEPSKHDIATYLSGSLDDIFGRDACDITSLWSRARNATRRLGKRTGCRWTWCEERQELSVLIPRIKADGHTIVPPRARGMLERYLKASVHSLYVENLRKKPDQGKVFEVTSQWDASNHFLAEGKYTRFADWRFIHRARLNCLPLNGAIRFGNRDKRCRRCGYTNETLPHVICGCKPHSRAWQLRHNAVQNRLVKAIPARLGTVTVNSSIPGTNSQLRPDVTITDEEHKKIVMVDITVPFENRTPALLAARTNKEEKYAPLADTLREQGYLVQVHALIVGALGAWDPRNEPVLWACGVGRRYAQLMRRLMVSDAIRWSRDIYVEHITGHRQYQEEEAVEPPLEPAGPSDSSDPSGLVEGHTTRGRGGRATRGRGRGGRSSRRREDHRERRRDRPANRP

SEQ ID NO: 25257 - protein, 1608 aa, Podocnemis expansa
MGLLRDRQGGVAPLRRTTRAAALRAAFLCSARGSSARLVPAPTYAAAPRRRTPPPSSDMLRLSPAARVTQGSAPAIPVLTSSVSAPGEPASCDTTSTPAPSQPAGARDPTEEPALVGSRMITTLPASPETSAPTSCCEVAPDDIWASPPSSALLRAAVASLASTVPPQLISLAPVPAPAPAPAPDDATMEMSPPEDPLAALEVALQTLAMSTAHRTTGIGTSAPDPGGTSPPGPSGSRTGPTEAAPGAGRVPNTGHPAAAPPHRPSEPPLEAHWPPERPHEIRWWDSRLQGAGRRGRLAPPAGISLRSSRSDPCAHPTGRDPRRLPAHGHQTPQAHRDAARPPRGGHRRYRDQGRRCPGTPPPKRCCDELQRPTRHTLAPWDAPPGSPGSPPESTSGAEARPAQTPQGEEEEDFIYFSYPLTEETLRCPFCSPTRHFHLLGGTTRHLRNIHNKKVAFRCASCSKVIETQKQCKRHQKLCKGRLAPPGAAPPNLPPVASPPVAPPPAGTSPRPAPDPGRRGTPHPPTKVRPPPAPASRDAVAGGPTPVVTRALTTRAPASRPPPVTQEPARKEPGHRWPSDTTGPRLAALRPETRAPEPTHQQGANTPRTSNSDGALGTLPVPPTHHPSDGTHGRQDRGNPRAKRPSDGCPEPSLEESNEPPETRPATPWQLLWLEQLTAAESFDVFDPLVERLTQELAEEITAGKTPAQGTTSAPPRRPPANRGNDERGPRRRNQARRYDPAAASKIQKLFRANRTKAVREILEGPSPYCTIAPERLVAYFTEVFDRADPVTAEHPACVPPLPRVSEVGDLEADFTPQEVAARLARTKNTAPGKDGIRYGILKKRDPGCLVLLALFNRCKRLLRTPTAWKKAMTVLIHKKGERDDPGNWRPISLCSTMYKLYTSCLAARITDWAVAGGAVSPIQKGFMACEGCYEHNFLLQSALQTARRARRQCTVAWLDLANAFGSMPHQHIFSTLTEFGMPDSFIQLLRELYNGCVTTIRSTEGETAEVAIRSGVKQGCPLSPIVFNLAMEPLIRAVAQDPRGFQLHGEKVNILAYADDLVLIAEDPLHLQDMLDTTSRAADWIGLRFNAKKCASLHIDGRRKDPVQPSPFLIQGETMTPLKEGQAYQHLGTPTGFRVCQTPEDTIHEILQDAAKLDASLLAPWQKIAALNTFLIPRIAFVLRGSAGAKVPLNKADGAIRRLVKHWLFLPQRASNELTYIGHPQGGANVPRMGDLCDIAVITQAFHLLTCPDAQVMTVAASALHEAVQKRIARSPSGQDIATYLSGSLDGEFHRDGGDISSLWSRARVATRRLSKRLGCRWTWCEERQELSVLVPRISAPDNTIVPPSARGTLERTLKDAVHALYVETLKKKPDQGKVFELTSKWDASNHFLAEGSYTRFADWRFIHRARLNCLPLSGAVHHGNRDKRCRKCKYANETLPHVLCSCKPHSRAWQLRHNAVQDRLAKAIPARMGTIAINSSIPGTDSQLRPDLIITDVERKRVTMVDITIPFENRSPAFHAARIRKEEKYAPLADALRAKGYEVQVHALILGALGAWDPRNEDVLRACGIGWRYACLMRRLMVSDCIRWSRDIYIEHISAHRQYHVE

SEQ ID NO: 25258 - protein, 1644 aa, Platysternon megacephalum
MGKCPTTPQPLTPGGEPPTSPLPGAPCPVPLPQGLPGGPHRVLRPLPEVLESPCPMPWPTRSPGKPRRVAQLLLPEPLGDPDPTPQRPLPEPPGDPGPVPRLPPPEWPGEPRGVSPPPLNGDPGPTPRPPVQPGEPYYVLWPEQPGDPCPTPPLLLPEGLCRTFLPPLLWPGDHCPLPWLPLPQRPGEPRGVPGLPPPGPSGDSCREPQPPPLAAPGEPLDVFQQPGVCPPANAPLQTPRDLTADRRSLQPPRDASPVPLRSPTTPLAPQEPQPLRDDSLVLLRWPDTPPAPQQPPPPRGNPLQDTHISQELQPLGGTPSTPGTQLLLEDVHPPTSRATEDDQEGPNAPQNGCSTPDTVYLQYPVTTDALICPICLPPRRFTALQGLTRHLKRCHGLSTAFSCAPCSLPFESQKQCKKHQASCKKARTTTAPTPVPRHPVPQPAAPAPQRSRATLPTTAQKPTPAHALVNQGTAAGTTYTRARNNDRAPTNWNPFTPTQVARKLSELRRLSAPSNQSDPAPRRVSAPPCMVARDPTAGGTNADSRHTLRAPATRATNATPRPALRTSPTGGAGTTPQTAPHTATTGGPTTTARPQHQTPIARQTGTAPRDARPIPTTRRSHAPTATPRTTAARGSPDTAPAPTDPNQVAPPTSNATTPPAPMPRGPTERSPEPQTRLPVDQTANTVPTQAEEHEDLRPTTRPATPWQATWTAKLQAAASFEEFDLLIDRLTQELSAENASKRTPNQETTRPAFRRPAPNRGTSTRGTGRRNASHRYDPAAASRIQKLYRTNHFKAVREVLDGPTPYCTIPTGRLYHYFLGVFGGTPENDAQRPECLRPLPRIANADGLEADFTPKEVTARLSRTKNTAPGKDGIPYSLLKKRDPGCLVLSGIFNLCRRFGRSPTSWKKAMTVLIHKKGERDDPSNWRPISLCSTMYKLYASCLAARITEWATTGGAISPAQKGFMPSEGCYEHNFLLQTVLQTTRRVRKQCAIAWLDLANAFGSIPHHHIFSTLREFGMPETFLHLIRELYEGCSTTIRSVEGETAEIPIRSGVKQGCPLSPIIFNLAMEPLLRAISDGTDGFDLHDERVSILAYADDLVLTADDPERLQGMLDTIGRAADWTGLRFNAKKCASLHVDGNKRDSVLTTEFLVQGEPVVPLAEGQAYQHLGTPTGFRVRQTPEDTIREILQDAAKIDASLLAPWQKINALNTFLIPRIAFVLRGSAVAKVPLNKADNTIRQLVKKWLSLPQRASNEIVYIAHRHGGANVPRMGDLCDIAVVTHAFRLLTCPDATVKNIATTALRAATTKLIGRAPSDQDAATFLSGSLDGEFGRFRGDFASLWTRARNATRRLGKRLGCRWVWSEDRQELGVLIPRIETEGNTFINPGARGMLEKSLKAAVRALYVDTLRKKPDQGKAFEVTSKWDSSNHFLPSGSFTRFADWRFIHRARLNCVPLNGAVRHGNPDKRCRKCGYAMETLPHVLCSCRPHGRAWQLRHNAVQDRLVKAIAPHLGEITVNRAIPGTDSLLRPDIVITDEDRKKIILVDVTVPFENRTTAFRQARARKIEKYAPLADTLRAKAYEVYNDALIVGALGAWDPLNERVLRTCGVGRRYARLMRRLMVSDTIRWFSDIYTEHVTGHRQYLE

SEQ ID NO: 25259 - protein, 735 aa, Cuora mccordi
MTVLIHKKGERDDPSNWRPISLCSTMYKLYASCLAARITEWATTGGAISPAQKGFMPSEGCYEHNFLLQTVLQTTRRERKQCAVAWLDLANAFGSIPHHHIFNTLQEFGMPETFLHLIRELYDDCSTTIRSVEGETAEIPIRSGMKQGCPLSPIVFNLAMEPLLRAISDGADGFDLQDERVSILAYADDLVLIADDPERLQGMLDTIRRAADWTGLRFNAKKCASLHVDGNKRDSVLTMEFLIQGESVVHLAEGQAYQHLGTPTGFRVRQTPEDTIREILQDAAKIDASLLAPWQKINALNTFLIPRIAFVLRGSAVAKVPLNKADNTIRQLVKKWMSLPQRASNELVYITHRHGGANVPRMGDLCDIAVITHAFRLLSCPDAKMKNVATAALRAATAKRIGRPPSDRDVATFLSGSLHGEFSQDSGDIASLWTRARNATRRLGKRLGCRWVWSEERRELGVLVPRIGTEGNTIVSPGARGMLEKSLKAAVHALYVDTLRKKPDQGKAFEVTSKWDSSNHFLPAGSFTRFADWRFIHRAWLNCVPLNGAVRHGNRDKRCRKCGYAMETLPHVLCSCKPHARAWQLRHNAVQDRLVKAIAPHLGEITVNRAIPDTDSPLRPDIVVTDEDRKKIILVDVTIPFENRTTAFREARARKLEKYAPLADTLRSKGYEVYADALIVGALGAWDPCNECVLRTCGVGRRYARLMRRLMVSDTIRWSRDIYTEHITGHRQYRE

SEQ ID NO: 25260 - protein, 1240 aa, Podocnemis expansa
MTHQTHPRPPGRPPPGSPGSSPGTARGTGARPVQAPQGEEGDFIYFSYPLTEETLRCPLCSPTRHFHLLGGTTRHLRNIHNKKVAFRCASCSKAIETQKQCKRHQKLCKERLAPPGAAPSHLPPVASPPVTPPPAGTSPRPAPVPGRRGTPHPPPKARPPPAPASRDAVAGGPTPVMARALTTRAPSSRPSPITQEPARKEPSHGRPSNTAGPRMADLRPETRAPEPTHQQGANTTRTPNSGSSHGAPGAPPVSTTHRLSDGPHGRQDRGNPRAKRPSDGCPEPPPEESNEPPETRPATPWQLLWLEQLAAAESFDVLDPLVERLTRELAEEITTGKTPAQGTTSAPPRRPPANRGNDGGGPRRRNQARRYDPAAASKIQKLFRANCTKAVREILDGPSPYCTIAPERLVAYFTEVFDRADLVTPERPACVPPLPRISEIGDLEADFTPQEVTARLARTKNTAPGKDGIRYGILKKLDPGCLVLSALFNRCKRLLRIPTAWKKAMTVLIHKKGERDDPGNWRPIALCSTMYKLYTGCLAARITDWAVAGGAVSPVQKGFMACEGCYEHNFLLQSALQTARRARRQCTVAWLDLANAFGSMPHQHIISTLTEFGMPDSFIQLLRELYDGCVTTIRSTEGETAEVAIRSGVKQGCPLSPIVFNLAMEPLIRAVAQDPRGFQLHGEKVNILAYADDLVLIAEDPLHLQDMLDATSRAADWIGLRFNAKKCASLHIDGRRKDPVQPSPFLIQGETMTPLEEGQAYQHLGTPTGFRVCQTPEDTIHEILQDVAKLDASLLAPWQKIAALNTFLIPRIAFVLRGSAVAKVPLNKADGAIRRLVKRWLFLPQRASNELTYIGHRQGGANVPRMGDLCDVAVITQAFRLLTCPDAQVKTVAARALHEAVQKRIARPPSGQDIATYLSGSLDGEFHRDRGDISSLWSRARVATRRLGKRLGCRWTWCEERQELSVLVPRISAPDDTIVPPSARGTLERTLKDAVHALYVETLRKKPDQGKVFELTSKWDASNHFLAEGSYTRFADWCFIHRARLNCLPLNGAIHHGNRDKRCRKCGYVNETLPHVLCSCKPHSGAWQLRHNAVQNRLAKAIPARLGTVAINSSIPGTDSQLRPDLVITDEERKRVIMVDITIPFENQSPAFHAARIRKEEKYAPLADTLRAKGYEVQVHALILGALGAWDPHNEDVLWACGIGWRYARLMRRLMVSDCIRWSRDIYVEHISGHRQYHVE

SEQ ID NO: 25261 - protein, 1608 aa, Emydura subglobosa
MAALATLRPVKPAAPSPSLSTPLYSSAPEDPAAHTPVPPRSLSSDRSPPPRNSSGGTAPAATSLPSSPAPPSPRNSPQDPASSPDDFIVSRKGAPKKSVCALRTTRKANGTSSGPAPPPRSDAAAGSRPTREAAQGARAKVFAMLDYLQEIDDPEPPAATSPTAWVPDARAPLPTPADTSNAAGNHPPPGTSETGEPPPAPEVVITGDRILLSYPLSRASLTCPICLPARAFRDLGGVTRHLKKIHQKRLAFRCALCDLPFEAQKTCKSHQRTCHGVPAPQGPTSNPSRPTTAPRPTRAAPTPPIAPAPAPQPPAPVPRWETEPRQPATRRSTPGPATQVPAARSGPTSKTAPGQGGSSESPAPASRIASDSHILRRVSAPERPPLRRDLVPVRGASAPSATSLQRRAPAGPSPSVKAAARAPAARLLPAAPETTREEPSCGRPSHTRGSLPPLGAPPGPRARVPLSIVSRRSSSTRPVASDGRAPSLTSTPPEVPPRRRSVPASRPLPAAPEATRAQPSQRRPSGPRGSPPLGRAPPGPGARPSPPVLPPRRSSSTRPPLSDNQASRVTSTPPDVSTRRPRDRVPERPEEAGPPDAQPDPPAVADQGEPRPNPRPATPWQLLWRERLEAAESFSDFDRLVDELTEEMAAEIAAGKPDQGSAPGPRREPANRDDPGKAPARGNANRRYDPAAASRIQKLYRANRVKAMREVLDGPSAFCQIPSGRLFAYYKGVFDRADPPSGERPACVAPLPRVVDADDLQAAFAPGEVASRLSRTKNTAPGKDGIRYGFLKKKDPGCLVLSTLFERCRQFRRTPTSWKKAMTVLVYKKGERDDPSNWRPISLCSTIYKLYASCLAARITDWAVGGGAVSPVQKGFMSCEGCYEHNFILQSVLETARRDRRRCVMAWLDLANAFGSMPHRHVFATLEEFGMPGDFLQLLRELYDGCTTTIRSTEGETAEIPIRSGVKQGCPLSPIIFNLAMEPLIRAVANDPRGFELHGEKVNILAYADDLVLMAEDPESLRGMLAATSQAADWMGLRFNAKKCASLDVDGANKASVQATSFRIQGDPMIPLEEGQAYQHLGTPTGFRVRQTPEDTIQEILRDASSIDASLLAPWQKINALNTFLIPRISFVLRGSAVAKVPLNKADRVIRQLVKGWLFLPQRASNELTYIGHKQGGANVPRMGDLCDIAVITQAFRLLTCPDATVSGIAAKALEKAVAKRIRRAPTSDDIATYLSGSLDGEFAQDGGDISSLWSRARNATRRLGKRLGCRWTWCEERRELSVLVPRIRVDGHTIVTPRARCMLERCLKASVHALYLESLKKKPDQGKAFEVTSKWDASNHFLAGGGYTRFADWRFIHRARLNCLPLNGAIRHGNRDKRCRRCGYVNETLPHVLCGCKPHSRAWQLRHNAVQDRLAKAIPAHRGSVAVNCTIPGTDSPLRPDIVITDEDRKKIVMVDVTVPFENRSPAFHAARARKEEKYAPLADTLRERGYDVQIHALIVGALGAWDPRNEPVLWACGVGRRYAKLMRRLMVSDSIRWSRDIYIEHVTGHRQYQEERDGAPPQDSASGPADPTDDHHDRRGGRRGGRRGGGHTNGRGGGHTNGRGGC

SEQ ID NO: 25262 - protein, 735 aa, Gopherus evgoodei
MTVLIHKKGERDDPSSWRPISLCSTMYKLYASCLAARITEWATAGGAISPAQKGFMPSEGCYEHNFLLQTVLQMTKRARKQCAIAWLDLSNAFGSIPHHHIFSTLRELGMPETFLGLIRELYEDCSTTIRSVEGETAEILIRSGVKQGCPLSPIIFNLAMEPLLRAISDRADGFDLHGERVSILAYADDLVLIADVPERLQSMLNTIGGVADWTGLRFNAKKCASFHVDGSMKDSVQATEFQIQGESVIPLADGQAYQHLGTPTGVRVRQTPEDTIRVILQDAAKIDASLLAPWQKINALNTFLIPRIAFVLRGSAVAKVPLNKADTTIRRLVKQWLSLPQRASNELIYIAHRHGGANVPHMGDLCDIAVVTHAFCLLTCPDATVKNVAAAALRTVIEKRIGRPPSGPDVATFLSGSLDGEFARDGGDIASLWSRARNATRRLGKRLGCRWVWSEERLELGVLVPRIEAEGNTIVSPGARGVLEKSLKAAVRALYVDTLRKKPDQGKAFEVTSKWDSSNHFLPAGSFTRFADWRFIHRARLNCVPLNGAVRHGNRDKRCRKCGYALETLPHVLCSCKPHARAWQLRHNAVQDQLVKAIAPHLGEIAVNHTIPDTDSLLRPDIVVTDEERKKIILVDVTIPFENRTPAFHEARARKLEKYAPLVDTLRAKGYEVYTDALIVGALGAWDPCNEQVLRACGVGRHYARLMRRLMVSDTIRWSRDIYTEHITGHRQYQE

SEQ ID NO: 25263 - protein, 1016 aa, Chelonoidis abingdonii
MATTAHKRSSATPTPTSPNQVPPSTNNGATPAVTVPQDPTDSPPEPQVRQSADHAANPPPAPVEGTEDRRPKDRPATPWQAAWIGELQAAASFGDFDSLIDKLTHELSAEAASGRTPNQVATQPALRRPAPNHAATSRGTRRRNTNRYDPAAASKIQKLYRTNRPKAMREVLDGPPSYCTIPPERLYSYFLGVFGGTPRNDAPRPECLGPLPHLTDSDNLEADFTPQEVAARLSRTKNTAPGKDGIPYSLLRKRDPGCLVLSSIFNLCRRFGRSPTSWKKAMTVLIHKKGERDDPSNWRPISLCSTLYKLYAGCLAARITEWASTGGAISPAQKGFMPSEGCYEHNFLLQTTLQMAKRARKQCAIAWLDLSNAFGSIPHHHIFNTLREFGMPETFLCLIRDLYQHCSTTIRSVEGETAEIPIHSGVKQGCPLSPIIFNLAMEPLLRAISDGADGLDLHGERVSVLAYADDLVLIADDPERLQGMLDTMGRAADWTGLRFNAKKCASLHVDGSQRDSVLATEFQIQGKPVVPLAEGQAYQHLGTPTGVRVRQTPEDTIREILQDAAKIDASLLAPWQKINALNTFLIPRIAFVLRGSAVAKVPLNKADNTIRQLVKKWLSLPQRASNELIYIAHRHGGANVPRMGDLCDIAVITHAFRLLTCPDTTVKSVAATALHATTEHRIGRPPSGQDVATFLSGSLDGEFGRDRWDTASLWSRARDATRRLGKRLGCRWVWSEERQELGVLVPQIGTEGSITVSPGARGVLERSLKAAVHALYVDTLRKKPDQGKAFEVTSKWDSSNHFLPAGSFTRFADWRFIHRARLNCVPLNGAVRHGNRDKRCRKCGYTLETLPHVLCSCKPHARAWQLRHNAVQDRLAKAIAPHLGEIAVNRTIPGTDSPLRPDIVVTDEERKKIILVDVTIPFENRTPAFREARARKLEKYAPLTDTLRAKGYEVYTDALIVGALGAWDPWNERVLRACGVGRRYARLMRRLMVSDTIRWSRDIYIEHITGHRQYQE

SEQ ID NO: 25264 - protein, 1531 aa, Cuora mccordi
MPPEEPPRLRTKRLITTPPPEKDAAGGAPQMTQNQDVDGRHARKDTAGGAPPTTEDQDADRRTTWKDAAGGAPQMVEDQDADRYPARKDDTGGAPQRTEDRVAEQCPARKNATGGAPQMTRDQDVVRCPAAPERDAPEGTTSSTGDSETSYHLPVRRRAARRGMASRALDLNATRCPSRQRDIVASEPSTPPEATSPPEVSPPDPEESPGESTGRTVVHPTEGEAGDDDHIYLQYPLPTGLLLCPFCLPVHGVQTLGALSKHVRKTYKKRIAFRCSRCNAPFETQKKCKSHHAAWKGRPPITKVNPADVLRAPTPTPTNDAASARQPASPPPRQVRGDQPPAAAQKPSPVPGPVDQGPVVRIAPIPAGNVAQAPASRRPVTSSQVARKLSELRRLSASSKTNQCDPTPRRISAPPHMSAQDLASGGTSAGPRSTLRAPATRGANSTRQPAPRTPPVGGTGITPQSAPHTSTVRGANATNRPQHRIHIDRRAATAPKVTRPIPVARRSRALTATPQMTAASGRPGVTPAPTDPTQVPPTTSNDATPPVTIPRGPTGRSPEPQARQPADHAANSLPTPAEEPEDQQPTVRPATPWQAAWIEELQAAASFEEFDPLIDRLTHELSAEIASKRTPIQETSRPAFRRPVPNRDTSTRGTGRRNASHHYDPATASRIQKLYRTNRLKAVREVLDGPPSYCTIPPERLYSYFLGVFGGVPRNGAQRLECLCPLPRVTNADDLEAAFTPKEVTARLSRTKNTAPGKDGIPYSLLKKRDPGCLVLSTIFNLCRRFGRSPTSWKRAMTVLIHKKGERDDPSNWRPISLCSTMYKLYASCLAARITEWATTGGAISPAQKGFMPSEGCYEHNFLLQTVLQTTRREQKQCAVAWLDLANAFGSIPHHHIFNTLQEFGMPETFLHLIRELYDGCSTTIRSVEGETAEIPIRSGVKQGCPLSPIVFNLAMEPLLRAISDGADGFDLQDKRVSILAYADDLVLIADDPERLQGMLDTIGRAADWTGLRFNAKKCASLHVDGNKRDSVLTTEFLIQGESVVPLVEGQAYQHLGTPTGFRVRQTPEDTIREILQDAAKIDASLLAPWQKINALNTFLIPRIAFVLRGSAVAKVPLNKTDNTIQQLVKKWMSLPQRASNELVYITHRHGGANVPRMGDLCDIAIITHAFRLLSCPDAKVKNVATAALRAATAKRIGRPPSDRDVATFLSGSLDGEFSRDGGDIASLWTRAHNATRRLGKRLGCRWVWSEERRELGVLVPRIGTEGNTIVSPGARGVLEQSLKAAVHALYVDTLRKKPDQGKAFEVTSKWDSSNHFLPAGSFTRFADWRFIHRARLNCVPLNGAVRHGNRDKRCRKCGYAMETLPHVLCSCKPHARAWQLRHNAVQDRLVKAIAPHLGEIAVNRAIPDTDSPLRPDIVVRDEDRKKIILVDVTIPFENRTTAFREARARKLEKYAPLADTLRSKGYEVYADALIVGALGAWDPCNERVLRTCGVGRRYARLMRRLMVSDTIRWSRDIYTEHITGHRQYQE

SEQ ID NO: 25265 - protein, 1592 aa, Podocnemis expansa
MAAIIDPGISPGPAQKVAPLRRTTRAAALRAAFLCTAGGSSQRLAPASAYTAAPQRRTPPPPSSDVLRLSPKFPAAARATQGTAPATPVLICSISAPSKPASCDATSTPAPFQPAGAWDPTGESALAGSRMITILPASLETSAPTSCCEVAPDDTWASPPSSALLRAAVASLASTVPPQLASLAPVPAPAPAPAPDDSTMELPPPEDPLAALEAALQALAMSTTPSQVPNAGTLGTSVPSSGSRDPNATDPGSLETTSRDIETRVNAVLSSLHQRDSPMNDRVSGPADQGKPTTASTQEPGDPEDRIRLTYPFVKDELRCLICRPIREYHLLHSFTRHLDKIHDKGVAFRCGTCNLPFSTLKKCKLHYVSCAKQKTNTDGCHLAPKEPGNPRQRSPQPGSSSWVPSLTAQQASTWKLPQGSTPHCPAGRGSIPCLEPRTANIDPTAPASLSSRPCPAARPPPRAPSRIPVSRRLSMPGRQPDQLDPSSRRTSAPAQMPAVSSASRPSSTTSHSSQPPPAAKMNPLGPESRPPASTSPERGSIPGPLATPAEPDRAGSNYERPNVVQELQHPSSSSERPRDHSARADPPQGADSHREIRDENPAPLINNSPTEPTPERPEEGGAGEACPPDTQPNSAMLDPPDLQQPASRHPTPWQMLWLEQLRAASSFNDLNPLADKLVQELSAEVTARRETNQGGSSSARRPPPGNQRSRYAPRGCNTRHRYDPAAASRIQKLYRSNRTKAMREILDGASSYCTIPPESLFSYFSDLFDRVTLTTTRRPDCVPPLPQLDGTKDLDMDFTPREVMARLARSKNTAPGKDGIPYSILKKQDPGCLVLSALFNRCKEFRRTPEAWKKAMTVLIYKKGERDDPSNWRPISLCSTIYKLYVSCIAARITDWAVSKGAISSVQKGFMSCEDCYEHNFILQTAIQTARRSRKQCAMAWLDLANAFGSIPHCHIFATLQEFGLPNTILQMLQEIYEGCTTTIRSVEGETAEIPIRRGVKQGCPLSPIIFNLAMEPLIRAIANGPGGLELHGERVSILAYADDLVLIADNPARLQDMLHTASLIANWMGLRFNARKCASLHIDGSTKDGVLPTPFLIQGEPVICLEEGQAYQHLGTPTGFRVQQTPADTIHSILQDAAKIDSSLLAPWQKINALNTFLIPRIVFVLRGSAVAKVPLNKADSTIRRLVKKWLFLPVRASNELIYIGHKQGGANVPCMGDLCDIATITHAFRLLTCPDPMVRNIARNSLHEVTTKRLKRSPSSADIATYLSGSLEGEFGQDRGDIASLWTRARIATRRLGKCIGCRWSWCEERQELSVVVPSIRTEGSFIVTPKGRGMLERILKAAVRALYVADLKKKPDQGKVFELASKWDASNHFLQDGSFTRFSDWRFIHRARLNCVPLNGAIRHGHRDKRCRKCGHSNETLPHVLCSCKPHSRAWQLRHNTIQDRLVRAIPPLLGEVTVNRTIPGTDSLLRPDVVITNEELKKIIMVDITVPFENRSAAFFAARARKVDKYTPLADSLRSKGYQVQTHALIVGALGSWDPANEDVLRACGVGRRYSRLMRRLMVSDTIRWSRDIYIEHITGHRQYQEA

SEQ ID NO: 25266 - protein, 1368 aa, Cuora mccordi
MTPLFSNDGRTHLLHPSNPRRRGATPCRTPTPPRNLSPWEEPQVLPGHSYCWRMPPTTTSHAMEDDQEGPNAPQNGCPTPDTVYLQYPLATDALICPICLPPRRFTRIGGLTRHLKRCHGLSTTFSCALCSLPFESQKKCKAHQTSCKKARTTATPAPVSRHPGPQPTAPAPQSARATLPTATRTPTPAPELVDQGAAARTTTTTARNTDRAPTNWNPFTSTQVARKLSELRHLSAPSNQSDTAPRRVSAPPRVTTRDPAAAGTNAGSQHTLRAPATRVTNATPQPALRTSPTGGAGTTPQTAPHTTTNGGPTATTGRQQQTPIARQTGTAPRDARPIPTTRRSDAPTATPQMTAARGSPGTDPTPTGPNQVTPSTSNATAPPGPMPQEPTERSPEPQTRPPINQTADTLPTQAEEHEDRRLATSPATPWQTTWIEKLQAASSFEEFDLLINRLTQELSAETAPRRTPNQETTRPAFRRPAPNRGTSTRGTGRRNASRRYDPAAASRIQKLYRSNRLKAIREVLDGPPSYCPIPPERLYRYFLGVFGGMPRNDAQRPECLRPLPRVANADGLEADFTPKEVSARLSRTKNTAPGKDGIPYGLLKKRDPGCLVLSGIFNLCRRFGRSPTSWKKAMTVLIHKKGEREDPSNWRPISLCSTMYKLYASCLAARITEWATTGGAISPAQKGFMPSEGCYEHNFLLQTVLHTTRRERKQCAIAWLDLANAFGSIPHHHIFSTLREFGMPETFLRLIRELYEGCSTTIRSVEGETAEIPIRSGVKQGCPLSPIIFNLAMEPLLRAISDGTDGFDLHDERVSILAYADDLVLTADDPERLQGMLDTIGRAADWTGLRFNAKKCASLHVDGSKRDSVLTTEFLVQGEPVVPLAEGQAYQHLGTPTGFRVRQTAEDTIREILQDAAKIDASLLAPWQKINALNTFLIPRIAFVLRGSAVAKVPLNKADNTIRQLVKKWLSLPQNASNELIYIAHRHGGANVPRMGDLCDIAVVTHAFRLLTCPDTTVKNIATTALRDVVKKRIGRPPSDQDVATFLSGSLDGEFARDGGDIASLWSRTRNATRRLGKRLGCRWVWSEDRRELGVLVPRIETEGNTFINTGARGALEKSLKAAVHALYVDTLKKKPDQGKAFEVTSKWDSSNHFLPSGSFIRFGDWRFILRARLNCVPLNGAIRHGNPDKRCRRCGYAMETLPHVLCSCRPHGRAWQLRHNAIQDCLVKAIAPHLGEIAVNRAIPGTDSLLRPDIVITYEDRKKIILVDVTIPFENRTTTFRQARARKLEKYAPLADTLRAKGYEVYTDALIVGALGAWDPLNERVLRTCGVGRRYARLMRCLMVSDAIRWSRDIYTEHVTGHRQYQE

SEQ ID NO: 25267 - protein, 1132 aa, Terrapene carolina
MSNQRNPIPRRVSAPPRMAARNPASRGTDVGPQTTLRTPTTGRANATPQPAPRTPPAEVMGSTHQLAPQTAAARGANATTRPQHQTPTVGRTGTAPEAARPIPATRRSHAPTTTPQMTAAHGRPGITPAPIDPVQLPPTTSNDSTPPATAPRDPTERSPDPRARQPTDRATNSLPTPTEEPEDQRPKTRPATPWQATWIEELQATASFSDFDPLIDRLTRELSAEIAFRRTPNQETTRPAPRRPAPHRDTNTRGAGRRNTGRRFDPAAASRIQKLYRTNRLKAVREVLDGPPSYCTIPPERLYNYFHGVFGGVPRNDAQRPECLRPLPRITDTDALEADFTPQEVTARLSRTKNTAPGKDGIPYSLLKKRDPGCLVLSSIFNQCKRLGRSPTSWKKAMTVLIHKKGERDDPSNWRPISLCSTMYKLYASCLAARITEWATTGGAISPAQKGFMPSEGCYEHNFLLQTVIQTARRTRKQCAIAWLDLANAFGSIPHHHIFDTLQEFGMPEAFLHLIRELYEGCSTTIRSVEGETAEIPIHSGVKQGCPLSPIVFNLAMEPLLRAISDGTDGYDLHGERVSVLAYADDLVLIADDPERLQGMLNTIGRAADWTGLRFNAKKCASLHVDGSKRDPVLMTEFLIQGESVVPLAEGQAYQHLGTPTGFRVRQTPEDTIREILQDAAKIDTSLLAPWQKINALNTFLIPRIAFVLRGSAVAKVPLNKADKTIRQLVKNWLSLPRRASNELIYINHRHGGAGVPRMGDLCDIAVVTHAFRLLTCPDTKVKNVATTALHAATEKRIGRPPTDRDVATYLSGSLDGDFARDRGDFASLWSRARNATRRLGKRLGCRWEWNEERQELGVLIPRIGTEDNTIVAPGARGVLERSLKAAVHALYVDTLKKKPDQGKVFEVTSKWDSSNHFLPTGSFIRFADWRFIHRARLNCVPLNGAIRHGNRDKRCRKCGYVNETLPHVLCSCKPHASAWQLRHNAVQDRLVKAINPRLGEVTVNRTVPGTDSPLRPDIVVTDEVGKKIILVDVTIPFENRTPAFREARARKLEKYAPLADALRSKGYEVHTDALLVGALGAWDPCNERVLRTCGVGRHYARLMRRLMVSDTIRWSRDIYTEHITGHRQYQE

SEQ ID NO: 25268 - protein, 1073 aa, Terrapene carolina
MGSTRQLAPQTAAARGANATTRPQHQTPTVGRTGTAPEAARPIPAARSSHVPTTTPQMTAARGRPGITPAPIDPVQFPPTTSDDSTPPATTPRDPTERSPDPQARQPTDHATNSLPIPTEEPEDQQPKTRPATPWQAAWIEELQAAASFTEFDHLTDRLTRELSAEIAFRRTPNQETTRPAPRRPAPHRDANNRGAGRRNTGRRFDPAAASRIQKLYRTNRLKAVREVLDGPPSYCTIPPERLYNYFHGVFGGVPRNDAQRPECLRPLPRITDADALEADFTPQEVTARLSRTKNTAPGKDGIPYSLLKKRDPGCLVLSSIFNLCKRFGRSPTSWKKAMTVLIHKKGERDDPSNWRPISLCSTMSKLYASCLAARITEWATTGGAISPAQKGFMPSEGCYEHNFLLQTVIQTTRRTRKQCAIAWLDLANAFGSIPHHHIFDTLQEFGMPEAFLHLIRELYEGCSTTIRSVEGETAEIPIHSGVKQGCPLSPIVFNLAMEPLLRAISDGTDGFDLHGERVSVLAYADDLVLIADDPERLQSMLDTIGRAADWTGLRFNAKKCASLHTDGSKRDPVLMTEFLIQGESVVPLAEGQAYQHLGTPTGFRVRQTPEDTIREILQDATKIDTSLLAPWQKINALNTFLIPRIAFVLRGSAVAKVPLNKADKTIRQLVKNWLSLPRRASNELIYIKHRHGGAGVPRMGDLCDIAVVTHAFRLLMCPDTKVKNVATTALHAATEKRIGRPPTDRDVATYLSGSLDGDFARDRGDFASLWSRARNATRRLGKRLGCRWEWNEERQELGVLIPRIGTEDNTIVAPGARGMLERSLKAAVHALYVDTLKKKPDQGKAFEVTSKWDSSNHFLPTGSFTRFADWRFIHRALLNCVPLNGAIRHGNRDKRCRKCGYVNETLPHVLCSCKPHARAWQLRHNAVQDRLVKAIDPRLGAVTVNRTVPGTDSPLRPDIVVTDEVGKKIILVDVTIPFENRTPAFREARARKLEKYAPLADALRSKGYEVHTDALLVGALGAWDPCNERVLRTCGVGRRYARLMRRLMVSDTIRWSRDIYTEHITGHRQYQE

SEQ ID NO: 25269 - protein, 858 aa, Trachemys scripta
MYRTNRLKAVREILDGPPSYCTIPPERLYNYFFGVFGGVPRNDAQRPECLRPLPRIPDADGLEADFTPKEVTARLSRTKNTAPGKDSIPYSLLKKRDPGCLLLSNIFNLCKRFGRSPTSWKKAMTVLIPKKGERDDPSNWRPISLCSTMYKLYASCLAARITEWATTGGAISPAQKGFMPSEGCYEHNFLLQTVIQTTRRTRRQCSIAWLDLANAFGSIPHHHIFDTLQEFGMPETFLHLIRELYEGCSTTIRSVEGETAEIPIHSGVKQGCPLSPIVFNLAMEPLLRAISDGADGFDLHGERVSVLAYADDLVLIADDPERLQGMLDTIGRAADWTGLRFNAKKCASLHVDGSKRDSVLLTEFLIQGESVVPLAEGQAYQHLGTPTGFRVRQTPEDTIGEILQDAAKIDTSLLAPWQKINALNTFLIPRIAFVLRGSAVAKVPLNKADNAIRKLVKNWMSLPRRASNELVYIKHRHGGAGVPRMGDLCDIAVLTHAFRLLTCPDATVKNVATTALHAATEKRIGRPPSDRDVATFLSGSLDGDFARDRGDFASLWTRARNATRRLGKRLGCRWEWNEERQELGVLIPRIGTEDNIIVTPGARGVLERSLKAAVHALYVDALKKKPDQGKVFEVTSKWDSSNHFLPTGSFTRFADWRFIHRARLNCVPLNGAIRHGNRDKRCRKCGYANETLPHVLCCCKPHARAWQLRHNAVQDRLVKAINPRLGEIAVNRTVPGTDSPLRPDIVVTDEVGKKIILVDVAIPFENRTPAFREARARKLEKYAPLADTLRTKGYEVHVDALLVGALGAWDPCNERVLRTCGVGRHYARLMRRLMVSDTIRWSRDIYTEHITGHRQYQE

SEQ ID NO: 25270 - protein, 1602 aa, Podocnemis expansa
MTAAMDHGSSLGQAEGVAPLRRTTRAAALRAAFLRSARDSSERLAPAPPHAAAPRRRTPPPPSDVPRLSSATHVTQGTAPALPVLTSSVPAPGEPASCDPASTPAPPQPAGAWDPTEEPALAGSRMLTTPPASPGTSAPTSSCCEVAPDDIWASPPSSALLRAAVASLASSVPPQLVPLAPVPAPVPDDATMERSPPEDPLAALEVALQTLAMSTAHRTAGIGASAPDPGGTSPPGRSGNRTSPTEAAPGADQVPNAGHPAAAPPWKPTDRRNSPTRSDGGTADSRELAAGVSSPPPPGSPSAPATATCTPTPPDKIHAASPPAATGHHRPAVMQPGPPGVGTGDIETRVAAVLEHLRQNAAAMNSDDPPDPPSPPETPPGSPGSSPGTASETRARPAQAPQGKEGDFIYFSYPLTEETLRCPLCFPTRHFHLLGGTTRHLRNIHNKKVAFRCASCSKAIATQKQCKRHQNHCKKRLAPPGAAPPHLPPVASPPVTPPPAGTSPRPAPDPGKRGTPHPPTKARPPPAPASRDAVAGEPTPVATRALTTGVPASRPPPVTQEPARKEPGHRRPSDSTGPRLAALRPEPRAPEPNHQQGANTPRTSNSDGAHGTLPVPPTRHPSDETHGRQDRGNPRAERPSDGCPEPPPEESNEPPEARPATPWQILWLEQLAAAESFDVFDPLVERLTQELAEEITTGKTPAQGTTSAPPRRPPANRGNDERGPRRRNQTRRYDPAAASKIQKLFRANRTKAVREILEGPSPYCAIAPERLVAYFTEVFDRVDPVTVERPACVPPLPRISEVGDLEADFTPQEVAARLARTKNTAPGKDGIRYGILKKLDPGCLVLSALFNRCKRLLRIPTAWKKAMTVLIHKKGERDDPGNWRPIALCSTMYKLYTGCLAARITDWAVAGGAVSPVQKGFMACEGCYEHNFLLQSALQTARRARRQCTVAWLDLANAFGSMPHQHIFSTLTEFGMPDSFIQLLRELYDGCVTTIRSTEGETAEVAIRSGVKQGCPLSPIVFNLAMEPLIRAVAQDPRGFQLHGEKVNILAYADDLVLIAEDPLHLQDMLDATSRAADWIGLRFNAKKCASLHIDGRRKDPVQPSPFLIQGETVTPLEEGQAYQHLGTPTGFRVCQTPEDTIHEILQDVAKLDASLLAPWQKIAALNTFLIPRIAFVLRGSAVAKVPLNKADGAIRRLVKRWLFLPQRASNELTYIGHRQGGANVPRMGDLCDVAVITQAFRLLTCPDAQVKTVAARALHEAVQKRIARPPSGQDIATYLSGSLDGEFHRDRGDISSLWSRARVATRRLGKRLGCRWTWCEERQELSVLVPRISAPDDTIVPPSARGTLERTLKDAVHALYVETLRKKPDQGKVFELTSKWDASNHFLAEGSYTRFADWRFIHRARLNCLPLNGAIHHGNRDKRCRKCGYINETLPHVLCSCKPHSGAWQLRHNAVQNRLAKAIPARLGTVAINSSIPGTDSQLRPDLVITDEERKRVIMVDITIPFENRSPAFHAARTRKEEKYAPLADALRAKGHEVQVHALIVGALGAWDPHNEDVLRACGVGWRYARLMRRLMVSDCIRWSRDIYVEHISGHRQYHVE

SEQ ID NO: 25271 - protein, 2226 aa, Emydura subglobosa
MDFIASKTLRKKTERTITPAAARRRTEDPQRRPRGAADFPPFAGSRPASDASLPAAVPASLAARVPSASSTRPATASRISTHPPRIQKKPEPGPSAASQRTTPARVRRAAPASSAPHAAAASAAPETTGAGHAAATSPAPPSTLHAVPAAAPEASSAPRRATAIAATDAATPEIAGARPAAAATAAPASPAFPSAPHAAPATADHAAISTAAAAAAALETAGACPAAATASPPRERAAGVAASSPFLPPSLLGSWDAVPTAWSSASCSRPAPTVPASAATAAAQATQEVGPEAAAAHAACSEACISHPLAAAAVATAAPGSAGSCPAAAASPAGKPAAGVAASPALLLPALLSSWVGVSTAWSSASFSPPARVAAPPPGGPAAGAAASPLPLLLSPCSSWDAAPPAGGSGSGARPAPTLPRGDGPEAAAASAAGSEARISRPPAAGATAAPGPADHGPATTAASPAGEPAASPASLPPSLFSPWNAVRTAWNSASFSPPALVAAPPPGGTAAGAAAYPLPLFLSPCSSWDVAPPAGGLGPGARPATTPPSRAGTDTAAAPAAGSEACTARPPAAPAAAAPGSSGSCPAAGAASPPRDLAACAATPRSPPLSPTLLSLRMAALATLRPVKPAAPPPSLSTPLYSSAPEDPAAHTPVPPRSLFSDRSPPPRNSSGGTAPAATSLPSSPAPPSPRNSPQDPASSPDDFIVSRRGAPKKSVCALRTTRKANGTSSGPAPPPRSDAAAGSRPTREAAQGARAKVFAMLDYLQEINDPEPPAATSPTAWVPDARAPLPTPADTSNAAGNHPPPGTSETGEPPPAPEVVITGDRILLSYPLSRASLTCPICLPARAFRDLGGVTRHLKKIHQKRLAFRCALCDLPFEAQKTCKSHQRTCHGVPAPQGPTSNPSRPTTAPRPTRAAPTPPIAPAPAPQPPAPVPRRETEPRQPATRRSTPGPATQVPAARSGPTSKTAPGQGGSSESPAPASRIASDSHILRRVSAPERPPLRRDLVPVRRASAPSATSLQRRAPAGPSPSVKAAARAPAARLMPAAPETTREEPSCGRPSHTRGSLPPLGAPPGPGARVPLSIVSRRSSSTRPVASDGRAPSLTSTPPEVPPRRRSAPASRPLPAAPEATRAQPSQRRPSGTRGSPPLGRAPPGPGARPSPPVLPPRRSSSTRPPLSDNQASRVTSTPPDVSTRRPRDRVPERPEEAGPPDVQPDPPAVADQGEPRPNPRPATPWQLLWREKLEAAESFSDFDRLVDELTEEMAAEIAAGKPDRGSAPGPRREPANRDDPGKAPARGNANRRYDPAAASRIQKLYRANRVKAMREVLDGPSAFCQIPSGRLFAYYKGVFDRADPPSGERPACVAPLPRVVDADDLQAAFAPGEVASRLSRTKNTAPGKDGIRYGFLKKKDPGCLVLSTLFERCRQFRRTPTSWKKAMTVLVYKKGERDDPSNWRPISLCSTIYKLYASCLAARITDWAVGGGAVSPVQKGFMSCEGCYEHNFILQSVLETARRDRRRCVMAWLDLANAFGSMPHRHVFATLEEFGMPGDFLQLLRELYDGCTTTIRSTEGETAEIPIRSGVKQGCPLSPIIFNLAMEPLIRAVANDPRGFELHGEKVNILAYADDLVLVAEDPESLRGMLAATSQAADWMGLRFNAKKCASLDVDGANKASVQATSFRIQGDPMIPLEEGQAYQHLGTPTGFRVRQTPEDTIQEILRDASSIDASLLAPWQKINALNTFLIPRISFVLRGSAVAKVPLNKADRVIRQLVKGWLFLPQRASNELTYIGHKQGGANVPRMGDLCDIAVITQAFRLLTCPDATVSGIAAKALEKAVAKRIRRAPTNDDIATYLSGSLDGEFAQDGGDISSLWSRARNATRRLGKRLGCRWTWCEERRELSVLVPRIRVDGHTIVTPRARCMLERCLKTSVHALYLESLKKKPDQGKAFEVTSKWDASNHFLAGGGYTRFADWRFIHRARLNCLPLNGAIRHGNRDKRCRRCGYVNETLPHVLCGCKPHSRAWQLRHNAVQDRLAKAIPAHRGSVAVNCTIPGTDSPLRPDIVITDEDRKKIVMVDVTVPFENRSPAFHAARARKEEKYAPLADTLRERGYDVQIHALIVGALGAWDPRNEPVLWACGVGRRYAKLMRRLMVSDSIRWSRDIYIEHVTGHRQYQEERDGAPPQDSASGPADPTDDHHDRRGGRRGGRRGGGHTNGRGGGHTNGRGGC

SEQ ID NO: 25272 - protein, 1306 aa, Cuora mccordi
MEDNQEGPNAPQNGCPTPDTVYLQYPLATDALICPICLPPRRFTRIGGLTRHLKRCHGLSTTFSCALCSLPFESQKKCKAHQTSCRKARTTATPAPASRHPVPHPTAPAPQSARATLPTPTRTPTPAPELADQGAAARTTTTTARNIDRAPTNWNPFTSTQVARKLSELRRLSAPSNQSDTAPRRVSAPPRVTTRDPAAVGTNAGSRHTLRAPATRVTNATPQPALRTSPTGGAGTTPQTAPHTTTNGGPTATTGRQHQTPIARQTGTAPRDARPTPTTRRSDAPTATPQMTAARGSPGSDPTPAGPNQVTPSTSNATAPPGPTPQEPTERSPEPQTRPPINQTADTLPTQAEEHEDRRLTTSPATPWQTTWIEKLQAAASFEEFDLLINRLTQELSAETAPKRTPNQETTRPAFRRPAPNRGTSARGTGRRNASRRYDPAAASRIQKLYRSNRLKAVREVLDGPPSYCTIPPERLYRYFLGVFGGTPRNDAQRPECLRPLPRVTNADGLEADYTPKEVSARLSRTKNTAPGKDGIPYGLLKKRDPGCLVLSGIFNLCRRFGRSPTSWKKAMTVLIHKKGEREDPSNWRPISLCSTMYKLYASCLAARITEWATTGGAISPAQKGFMPSEGCYEHNFLLQTVLQTTRRERKQCAIAWLDLANAFGSIPHHHIFSTLREFGMPETFLRLIRELYEGCSTTIRSVEGETAEIPIRSGVKQGCPLSPIIFNLAMEPLLRAISDGTDGFDLHDERVSVLAYADDLVLTADDPERLQGMLDTIGRAADWTGLRFNARKCASLHVDGSKRDSVLTTEFLVQGEPVVPLAEGQAYQHLGTPTGFRVRQTPEDTIREILQDAAKIDASLLAPWQKINALNTFLIPRIAFVLRGSAVAKVPLNKADNTIRQLVKKWLSLPQRASNELVYIAHRHGGANVPRMGDLCDIAVVTHAFRLLTCPDATVKNIATTALRAATAKRIGGSPSDQDVAAFLNGSLDGEFGRFRGDVASLWSRARNATRRLGKRLGCRWVWSEDRREPGVLVPRIGTEDNTIVSPGARGMLEKTLKAAIHALYVDTLRKKPDQGKAFEVTSKWDSSNHFLPAGSFTRFADWRFIHRARLNCVPLNGAVRHGNPDKRCRKCGYAMETLPHVLCSCKPHARAWQLRHNAVQDRLVKAIAPHLGKIAVNRAIPGTDSPLRPDIVVTDEDRKKIILVDVTIPFENRTPAFREARARKLEKYAPLADTLRSKGYEVHTDALIVGALGAWDPCNERVLRTCGVGRRYAQLMRRLMVSDTIRWSRDIYTEHITGHRQYQE

SEQ ID NO: 25273 - protein, 980 aa, Podocnemis expansa
MRPTGARTEGPHGPNAHPMGAPSPPPEESDEPPETRPATPWQLLWLEQLAAAESFDAFDPLVERLTQELAEEITAGKTPAQGTTSAPPSRPPANRGNDGGGPRRRNQARRYDPAAASKIQKLFRANRTKAVREILDGPSPYCTIAPERLVAYFTEVFDRADRVTPERPACVPPLPRISEVGDLEADFTPQEVAARLARTKNTAPGKDGIRYGILKKLDPGCLVLSALFNRCKRLLRIPTAWKKAMTVLIHKKGERDDPGNWRPIALCSTMYKLYTGCLAARITDWAVAGGAVSPVQKGFMACEGCYEHNFLLQSALQTARRARRQCTVAWLDLANAFGSMPHQHIFSTLTEFGMPDSFIQLLRELYDGCVTTIRSTEGETAEVAIRSGVKQGCPLSPIVFNLAMEPLIRAVAQDPRGFQLHGEKVNILAYADDLVLIAEDPLHLQDMLDATSRAADWIGLRFNAKKCASLHIDGRRKDPVQPSPFLIQGETVTPLEEGQAYQHLGTPTGFRVCQTPEDTIHEILQDVAKLDASLLAPWQKIAALNTFLIPRIAFVLRGSAVAKVPLNKADGAIRRLVKRWLFLPQRASNELTYIGHRQGGANVPRMGDLCDVTVITQAFRLLTCPDAQVKTVAARALHEAVQKRIARPPSGQDIATYLSGSLDGEFHRDRGDISSLWSRARVATRRLGKRLGCRWTWCEERQELSVLVPRISAPDDTIVPPSARGTLERTLKDAVHALYVETLRKKPDQGKVFELTSKWDASNHFLAEGSYTRFADWRFIHRARLNCLPLNGAIHHGNRDKRCRKCGYVNETLPHVLCSCKPHSGAWQLRHNAVQNRLAKAIPARLGTVAINSSIPGTDSQLRPDLVITDEERKRVIMVDITIPFENRSPAFHAARIRKEEKYAPLADTLRAKGYEVQVHALILGALGAWDPHNEDVLRACGVGWRYARLMRRLMVSDCIRWSRDIYVEHISGHRQYHVE

SEQ ID NO: 25274 - protein, 1354 aa, Cuora mccordi
MTPLPSCDGRTRLLYPSNLRRRGATPCRTPTPPRNSSRWEVPQVLPGQSYCWRTPPPAPQNGCSTPDIVYLQYPLTTDALICPICLPPRRFTRIGGLTRHLKRCHGLSTTFSCALCSLPFESQKKCKAHQTSCRKARTTTTPAPVPRHPVPQPTAPAPQRARATLTTAARKPTPAPELMDQGTAAKTTTTAARNIDRAPTNWNPFTSTQVSRKLSELRRLSAPSNQCDPAPRRVSAPPRVAARDPAAGGTNAGSRHTLRAPAARVTNATPQPALRTSPTGAAGTTPQTAPHTATAGGPAATTRPQHQIPIVRQTGTAPKDARPIPTTRRSHAPTATPRMTAACGSPGTAPTPTDPNQVTPSTSNATTAPAPMSRGPTERSPEPQTRLPVDQTANALPTQAEDCENRRPTTRPTTPWQATWIEKLQAAASFEEFDLLIGGLTRELSAEIAPKRTPNQEATRPALRRPLPTRDTSARGTGRRNASHRYDPAAASRIQKLYRTNRPKAVREVLDGPPSYCTIPPERLYNYFLGVFGDVPRNDAQRPECLRPLPRVTDADHLEADFTPKEVMARLSRTKNTAPGKDGIPYSLLKKRDPGCLVLSNIFNLCRRFGRSPTSWKKAMTVLIHKKGERDDPSNWRPISLCSTMYKLYASCLAARITEWATTGGAISPAQKGFMPSEGCYEHNFLLQTVLQSTRRERKQCTVAWLDLANAFGSIPHHHVFNTLQEFGMPETFLRLIRELYEGCSTTIRSVEGETAEIPIRSGVKQGCPLSPIVFNLAMEPLLRAISDGTDGLDLHGERVSVLAYADDLVLIADDPERLQGMLDTIGRAADWTGLRFNAKKCASLHVDGNRRDSVLTTEFLIQGESVVPMAEGQAYQHLGTPTGFRVRQTPEDTIREILQDAAKIDASLLAPWQKINALNTFLIPRIAFVLRGSAVAKVPLNKADNNIRHLVKKWLSLPQNASNELVYIAHRHGGANVPRMGDLCDIAVITHAFRLLTCPDAVVKNIATAALRAATAKRIGGAPSDQDVATFLSGSLDGEFAWGRGDIASLWTRARNATRRLGKRLGCRWVWSEERRELGVLVPHIGTEGNTIVGPGARGVLERSLKAAVRALYLDTLKKKPDQGKAFEVTSKWDSSNHFLPSGSFIRFADWRFIHRARLNCVPLNGAIRHGNPDKRCRRCGYAMETLPHVLCSCRPHGRAWQLRHNAVQDRLVKAIAPHLGEIAVNRAIPGTDSPLRPDIVITDEDRKKIILVDVTIPFENRTTAFRQARARKLEKYAPLADTLRAKGYEVYTDALIVGALGAWDPLNERVLRTCGVGRRYARLMRCLMVSDAIRWSRDIYTEHVTGHRQYQE

SEQ ID NO: 25275 - protein, 937 aa, Actinemys marmorata
MTTPPMTAAHGRPGITPAPIDPVQSPPTTSGDPTPPATTPRDPTEGSPDPQARQPADHATNSLPTPTEEPEDQRPTATPATPWQAAWIKELQAAASFTEFDPLIDRLTRELSAEIAFRRTPNQETTRPAPRRPAPHRDTNTRGVGRRNTGRRFDLAAASRIQKLYRTNRLKAVREVLDGPPSYCTIPPERLYNYFHGVFGGVPRSDAQRPECLRPLPRITDADDLEADFTPKEVTARLSRTKNTAPGKDSIPYSLLKKRDPGCLVLSSIFNLCKRFGQSPTSWKKAMTVLIHKKGERDDPSNWRPISLCSTMYKLYASCLAARITEWATTGGAISPAQKGFMPSEGCYEHNFLLQTVIQTTRRTRKQCAIAWLDLANAFGSIPHHHIFDTLQEFGMPEAFLHLIRELYEGCSTTIRSVEGETAEIPIHSGVKQGCPLSPIVFNLAMEPLLRAISDGTDGFDLHGERVSVLAYADDLVLIADDPERLQGMLDTIGRAADWTGLRFNAKKCASLHVDGSKRDPVLMTEFLIQGESVVPLAEGQAYQHLGTPTGFRVRQTPEDTIREILQDATKIDTSLLAPWQKINALNTFLIPRIAFVLRGSAVAKVPLNKADGTIRWLVKEWLSLPRRASNELIYIKHRHSGAGVPRMGDLCDIAVITHAFRLLTCPDTKVKNVAMTALHAATEKRIGRPPSDRDAATFLSGSLDGDFARDRGDLASLWSRARNATRRLGKRLGCRWEWNEERQELGVLIPRIGTEDNTIIAPGARGVLERSLKAAVHALYVDTLKKKPDQGKAFEVTSKWDSSNHFLPTGSFTRFADWRFIHRARLNCVPLNGAIRHGNRDKRCRKCGYVTETLPHVLCSCKPHARAWQLRHNAVQDRLVKAIDPRLGEVTVNRTVPGTDSPLRPDIVVTDEVGKKIILVDVTIPFENRTPAFRVA

SEQ ID NO: 25276 - protein, 1723 aa, Chrysemys picta
MPPGDPCPTPSPPPLAQPGDPRHAPQPLLLRPPGDLCPEPQPLPRVHLGEPGHVLQLLLPQPPVGDSCPTPWPPLLGQLGEPHRVSRPPLPEPPPGVPCPVPRLPLPPQPGEPRGVPQPPRPGPLGDSFPAPQLPLPGQPGEPRGAPQPPLVPLPGDSCSAPQLQLLGQHEEPRHVAQSPLPWPLGISCSALLPPMQPGDPHHPPRPPLSEPPGVSCPAQLPPMQPGDPHHLPQPPPPELQGASHPALQPPPLTVPEEPTDAPRQTGPRPAARRLPQNLGDLPPHHLALQLQSDSPAVHQLLQPPGDPPTTPLPPQPPGTSSTLLLLQPTGDPHTAPQQPQPLNSPPHVPRLSRELCHMPQSPRDASPVLLRYPDTPPAPQQLQPPRDGSPVPRRAPVTPPGPQQSPPDPQRDTLTGETSTTTETPAPQGGDEDTIYLTYPLAADALTCPICSPPRRFRLLGGVTRHLKRCHGKSTTFSCALCNLPFETQKRCKAHQASCKRARSATAPVPASRPPAPRPAAPAPRGNGAPPPTATLQPTPTSEPLDQGPTIETAPPTAGNVNRAPASWTPFTSTQVARKLSELRRLSALPSPNQRNPIPRRVSAPPRVAARNPAPRGPDAGPQATLRAPTAGRANATSQPAPRTPPAEGTGSTPQPAPQTTAARGANATTGPRHQTPIVRRTGTAPEATRPVPAARRSHVPVTTPQTAAAHGRPGVTPAPLDPVQIPPTTSDDPTPPATTPRDPTKESPDPQVRQPLDHTANSRPTPTEEPEDQRPKTRPATPWQAAWIEELQATASFAEFDSLVDRLTRELAAEIAFRRTPNQETTRPAPRRPAPHRDNNTRGAGRRNTGRRFDPAAASRIQKMYRTNRLKAVREILDGPPSYCTIPPERLYNYFLGVFGGVPRNDAQRPECLRPLPRIPDTDSLEADFTPKEVTARLSRTKNTAPGKDSIPYSLLKKRDPGCLLLSNIFNLCKRFGRSPTSWKKAMTVLIPKKGERDDPSNWRPISLCSTMYKLYASCLAARITEWATTGGAISPAQKGFMPSEGCYEHNFLLQTVIQTTRRTRRQCSIAWLDLANAFGSIPHHHIFDTLQEFGMPETFLHLIRELYEGCSTTIRSVEGETAEIPIHSGVKQGCPLSPIVFNLAMEPLLRAISDGGDGFDLHGERVSVLAYADDLVLIADDPERLQGMLDTIGRAADWTGLRFNAKKCASLHVDGSKRDSVLMTEFLIQGESVIPLAEGQAYQHLGTPTGFRVQQTPEDTIGGILQDVAKIDTSLLAPWQKINALNTFLIPRIAFVLRGSAVAKVPLNKADNAIRKLVKNWMSLPREASNELIYIKHRHGGAGVPRMGDLRDVAVLTHAFRLLTCPDAKVKNVAMAALHAATEKRIGRPPSDQDVATFMSGSLDGDFARDRGDFASLWTRARIATRRLGKRLGCRWEWNEERQELGVLIPRIGTEDNIIVTPGARGVLERSLKAAVHALYVDTLKKKPDQGKVFEVTSKWDSSNHFLPTGSFTRFADWRFIHRARPNCVPLNGAIRHGNRDKRCRKCGYVNETLPHVLCCCKPHARAWQLRHNAVQDRLVKAINPRLGEITVNRAVPGTDSPLRPDIVVTDEVGKKIILIDVTIPFENRTLAFREARARKIEKYAPLADTLRTKGYEVHVDALLVGALGAWDPCNERVLRTCGVGRHYARLMRRLMVSDTIRWSRDIYIEHITGHRQYQE

SEQ ID NO: 25277 - protein, 1473 aa, Chelonoidis abingdonii
MLQETRTLRRLKTPTEGTGPDFKGERFQGLQEAGPATWLRAQAPGDCPAAYQPSWGQGNALTPPPLQRDLPPAHQQLQPPRANPTSQGLPRASSPPATQPQKSPTTADQRPQPPGDCIPVDKPLQSLPDLPAGHQLLQLPRDGPPALPLSPDAPPPALQQPPPQRGNPPDPQPDTPPDGHSASDTIYFSYPLAADALICPICQPPRRFHLLGGVTRHLRRIHSKSTAFSCALCSLPFESQKKCKAHQLSCKKANTTAAPARTPRQPVPRPAAPAPRGNKTTPPSAAQKPIPVPERVDRGPAAKTTPAAERDASRVPANRFTSTSSQVAQKLSELRRLSAFPRPNQRDPTPRRVSAPPYVAPRQSAPGGTTAGPRTTARTPGARGTDVTPPPALRAAHAGGAGATPQTATRTATAAGSSATTRPHHQSPIIGRTDTAPKDARPIPAARRSHAPAGAHQMATTAHKRSSATPTPTSPNQVPPSTNNGATPAVTVPQDPTDSPPEPQVRQSADHAANPPPAPVEGTEDRRPKDRPATPWQAAWIGELQAAASFGDFDSLIDKLTHELSAEAASGRTPNQVATQPALRRPAPNHAATSRGTRRRNTNRYDPAAASKIQKLYRTNRPKAMREVLDGPPSYCTIPPERLYSYFLGVFGGTPRNDAPRPECLGPLPHLTDSDNLEADFTPQEVAARLSRTKNTAPGKDGIPYSLLRKRDPGCLVLSSIFNLCRRFGRSPTSWKKAMTVLIHKKGERDDPSNWRPISLCSTLYKLYAGCLAARITEWASTGGAISPAQKGFMPSEGCYEHNFLLQTTLQMAKRARKQCAIAWLDLSNAFGSIPHHHIFNTLREFGMPETFLCLIRDLYQHCSTTIRSVEGETAEIPIHSGVKQGCPLSPIIFNLAMEPLLRAISDGADGLDLHGERVSVLAYADDLVLIADDPERLQGMLDTMGRAADWTGLRFNAKKCASLHVDGSQRDSVLATEFQIQGKPVVPLAEGQAYQHLGTPTGVRVRQTPEDTIREILQDAAKIDASLLAPWQKINALNTFLIPRIAFVLRGSAVAKVPLNKADNTIRQLVKKWLSLPQRASNELIYIAHRHGGANVPRMGDLCDIAVITHAFRLLTCPDTTVKSVAATALHATTEHRIGRPPSGQDVATFLSGSLDGEFGRDRWDTASLWSRARDATRRLGKRLGCRWVWSEERQELGVLVPQIGTEGSITVSPGARGVLERSLKAAVHALYVDTLRKKPDQGKAFEVTSKWDSSNHFLPAGSFTRFADWRFIHRAQLNCVPLNGAVRHGNRDKRCRKCGYTLETLPHVLCSCKPHARAWQLRHNAVQDRLAKAIAPHLGEIAVNRTIPGTDSPLRPDIVVTDEERKKIILVDVTIPFENRTPAFREARARKLEKYAPLTDTLRAKGYEVYTDALIVGALGAWDPWNERVLRACGVGRRYARLMRRLMVSDTIRWSRDIYIEHITGHRQYQE

SEQ ID NO: 25278 - protein, 1705 aa, Pelusios castaneus
MDQAAKMDLAATSAVIAGRERKIASLRRATRAAAVLSSGSGSRRAASASTCPAAPRRAAAPSATLSSLRSKTAAAARTTKGVVSLEIPPASGASPLGAPQKTAPSAAATAVCAPLGDSEVPLPLSLQDSVAAAADVAAPPRQPSPGDTAIHAPQAVARGPVWESGPASSWTIAALPAPPEPEAATPSEGMEQDRSPLPPHWEAAAADAWALSPPPELLRAAVVAIAAPPQSAPLAPAPVAAPCDPPEEVTPPEDPLAALEIALQALAAATASPRDPDAMDEKTTATPASSPPRSPPRIVPASYALDPPQEAHNSATHDATGLADSHAAISAPDLQDHNMADPCPSEAPSRDIESRVNAVLNYLRQNDTRMQTSAPDPATQDPAALTNPVTVPDGASSMGEPSDRLGAAPADETGDTGDCIYLLYPLSKAALRCPICQPPREFHLLGGVTRHLRRLHNKGVAFRCITCGLPFTTQKKCKSHYTSCNKENLGTTRRRTTSTRIGKPQQTRAHAASPSRAPAAATPRPPIPKQQQGSISHHLAETRPTPCPTHRIAAAASTTPTSTLSSQGPAAKAPSAPSRIPLSRRLSMPGGQPSRNGPDSRRISAPTRMTTLYSSAKQTSMSPHTLPRTPAARSDSPDPGSQHPSIFPTSYVRGPVPGALVAFTVPNPASPDCESPSGAQEPRQPSDASRRSGVSPADPDPPRRSHTPQRTPSAGPTPQDANALTERAPDVPEDEGAQPACSPNAQPELAPTDLPDDPRPATRPPTPWQLLWLERLRAAKTFDDLDPLVDEMTQGLSAEVKARSERTQEGSSPARRPPANRHNRSAPRRRNTSRRYDPAAASRIQKLYRSNRAKAMREILDGPSSFCTIPPERLFTYFSNIFDRVALLTSGRPECLPPLPRIGDAEDLETDFTPEEVMTRLARTKNTAPGKDGVPYSILKRRDPGCLVLSALFNRCKEFRRTPSAWKKAMTVLVYKKGERDDPSNWRPISLCSTIYKLYASCLAARITTWSVNGGAISSVQKGFMSCEGCYEHNFILQTAIQTARRSRKQCAMAWLDLANAFGSMPHQHIFSTLQEFGMSATFLQLLRELYDGSTTTIRSIEGETAEIPIRSGVKQGCPLSPIIFNLAMEPLIRAIAEGPGGLDLHGERVSILAYADDLVLIADDPKHLHNMLHTTSLIADWMGLRFNAKKCASLHLDGSKKDAAQPTSFQIQGEPVACLEDGQAYQHLGTPTGFRVQQTPDDTIQSILQDAGKIDASLLAPWQKVNALNSFLIPRIAFVLRGSAVAKVPLNKADGAIRRLVKRWLFLPLRASNELTYIDHKQGGANVPRMGDLCDIAVITHAFRLLTCPDPTIKNIATNALHEVAAKRIKRIPSNTDVTTYLSGSLEGEFGQDRGDISSLWTRARVATRRLGKRIGCRWSWCEERQELSVLVPRNRTEDHTIVPPNARGQLERILKAAVHALYVEDLKRKPDQGKVFELTSKWDASNHFLPEGSYTRFADWRFIHRARLNCVPLNGAVRHGHRDKRCRKCGYANETLPHVLCSCKLHSRAWQLRHNAVQARLVKAIPPHLGAVKVNSTVPGTDSLLRPDVVVTDEDQKKVIMVDITVPFENRSPAFLGARTRKEEKYAPLADTLRAKGYTVQIHALIVGALGAWDPANEGVLQACGVGKRYARLMRRLMVSDSIRWSRDIYIEHITGHRQYQEE

SEQ ID NO: 25279 - protein, 1705 aa, Pelusios castaneus
MDQAAKMDPAATSAVIAGRERKIASLRRGTRAAAVLSSGSGSRRAASASTCPAAPRRAAAPSATLSSLRSKTAAAARTTKGVVSLEIPPASGASPPGAPQKTAPSAAATAVCAPLGDSEVPLPLSLQDSVAAAADVAAPPRQPSPGDTAIHAPQAVARGPVWESGPASSWTIAALPAPPEPEAATPSEGMEQDRSPLPPHWEAAAADAWALSPPPELLRAAVVAIAVPPQSAPLAPAPVAAPCDPPEEVTPPEDPLAALEIALQALAAATASPRDPDAMDEKITATPASSPPRSPPRIVPASYALDLPQEAHNSATHDATGLADSHAAISAPDPQDHSMADPCPSEAPSRDIESRVNAVLNYLRQNDTRTQTSAPDPATQDPAALANPVTVPDGASSMGEPSDRLGAAPADETGDTGDCIYLLYPLSKAALRCPICQPPREFHLLGGVTRHLKRIHSKGVAFRCITCGLPFATQKKCKSHYTSCNKENLGTTRRRTASTRIGKPPQTRAHAASPSQAPAAATPRPPILKQQQGSISHHRAETRPTPCPTHRIAAAASTTPTSAISSQGPAAKAPSAPSRIPLSRRLSMPGGQPSRNGPDSRRISAPTRMTTLYSSAKQTSMSPHTLPRTPAARSDSPDPGSQHPSIFPTSYVRGPVPGALVAFTVPNPASPDCESPSGAQEPRQPSDASRRSGVSPADPDPPQRSHTPQRTPSVGPTPQDANALTERAPEVPEDEGAQPACSPNAQPELAPTDLPDYPRPATRPPTPWQLLWLERLRAAKTFDDLDPLVDEMTQGLSAEVKARSERTQEGSSPTRRPPANRHNRSAPRRRNTSRRYDPAAASRIQKLYRSNRAKAMREILDGPSSFCTIPPERLFTYFSNIFDRVALLTSGRPECLPPLPRIGDAEDLETDFTPEEVMTRLARTKNTAPGKDGVPYSILKRRDPGCLVLSALFNRCKEFRRTPSAWKKAMTVLVYKKGERDDPSNWRPISLCSTIYKLYASCLAARITTWSVNGGAISSVQKGFMSCEGCYEHNFILQTAIQTARRSRKQCAMAWLDLANAFGSMPHQHIFSTLQEFGMSATFLQLLRELYDGSTTTIRSIEGETAEIPIRSGVKQGCPLSPIIFNLAMEPLIRAIAEGPEGLDLHGKRVSILAYADDLVLVADDPKHLHNMLHTTSLIADWMGLRFNAKKCASLHLDGSKKDAAQPTSFQIQGEPVACLEDGQAYQHLGTPTGFRVQQTPDDTIQSILQDAGKIDASLLAPWQKVNALNSFLIPRITFVLRGSAVAKVPLNKADGAIRRLVKRWLFLPLRASNELTYIDHKQGGANVPRMGDLCDIAVITHAFRLLTCPDPTVKNIATNALHEVAAKRIKRIPSNTDVTTYLSGSLEGEFGQDRGDISSLWTRARVATRRLGKRIGCRWSWCEERQELSVLVPRNRTEDRTIVPPNARGQLERILKAAVHALYVEDLKRKPDQGKVFELTSKWDASNHFLPEGSYTRFADWRFIHRARLNCVPLNGAVRHGHRDKRCRKCGYANETLPHVLCSCKLHSRAWQLRHNAVQARLVKAIPPHLGAVKVNSTVPGTDSLLRPDVVVTDEDQKKVIMVDITVPFENRSPAFLGARTRKEEKYAPLADTLRAKGYTVQIHALIVGALGAWDPANEGVLQACGVGKRYARLMRRLMVSDTIRWSRDIYIEHITGHRQYQEE

SEQ ID NO: 25280 - protein, 1248 aa, Mauremys reevesii
MPRPVHHLQLCPLQPAFRVPEEMQGAPDQLQEGPHNRNPGPGPTPPCAPAHSSRAAKSQSDPAARKPTPAPELVNQGIAAKTTTTTARNTDRAPTNWNPFTSTQVARKLSELRCLSAPSNQCDPAPRRVSAPPRVAARDPAAGGTNAGSRHTLRAPATRVTNATPQPALRTSPTRGAGTTPQTAPHTATAGGPAATTRPQHQTPIARQTGTAPRDARPTPTTRRSHAPTTTPRTAARGSPGTAPTPTDPNQVTPSTSNATTPPASTPQGPTERSPKPQTRPPINQTADTLPTQAEEHEDRRSTTRPATPWQTTWIEKLQAAASFEEFDLLVNRLTQELSAETAPKRTPNQETTRPAFRRPAPNRATSTRGTGRRNASHCYDPAAASRIQKLYRSNRLKAVREVLDGPPSYCMIPPERLYRYFLGVFGGTPRNDTQRPECLRPLPRVANADGLEADFMPKEVSAWLSRTKNTAPGKDGIPYGLLKKRDPGCLVLSGIFNFCRRFGRSPTSWKKAMTVLIHKKGERDDPSNWRPISLCSTMYKLYASCLAARITEWAMTGGAISSAQKGFMSSEGCYEHNFLLQTVLQTTKRARKQCAIAWLDLANAFGSIPHHHIFSTLREFGMSGTFLHLIRELYEGCSTTIRSVEGETAKIPIRSGVKQGCPLSPIIFNLAMEPLLRAISDGTDGFDLHGERVSILAYADDLVLTADDPERLQGMLDTIGRAADWTGLRFNAKKCASLHVDGSKRDSVLTTEFLVQGEPVVPLAEGQAYQHLGTPTGFHVWQTPEDTIQEILQDAAKMDASLLAPWQKINALNTFLIPRIAFVLRGSAVAKVPLNKADNIIRQLVKKWLSLPQRASNELVYIAHRHGGANVPRMGDLCDIAVVTHAFRLLTCPDATVKNIATTALCAATAMQINRPPSDQDVATFLSGSLDGEFGPFRGDVASLWTRTRNATRRLGKRLGCRWVWSEDRRELGVLIPQIGTEDNTIVSPGARGMLERSLKAAIRAHYVDTLKKKPDQGKTIEVTSKWDSSNHFLPSGSFIRFADWRFIHRARLNCVPLNGAIRHGNPDKRCRRCGYAMETLPHVLCSCKSHGRAWQLRHNAVQDRLVKAIAPHLGEIAVNRAIPGTDSLLRPDIVVTDEDWKKIILVDVTVPFENRTTAFRQARDRKLEKYAPLADTLRAKGYEVHTDALIVGALGAWDPLNEQVLRTCGVGRRYARLMRCLMVSDAIRWSRDIYTEHVTGHRQYQE

SEQ ID NO: 25281 - protein, 1075 aa, Trachemys scripta
MLRAPTAGRANATPQPAPRTPPTEGTGSTPQPTLQTTAARGPRPIPAARRSHASATTPQTAAAHGRPGITPAPLDPVQTPPTTSGDPTPPATTPRDPTAESPDPQVGQPIDHTTNSLPTPTEEPEDQRPEPRPATPWQAAWIEELQAAASFAEFDLLVDRLTRELSAEIAFKRTPNQETTRPAPRRPAPHRDNNTRGAGRRNTGRRFDPAAASRIQKMYRTNRLKAVREILDGPPSYCTIPPERLYNYFFGVFGGVPRNDAQRPECLRPLPRIPDADGLEADFTPKEVTARLSRTKNTAPGKDSIPYSLLKKRDPGCLLLSNIFNLCKRFGRSPTSWKKAMTVLIPKKGERDDPSNWRPISLCSTMYKLYASCLAARITEWATTGGAISPAQKGFMPSEGCYEHNFLLQSVIQTTRRTRRQCSIAWLDLANAFGSIPHHHIFDTLQEFGMPETFLHLIRELYEGCSTTIRSVEGETAEIPIHSGVKQGCPLSPIVFNLAMEPLLRAISDGADGFDLHGERVSVLAYADDLVLIADDPERLQGMLDTIGRAADWTGLRFNAKKCASLHVDGSKRDSVLMTEFLIQGESVVPLAEGQAYQHLGTPTGFRVRQTPEDTIREILQDAAKIDTSLLAPWQKINALNTFLIPRIAFVLRGSAVAKVPLNKADNAIRKLVKNWMSLPRRASNELVYIKHRHGGAGVPRMGDLCDIAVLTHAFRLLTCPDATVKNVATTALHAATEKRIGRPPSDRDVATFLSGSLDGDFARDRGDFASLWTRARNATRRLGKRLGCRWEWNEERQELGVLIPRIGTEDNIVVTPGARGVLERSLKAAVHALYVDALKKKPDQGKVFEVTSKWDSSNHFLPTGSFTRFADWRFIHRARLNCVPLNGAIRHGNRDKRCRKCGYANETLPHVLCCCKPHARAWQLRHNAVQDRLVKAINPCLGEIVVNRTVPGTDSPLRPDIVVTDEVGKKIILVDVAIPFENRTPAFREARARKLEKYAPLADTLRTKGYEVHVDALLVGALGAWDPCNERVLKTCGVGRHYARLMRRLMVSDTIRWSRDIYTEHITGHRQYQE

SEQ ID NO: 25282 - protein, 1516 aa, Pelusios castaneus
MEQDRSPLPPHWEAAAADAWALSPPPELLRAAVVAIAAPPQSAPLAPAPVAAPCDPPEEVTPPEDPLAALEIALQALAAATASPRDPDAMDEKITATPASSPPRSPPRIVPASYALDPPQEAHNSATHDATGLADSHAAISAPDLQDHNMADPCPSEAPSRDIESRVNAVLNYLRQNDTRTQTSAPDPATQDPVALTNPVTVPDGASSMGEPSDRLGAAPADETGDTGDCIYLLYPLSKAALRCPICQPPREFHLLGGVTRHLRRIHNKGVAFRCITCGLPFTTQKKCKSHYTSCNKENLGTTRRRTTSTRIGKPQQTRAHAASPSRAPAAATPRPPILKQQQGSISHHLAETRPTPCPTHRIAAAASTTPTSTLASQGPAAKAPSAPSRIPLSRRLGMPGGQPSRNGPDSRRISAPTRMTTLYSSAKQTSMSPHTLPRTPAARSDSPDPGSQHPSIFPTSYIRGPVPGALVAFTVPNPASPDCESPSGAQEPRQPSDASRRSGVSPADPDPPQRSHTPQRTPSAGPTPQDANALTERAPEVPEDEGAQPACSPKAQPELAPTDLPDDPRPATRPPTPWQLLWLERLRAAKTFDDLDPLVDEMTQGLSAEVKARSERTQEGSSPTRRPPANRHNRSAPRRRNTSRRYDPAAASRIQKLYRSNRAKAMREILDGPSSFCTIPPERLFTYFSNIFDRVALLTSGRPECLPPLPRIGDAEDLETDFTPEEVMTRLARTKNTAPGKDGVPYSILKRRDPGCLVLSALFNRCKEFRRTPSAWKKAMTVLVYKKGERDDPSNWRPISLCSTIYKLYASCLAARITTWSVNGGAISSVQKGFMSCEGCYEHNFILQTAIQTARRSRKQCAMAWLDLANAFGSMPHQHIFSTLQEFGMSATFLQLLRELYDGSTTTIRSIEGETAEIPIQSGVKQGCPLSPIIFNLAMEPLIRAIAEGPGGLDLHGERVSILAYADDLVLIADDPKHLHNMLHTTSLIADWMGLRFNAKKCASLHLDGSKKDAAQPTSFQIQGEPVACLEDGQAYQHLGTPTGFRVQQTPDDTIQSILQDAGKIDASLLAPWQKVNALNSFLIPRIAFVLRGSAVAKVPLNKADGAIRRLVKRWLFLPLRASNELTYIDHKQGGANVPRMGDLCDIAVITHAFRLLTCPDPTVKNIATNALHEVAAKRIKRIPSNTDVTTYLSGSLEGEFGQDRGDISSLWTRARVATRRLGKRIGCRWSWCEERQELSVLVPRNRTEDRTIVPPNARGQLERILKAAVHALYVEDLKRKPDQGKVFELTSKWDASNHFLPEGSYTRFADWRFIHRARLNCVPLNGAVRHGHRDKRCRKCGYANETLPHVLCSCKLHSRAWQLRHNAVQARLVKAIPPHLGAVKVNSTVPGTDSLLRPDVVVTDEDQKKVIMVDITVPFENRSPAFLGARTRKEEKYAPLADTLRAKGYTVQIHALIVGALGAWDPANEGVLQACGVGKRYARLMRRLMVSDTIRWSRDIYIEHITGHRQYQEE

SEQ ID NO: 25283 - protein, 1501 aa, Chrysemys picta
MQPGDPHHPPRPPLSEPPGVSCPAQLPPMQPGDPHHLPQLPPPELQGASHPALQPPPLTVPEEPTDAPRRTGPRPAARRLPQNLGDLPPHHLALQLQSDSPAVHQLLQPPGDPPTTPLPPQPPGSSPTLLLPQPTGDPHTAPQQPQPLNSPLHVPRLSRELCHTPQSPRDASPVLLRYPDTPPAPQQLQPPRDGSPVPRRAPVTPPGPQQSPPDPQWDTLTGETSAATETPAPQRGDEDTIYLTYPLAADALTCPICSPPRRFRLLGGVTRHLKRCHGKSTTFSCALCNLPFDTQKRCKTHQASCKRARSATAPVPASRPPAPRPAAPAPRGNGAPPPTATLQPTPTPEPLDQGSTIETAPPTAGNVDRAPASWTPFTSTQVARKLSELRRLSALPSPNQRNPIPRRVSAPPRVAARNPAPRGPDASPQATLRAPTAGRANATPQPAPRTPPAEGTGSTPQPAPQTTAARGVNATTGPRHQTPIVRRTGTAPEATRPVPAARRSHVPVTTPQTAAAHGRPGVTPAPLDPVQSPPTTSDDPTPPATTPRDPTEESPDPPVRQPLDHTANPRPTPTEEPEDQRPKSRPATPWQAAWIKELQATASFAEFDSLVDRLTRELSAEIAFRRTPNQETTRPAPGRPAPHRDNNTRGAGRRNTGRRFDPAAASRIQKMYRTNRLKAVREILDGPPSYCTIPPERLYNYFLGVFGGVPRNDAQRPECLRPLPRIPDADGLEADFTPKEVTARLSRTKNTAPGKDSIPYSLLKKRDPGCLLLSTIFNLCKCFGRSPTSWKKAMTVLIPKKGERDDPSNWRPISLCSTMYKLYASCLAARITEWATTGGAISPAQKGFMPSEGCYEHNFLLQTVIQTTRRTRRQCSIAWLDLANAFGSIPHHHIFDTLQEFGMPETFLHLIRELYEGCSTTIRSVEGETAEIPIHSGVKQGCPLSPIVFNLAMEPLLRAISDGGDGFDLHGERVSVLAYADDLVLIADDPERLQGMLDTIGRAADWTGLRFNAKKCASLHVDGSKRDSVLMTEFLIQGESVVPLAEGQAYQHLGTPTGFRVQQTPEDTIGGILQDVAKIDTSLLAPWQKINALNTFLIPRIAFVLRGSAVAKVPLNKADNAIRKLVKNWMSLPRRASNELVYIKHRHGGAGVPRMGDLCDVAVLTHAFRLLTCPDAKVKNVAMAALHAATEKRIGRPPSDQDVATFMSGSLDGDFARDRGDFASLWTRARIATRRLGKRLGCRWEWNEERQELGVLIPRIGTEDNIIVTPGARGVLERSLKAAVHALYVDALKKKPDQGKVFEVTSKWDSSNHFLPTGSFTRFADWRFIHRARLNCVPLNGAIRHGNWDKRCRKCGYVNETLPHVLCCCKPHARAWQLRHNAVQDRLVKAINPRLGEITVNRAVPGTDSPLRPDIVVTDEVGKKIILVDVAIPFENRTPAFREARARKLEKYAPLADTLRTKGYEVHVDALLVGALGAWDPCNERVLRTCGVGWAVITRGS

SEQ ID NO: 25284 - protein, 962 aa, Mesoclemmys tuberculata
MGAPSPPPRKATNHQRRGPPRPGSSSGWSDSPRWNPSTSSTPSWKGSPRSWPRKVAAGRTPAQGTTPAPPSRPPANRGNDGRGPGRGNQARRYDPAAASRIQKLFRANRTKAVREILEGPSPYCTIAPERLVAYFTEVFDRKDPAAAKRPACVPPLPRVDEVGDLEADFTPRQVAARLARTKNTSPGKDGIRYGTLKKRDPGCLVLSALLNRCKRLLRTPTAWKKAMTVLMHKKGERDDPGNWRPISLCSTMYKLYTGCLAARITAWAVAGGAISPVQKGFMAYEGCYEHNFLLQSALLTARWARRQCTVAWLDLANAFGSMPHQHIFSTLAEFGMPEGFIQLLRELYDGCVTTIRSTDGETAEVAIRSGVNQGCPLSPIVFNLAMEPLIRAVTQDPRGFQLHGEKVNILAYADDLVLIAEDPLHLQDMLDAISRAADWIGLRFNAKKCASLHVDGRKKDPVQASPFVIQGETMTPLEEGQAYQHLGTPTGFRVRQTPEDTIQEILRDAAKLDASLLAPWEKIAALNSFLIPRIAFVLRGSAVAKVPLNKADSTIRRLVKRWLFLPQKASNELTYIGHRQGGANVPCMGDLRDIAVITQAFRLLTCPDASVKAVAANALHEAIQKRIARTPSGEDVATYLSGSLNGEFQRNRGNISSLWTRARIATRRLGKRLGCRWTWCEERQELSVLVLRISAPDSTIVPPRAQGTLERTLKDAIHALYVETLKRKPDQGKVFELTSKWDSSNHFLAEGSYTRFADWRFIHRARLNCLPFNRAIHHGNPDKRCRRCGYVLETLPHVLCSCKPHCRAWQLRHNAVQDRLAKAIPAQLGTVAVNSAIPGADSQLRPDLVITDEERKKITMVDVTIPFENRTPAFHAARARKEEKYAPLADTLRAKGYEVQVHALIVGALGTWDPRNEAVLRACGVGWRYARLMRRLMVSDSIRWSRDIYVEHITGHRQYHEK

SEQ ID NO: 25285 - protein, 1427 aa, Pelusios castaneus
MDEKITATPASSPPRSPPRIVPASYALDPPQEAHNSATHDATGLADSHAAISAPDLQDHNMADPCPSEAPSRDIESRVNAVLNYLRQNDTRTQTSAPDPATQDPAALATPVTVPDGASSMGEPSDRLGAAPADETGDTGDCIYLLYPLSKAALRCPICQPPREFHLLGGVTRHLRRIHSKGVAFRCITCGLPFTTQKKCKSHYTSCNKENLGTTRRRTASTRIGKPPQTRAHAASPSRAPAAAAPRPPILKQQQGSISHHPAETRPTPCPTHRIAAAASTTPTSTLSSQGPAAKAPSAPSRIPLSRRLSMPGGQPSRNDPGSRRISAPTRMTTLYSSAKQTSMSPHTLPRTPAARSDSPDPGSQHPSIFPTSYVRGPVPGALVAFTVPNPASPDCESPSGAQEPRQPSDASRRSGVSPADPDPPQRSHTPQRTPSAGPTPQDANALTERAPEVPEDEGAQPACSPNAQPELAPTDLPDDPRPATRPPTPWQLLWLERLRAAKTFDDLDPLVDEMTQGLSAEVKARSERTQEGSSPTRRPPANRHNRSAPRRRNTSHRYDPAAASRIQKLYWSNRAKAMREILDGPSSFCTIPPERLFTYFSNIFDRVALLTSGRPECLPPLPRIGDAEDLETDFTPEEVMTRLARTKNTAPGKDGVPYSILKRRDPGCLVLSALFNRCKEFRRTPSAWKKAMTVLVYKKGERDDPSNWRPISLCSTIYKLYASCLAARITTWSVNGGAISSIQKGFMSCEGCYEHNFILQTAIQTARRSRKQCAMAWLDLANAFGSMPHQHIFSTLQEFGMSATFLQLLRELYDGSTTTIRSIEGETAEIPIRSGVKQGCPLSPIIFNLAMEPLIRAIAEGPGGLDLHGERVSILAYADDLVLIADDPKHLHNMLHTTSLIADWMGLRFNAKKCASLHLDGSKKDAAQPTSFQIQGEPVACLEDGQAYQHLGTPTGFRVQQTPDDTIQSILQDAGKIDASLLAPWQKVNALNSFLIPRIAFVLRGSAVAKVPLNKADGAIRRLVKRWLFLPLRASNELTYIDHKQGGANVPRMGDLCDIAVITHAFRLLTCPDPTVKNIATNALHEVAAKRIKRIPSNTDVTTYLSGSLEGEFGQDRGDISSLWTRARVATRRLGKRIGCRWSWCEERQELSVLVPRNRTEDRTIVPPNARGQLERILKAAVHALYVEDLKRKPDQGKVFELTSKWDASNHFLPEGSYTRFADWRFIHRARLNCVPLNGAVRHGHRDKRCRKCGYANETLPHVLCSCKLHSRAWQLRHNAVQARLVKAIPPHLGAVKVNSTVPGTDSLLRPDVVVTDEDQKKVIMVDITVPFENRSPAFLGARTRKEEKYAPLADTLRAKGYTVQIHALIVGALGAWDPANEGVLQACGVGKRYARLMRRLMVSDTIRWSRDIYIEHITGHRQYQEE

SEQ ID NO: 25286 - protein, 1097 aa, Pelusios castaneus
MTTLYSSAKQTSMSPHTLPRTPAARSDSPDPGSQHPSIFPTSYVRGPVPGALVAFTVPNPASPDCESPSGAQEPRQPSDASRRSGVSPADPDPPQRSHTPQRTPSAGPTPQDANALTERAPEVPEDEGAQPACSPNAQPELAPTDLPDDPRPATRPPTPWQLLWLERLRAAKTFDDLDPLVDEMTQGLSAEVKARSERTQEGSSPTRRPPANRHNRSAPRRRNTSRRYDPAAASRIQKLYRSNRAKAMREILDGPSSFCTIPPERLFTYFSNIFDRVALLTSGRPECLPPLPRIGDAEDLETDFTPEEVMTRLARTKNTAPGKDGVPYSILKRRDPGCLVLSALFNRCKEFRRTPSAWKKAMTVLVYKKGERDDPSNWRPISLCSTIYKLYASCLAARITTWSVNGGAISSVQKGFMSCEGCYEHNFILQTAIQTARRSRKQCAMAWLDLANAFGSMPHQHIFSTLQEFGMSATFLQLLRELYDGSTTTIRSIEGETAEIPIRSGVKQGCPLSPIIFNLAMEPLIRAIAEGPEGLDLHGKRVSILAYADDLVLVADDPKHLHNMLHTTSLIADWMGLRFNAKKCASLHLDGSKKDAAQPTSFQIQGEPVACLEDGQAYQHLGTPTGFRVQQTPDDTIQSILQDAGKIDASLLAPWQKVNALNSFLIPRIAFVLRGSAVAKVPLNKADGAIRRLVKRWLFLPLRASNELTYIDHKQGGANVPRMGDLCDIAVITHAFRLLTCPDPTVKNIATNALHEVAAKRIKRIPSNTDVTTYLSGSLEGEFGQDRGDISSLWTRARVATRRLGKRIGCRWSWCEERQELSVLVPRNRTEDRTIVPPNARGQLERILKAAVHALYVEDLKRKPDQGKVFELTSKWDASNHFLPEGSYTRFADWRFIHRARLNCVPLNGAVRHGHRDKRCRKCGYANETLPHVLCSCKLHSRAWQLRHNAVQARLVKAIPPHLRAVKVNSTVPGTDSLLRPDVVVTDEDQKKVIMVDITVPFENRSPAFLGARTRKEEKYAPLADTLRAKGYTVQIHALIVGALGAWDPANEGVLQACGVGKRYARLMRRLMVSDTIRWSRDIYIEHITGHRQYQEE

SEQ ID NO: 25287 - protein, 919 aa, Emydura subglobosa
MIFFTCNVKLYQANPVKAMREILDRPSAFCQIPSERLLAFYKGVFDRVDPPSNERPACVAPLPQVVSADDLQASFAPEEVASRLSRTKNTAPGKDGIRYGVLKKRDPGCLVLSTLFDRCRWFRRTPTSWKKAKTVLIYKKGERDDPSNWRPISLCSTMYKLYASCLAARITDWAVGGGAVSSVQKGFMSCEGCYEHNFILQSVLQTARRDHRRCAVAWQDLANAFGSMPQQHILATLEEFGMPGDFLQLLWELYDGCTTIIRSTKGEMAEIPIRSGLKQGCPLSSIRFNLAMEPLIRAISNDPQGFELHGKKINILAYADDLVLVADDPESLRGMLDATSQAANWMGLCFNAKKCVSLDVDGAKKASVQVTSFGIQGDPMIPLEEGQAYQHLGTPTGFRVQQTPEDTIQEILRDASRIDASLLAPWQKINALNTFLIPRISFILRGSAVAKVSLNKADGIIRQLVKGWLFLPQRASNELTYIGHKQGGANVPRMDNLCDIAVITQAFRLLTCPDATVSTIASKALEKAVTKWIRRAPTSDDIATYLSGSLEGEFARDGGDISSLWTRARNATRCLGKCIGCCWTWCEERRELSVLVPRIKADGHTIVTPRARGMLERCLKASVHALYLESLKKKPDQGKAFEVTSKWDASNHFLAGGGYTRFADWRFIHRARLNCIPLNGAVRHGNRDKRCRRCGYVNETLPHVLCGCKPHSRAWQLRHNAIQDRLAKAILAHRGTVTINSAIPRTDSQLRPDVVITNEDHKKIVMVDVTVPFENHSPAFHAARARKEEKYSPLADTLRDQGYEVQIHALIVRALGAWDPRNEPVLWACGVGRRYAKLMRRLMVSDSIPWSRDIYIEHITGHRQYHEERDGAPPQDPSSRPTDPTHHHHDRRGGGHTGGRGGGHTNGHGGGHTNGRGEC

SEQ ID NO: 25288 - protein, 1429 aa, Pelusios castaneus
MPWMRRSPPLLHPLLPGPPPRIVPASYALDPPQEAHNSATHDATGLADSHAAISAPDPQDHSMADPCPSEAPSRDIESRVNAVLNYLRQNDTRTQTSAPDPATQDPAALANPVTVPDGASSMGEPSDRLGAAPADETGDTGDCIYLLYPLSKAALRCPICQPPREFHLLGGVTRHLKRIHSKGVAFRCITCGLPFATQKKCKSHYTSCNKENLGTTRRRTASTRIGKPPQTRAHAASPSQAPAAATPRPPILKQQQGSISHHRAETRPTPCPTHRIAAAASTTPTSAISSQGPAAKAPSAPSRIPLSRRLSMPGGQPSRNDPGSRRISAPTRMTTLYSSAKQTSMSPHTLTRTPAARSDSPDPGSQHPSIFPTSYVRGPVPGALVAFTVPNPASPDCESPSGAQEPRQPSDASRRSGVSPADPDPPQRSHTPQRTPSAGPTPQDANALTERAPDVPEDEGAQPACSPNAQPELAPTDLPDDPRPATRPPTPWQLLWLERLRAAKTFDDLDPLVDEMTQGLSAEVKARSERTQEGSSPARRPPANRPNRSAPRRRNTSRRYDPAAASRIQKLYRSNRAKAMREILDGPSSFCTIPPERLFTYFSNIFDRVALLTSGRPECLPPLPRIGDAEDLETDFTPEEVMTRLARTKNTAPGKDGVPYSILKRRDPGCLVLSALFNRCKEFHRTPSAWKKAMTVLVYKKGERDDPSNWRPISLCSTIYKLYASCLAARITTWSVNGGAISSVQKGFMSCEGCYEHNFILQTAIQTARRSRKQCAMAWLDLANAFGSMPHQHIFSTLQEFGMSATFLQLLRELYDGSTTTIRSIEGETAEIPIRSGVKQGCPLSPIIFNLAMEPLIRAIAEGPGGLDLHGERVSILAYADDLVLIADDPKHLHNMLHTTSLIADWMGLRFNAKKCASLHLDGSKKDAAQPTSFQIQGEPVACLEDGQAYQHLGTPTGFRVQQTPDDTIQSILQDAGKIDASLLAPWQKVNALNSFLIPRIAFVLRGSAVAKVPLNKADGAIRRLVKRWLFLPLRASNELTYIDHKQGGANVPRMGDLCDIAVITHAFRLLTCPDPTVKNIATNALHEVAVKRIKRIPSNTDVTTYLSGSLEGEFGQDRGDISSLWTRARVATRRLGKRIGCRWSWCEERQELSVLVPRNRTEDRTIVPPNARGQLERILKAAVHALYVEDLKRKPDQGKVFELTSKWDASNHFLPEGSYTRFADWRFIHRARLNCVPLNGAVRHGHRDKRCRKCGYANETLPHVLCSCKLHSRAWQLRHNAVQARLVKAIPPHLGAVKVNSTVPGTDSLLRPDVVVTDEDQKKVIMVDITVPFENRSPAFLGARTRKEEKYAPLADTLRAKGYTVQIHALIVGALGAWDPANEGVLQACGVGKRYARLMRRLMVSDTIRWSRDIYIEHITGHRQYQEE

SEQ ID NO: 25289 - protein, 1699 aa, Pelusios castaneus
MDPAATSAVIAGRERKIASLRRATRAAAVLSSGSGSRRAASASTCPAAPRRAAAPSATLSSLRSKTAAAARTTKGVASLEIPPASGASPPGAPQKTAPTAAATAVCAPLGDSEVPLPLSLQDSVAAAADVAAPPRQPSPGDTAIHAPQAVARGPVWESGPASSWMIAAPPAPPEPEAATPSEGMEQDRSPLPPHWEAAAADTWALSPPPELLRAAVVAIAAPPQSAPLAPAPVAAPCDPPEEVPPPEDPLAALEIALQALAAATASPRDPDAMDEKITATPASSPPRSPPRIVPASYALDPPQEAHNSAAHDATGLADSHAAISAPDLQDHNMADPCPSEAPSRDIESRVNAVLNYLRQNDTRTQTSAPDPATQDPAALTNPVTVPDGASSMGEPSDRLGAAPADETGDTGDCIYLLYPLSKAALRCPICQPPREFHLLGGVTRHLRRIHNKGVAFRCITCGLPFTTQKKCKSHYTSCNKENLGTTRRRTTSTRIGKPQQTRAHAASPSRAPAAATPRPPILKQQQGSISHHLAETRPTPCPTHRIAAAASTTPTSTLASQGPAAKAPSAPSRIPLSRRLSMPGGQPSRNGPDSRRISAPTRMMTLYSSAKQTSMSPHTLPRTPAARSDSPDPGSQHPSIFPTSYVRGPVPGALVAFTVPNPASPDCESPSGAQEPRQPSDASRRSGVSPADPDPPQRSHTPQRTPSAGPTPQDANALTERAPEVPEDEGAQPACSPNAQPELAPTDLPDDPRPATRPPTPWQLLWLERLRAAKTFDDLDPLVDEMTQGLSAEVKARSERTQEGSSPTRRPPANRHNRSAPRRRNTSRRYDPAAASRIQKLYRSNRAKAMREILDGPSSFCTIPPERLFTYFSNIFDRVALLTSGRPECLPPLPRIGDAEDLETDFTPEEVMTRLTRTKNTAPGKDGVPYSILKRRDPGCLVLSALFNRCKEFRRTPSAWKKAMTVLVYKKGERDDPSNWRPISLCSTIYKLYASCLAARITTWSVNGGAISSVQKGFMSCEGCYEHNFILQTAIQTARRSRKQCAMAWLDLANAFGSMPHQHIFSTLQEFGMSATFLQLLRELYDGSTTTIRSIEGETAEIPIRSGVKQGCPLSPIIFNLAMEPLIRAIAEGPEGLDLHGKRVSILAYADDLVLVADDPKHLHNMLHTTSLIADWMGLRFNAKKCASLHLDGSKKDAAQPTSFQIQGEPVACLEDGQAYQHLGTPTGFRVQQTPDDTIQSILQDAGKIDASLLAPWQKVNALNSFLIPRIAFVLRGSAVAKVPLNKADGAIRRLVKRWLFLPLRASNELTYIDHKQGGANVPRMGDLCDIAVITHAFRLLTCPDPTVKNIATNALHEVAAKRIKRIPSNTDVTTYLSGSLEGEFGQDRGDISSLWTRARVATRRLGKRIGCRWSWCEERQELSVLVPRNRTEDRTIVPPNARGQLERILKAAVHALYVEDLKRKPDQGKVFELTSKWDASNHFLPEGSYTRFADWRFIHRARLNCVPLNGAVRHGHRDKRCRKCGYANETLPHVLCSCKLHSRAWQLRHNAVQARLVKAIPPHLGVVKVNSTVPGTDSLLRPDVVVTDEDQKKVIMVDITVPFENRSPAFLGARTRKEEKYAPLADTLRAKGYTVQIHALIVGALGAWDPANEGVLQACGVGKRYARLMRRLMISDTIRWSRDIYIEHITGHRQYQEE

SEQ ID NO: 25290 - protein, 849 aa, Chelonoidis abingdonii
MREVLDGPPSYCTIPPERLYSYFLGVFGGTPRNDAPRPECLGPLPHLTDSDNLEADFTPQEVAARLSRTKNTAPGKDGIPYSLLRKRDPGCLVLSSIFNLCRRFGRSPTSWKKAMTVLIHKKGERDDPSNWRPISLCSTLYKLYAGCLAARITEWASTGGAISPAQKGFMPSEGCYEHNFLLQTTLQMAKRARKQCAIAWLDLSNAFGSIPHHHIFNTLREFGMPETFLCLIRDLYQHCSTTIRSVEGETAEIPIHSGVKQGCPLSPIIFNLAMEPLLRAISDGADGLDLHGERVSVLAYADDLVLIADDPERLQGMLDTMGRAADWTGLRFNAKKCASLHVDGSQRDSVLATEFQIQGKPVVPLAEGQAYQHLGTPTGVRVRQTPEDTIREILQDAAKIDASLLAPWQKINALNTFLIPRIAFVLRGSAVAKVPLNKADNTIRQLVKKWLSLPQRASNELIYIAHRHGGANVPRMGDLCDIAVITHAFRLLTCPDTTVKSVAATALHATTEHRIGRPPSGQDVATFLSGSLDGEFGRDRWDTASLWSRARDATRRLGKRLGCRWVWSEERQELGVLVPQIGTEGSITVSPGARGVLERSLKAAVHALYVDTLRKKPDQGKAFEVTSKWDSSNHFLPAGSFTRFADWRFIHRARLNCVPLNGAVRHGNRDKRCRKCGYTLETLPHVLCSCKPHARAWQLRHNAVQDRLAKAIAPHLGEIAVNRTIPGTDSPLRPDIVVTDEERKKIILVDVTIPFENRTPAFREARARKLEKYAPLTDTLRAKGYEVYTDALIVGALGAWDPWNERVLRACGVGRRYARLMRRLMVSDTIRWSRDIYIEHITGHRQYQE

SEQ ID NO: 25291 - protein, 858 aa, Chrysemys picta
MYRTNRLKAVREILDGPPSYCTIPPERLYNYFLGVFGGVPRNDAQRPECLRPLPRIPDADGLEADFTPKEVTARLSRTKNTAPGKDSIPYSLLKKRDPGCLLLSNIFNLCKRFGRSPTSWKKAMTVLIHKKGERDDPSNWRPISLCSTMYKLYASCLAARITEWATTGGAISPAQKGFMPSEGCYEHNFLLQTVIQTTRRTRRQCSIAWLDLANAFGSIPHHHIFDTLQEFGMPETFLHLIRELYEGCSTTIRSVEGETAEVPIHSGVKQGCPLSPIVFNLAMEPLLRAISDGGDGFDLHGERVSVLAYADELVLIADDPERLQGMLDTIGRAADWTGLRFNAKKCASLHVDGSKRDSVLMTEFLIQGESVIPLAEGQAYQHLGTPTGFRVQQTPEDTIGGILQDVAKIDTSLLAPWQKINALNTFLIPRIAFVLRGSAVAKVPLNKADNAIRKLVKNWLSLPREASNELIYIKHRHGGAGVPRMGDLRDVAVLTHAFRLLTCPDAKVKNVAMAALHAATEKRIGRPPSDQDVATFMSGSLDGDFARDRGDFASLWTRARIATRRLGKRLGCRWEWNEERQELGVLIPRIGTEDNIIVTPGARGVLERSLKAAVHALYVDTLKKKPDQGKVFEVTSKWDSSNHFLPTGSFTRFADWRFIHRARLNCVPLNGAIRHGNRDKRCRKCGYVNETLPHVLCCCKPHARAWQLRHNTVQDRLVKAISPRLGEITVNRAVPGTDSPLRPDIVVTDEVGKKIILIDVTIPFENRTLAFREARARKIEKYAPLADTLRTKGYEVHVDALLVGALGAWDPCNERVLRTCGVGRHYARLMRRLMVSDTIRWSRDIYIEHITGHRQYQE

SEQ ID NO: 25292 - protein, 1115 aa, Cuora amboinensis
MSAQDPASGGTNAGPRPTLRAPATRDANATRQPAPRTPPIEGTGITPQSAPRTSTFGGANATNRPQHRTPITRRADTAPKDTRPIPAARRSRAPTATPQTTAARGRPGVTPTPTDPNQVPPTTSNNDTPPVTMPREPTGRSPEPQGRQPVDHVANSLHALAEEHEGRQPMVRPATPWQAAWIEELQAAASFEEFDPLIDRLTHELSVESASKRTPNQETSRPAFRRPVPNRDTSTRGTGRRNASHRYDPAAASRIQKLYRTNRLKAVREVLDGPPSYCTIPPERLYSYFLGVFGGVPRNGAQRPECLHPLPRVANADGLEADFTPKEVTARLSRTKNTAPGKDGIPYSLLKKRDPGCLVLSTIFNLCRRFGRSPTSWKRAMTVLIHKKGERDDPSNWRPISLCSTMYKLYASCLAARITEWATTGGAISPAQKGFMPSEGCYEHNFLLQTVLQTTRRERKQCAVAWLDLANAFGSIPHHHIFNTLQEFGMPETFLHLIRELYDGCSTTIRSVEGETTEIPIRSGVKQGCPLSPIVFNLAMEPLLRAISDGADGFDLQDERVSILAYADDLVLIADDPERLQGMLDTIGRAADWTGLRFNAKKCASLHVDGNKRDSVLTTEFLIQGESVVPLAEGQAYQHLGTPTGFRVRQTPEDTIREILQDAAKIDASLLAPWQKINALNTFLIPRIAFVLRGSAVAKVPLNKADNTIRQLVKKWMSLPQRASNELVYITHRHGGANVPRMGDLCDIAVITHAFRLLSCPDTKVKNVATAALRAATAKRIGRPPSDQDVATFLSGSLDGEFSRDSGDIASLWTRARNATRRLGKRLGCRWVWSEERRELGVLVPRIGTEGNTIVSPGARGMLEKSLKAAVHALYVDTLRKKPDQGKAFEVTSKWDSSNHFLPAGSFTRFADWRFIHRARLNCVPLNGAVRHGNRDKRCRKCGYAMETLPHVLCSCKPHARAWQLRHNAVQDRLVKAIAPHLGKIAVNRAIPDTDSPLRPDIVVTDEDRKKIILVDVTIPFENRTTAFREARARKFEKYAPLADTLRSKGYEVYADALIVGALGAWDPCNERVLRTSGVGRRYAQLMRRLMVSDTIRWSRGIYTEHITVHRQYRE

SEQ ID NO: 25293 - protein, 980 aa, Podocnemis expansa
MRPTGARTEETHGPNAHPTSALSPPPEESNEPPEARPATPWQLLWLEQLAAAESFDVFDPLVERLTQELAEEITAGKTPAQGTTSAPPRRPPANRGNDERGPRRRNQTRRYDPAAAPKIQKLFRANRTKAVREILEGPSPYCTIAPERLVAYFTEVFDRVDPVTVERPACVPPLPRISEVGDLEADFTPQEVAARLAKTKNTAPGKDGIRYGILKKRDPGCLVLSALFNRCKRLLRTPTAWKKAMTVLIHKKGERDDPGNWRPIALCSTMYKLYTGCLAARITDWAVAGGAVSPVQKAFMACEGCYEHNFLLQSALQTARRARRQCTVAWLDLANAFRSMPHQHIFSTLTEFGMPDSFIQLLRELYDGCVTTIRSTEGETAEVAIRSGVKQGCPLSPIVFNLTMEPLIRAVAQDPRGFQLHGEKVNILAYADDLVLIAEDPLHLQDMLDATSRAADWIGLRFNAKKCASLHLDGHRKDPVQPSPFLIQGETMTPLEEGQAYQHLGTPTGFRVCQTPEDTIHEILQDVAKLDASLLAPWQKIAALNTFLIPRIAFVLRGSAVAKVPLNKADGAIRRLVKRWLFLPQRASNELTYIGHRQGGANVPRMGDLCDVAVITQAFRLLTCPDAQVKTVAARALHEAVQKRIVRPPSGQDIATYLSGSLDGEFHRDRDDISSLWSRARVATRRLGKRLGCRWTWCEERQELSVLVPRISTPDDTIVPPSARGTLERTLKDAVHALYVETLRQKPDQGKVFELTSKWDASNHFLAEGSYTRFADWRFIHRARLNCLPLNGAIHHGNRDKRCRKCGYINETLPHVLCSCKPHSGAWQLRHNAVQNRLAKAIPARLGTVAINSSIPGTDSQLRPDLVITDEERKRVIMVDITIPFENRSPAFHAARTRKEEKYAPLADALRAKGHEVQVHALIVGALGAWDPHNEDVLRACGVGWRYARLMRRLMVSDCIRWSRDIYVEHISGHRQYHVE

SEQ ID NO: 25294 - protein, 1689 aa, Pelusios castaneus
MDQAAKMDPAATSAVIVGRERKIASLRRATRAAAVLSSGSGSRRAASASACPAAPRRAPAPSATLSSLRSKTAAAAHTTKGAVSLEIPPASGASPPGAPQKTAPSATATAVCAPLGDSEVPLPLSLQDSGAAAADVAAPPRQPSPGDTAIHAPQAAARGPVWESDPVSFWTITALPAPPEPAAATSSEGMEQDRSPLAPRWEAAAADAWAPSPPPELLRAAVVAIAAPPQSAPMAPAPVAAPCDPPEEVTPPEDPLAAFEIALLALAAATASPRDPDAMDEQITATPASSPPRSPPRIVPASYALDPPQEALNSATHDATGLTDSHAAISAPDRQDHNMADPCPSEATSRDIESRVNAVLNYLRQNDTRTQTSAPDPATQDPAALANPVTVPDGASSMGEPSDRLGAAPADETGDTGDCIYLLYPLSKAALRCPICQPPREFHLLGGVTRHLRRIHRKGVAFRCITCGLPFTTQKKCKSHYTSCNKENLGTTRRRTTSTRIGKPQQTRAHAASPSRAPAAATSRPPILKQQQGSTSHHLTETRPTPCPTHRIAAAASTTPTSTLSSQGPAAKAPSAPSRIPLSRRLSMPGGQPSRNGPDSRRISAPTRMTTLYSSAKQTSMSPHTLPRTPAARSDSPDPGSQHPSIFPTSYVRGPVPGALVASTVPNPASPDCESPSGAQEPRQPSHASRRSGVSPADPDPPQRSHTPQRTPSAGPTPQDANALTERAPEVPEDEGAQPARSPNAQPELAPTDLPDDPRPATRPPTPWQLLWLERLRAAKTFDDLDPLVDEMTQGLSAEVKARSERTQEGSSPTRRPPANRHNRSAPRRRNTSRRYDPAAASRIQKLYRSNRAKAMREILDGPSSFCTIPPERLFTYFSNIFDRVALLTSGRPECLPPLPRIGDAEDLETDFTPEEVMTRLARTKNTAPGKDGVPYSILKRRDPGCLVLSALFNRCKEFRRTPSAWKKAMTVLVYKKGERDDPSNWRPISLCSTIYKLYASCLAARITTWSVNGGAISSVQKGFMSCEGCYEHNFILQTAIQTARRSRKQCAMAWLDLANAFGSMPHQHIFSTLQEFGMSATFLQLLRELYDGSTTTIRSIEGETAEIPIRSGVKQGCPLSPIIFNLAMEPLIRAIAEGPGGLDLHGERVSILAYADDLVLIADDPKHLHNMLHTTSLIADWMGLRFNAKKCASLHLDGSKKDAAQPTSFQIQGEPVACLEDGQAYQHLGTPTGFRVQQTPDDTIQSILQDAGKIDASLLAPWQKVNALNSFLIPRIAFVLRGSTVAKVPLNKADGAIRRLVKRWLFLPLRASNELTYIDHKQGGANVPRMGDLCDIAVITHAFRLLTCPDPTVKNIATNALHEVAAKRIKRIPSNTDVTTYLSGSLEGEFGQDRGDISSLWTRARVATRRLGKRIGCRWSWCEERQELSVLVPRNRTEDRTIVPPNARGQLERILKAAVHALYVEDLKRKPDQGKVFELTSKWDASNHFLPEGSYTRFADWRFIHRARLNCVPLNGAVRHGHRDKRCRKCGYANETLPHVLCSCKLHSRAWQLRHNAVQARLVKAIPPHLGAVKVNSTVPGTDSLLRPDVVVTDEDQKKVIMVDITVPFENRSPAFLGARTRKEEKYAPLADTLRAKGYTVQIHALIVGALGAWDPANEGVLQACGVGKRYARLMRRLMVSDTIRWSR

SEQ ID NO: 25295 - protein, 735 aa, Mauremys reevesii
MTVLIHKKGERDDPSNWRPISLCSTMYKLYASCLAARITEWATTGGAISPAQKGFMPSEGCYEHNFLLQTVLQTTRRAQKQCAIAWLDLANAFGSIPHHHIFSTLREFGMPETFLRLIRELYEGCSTTIRSVEGETAEIPIRSGVKQGCPLSPIIFNLTMEPLLQAISDGANGFDLHEERVSILAYADDLVLTADDPERLQSMLDTIGRAADWTGLHFNAKKCTSLHIDGSKRHSVLTTEFLVQGEPVIPLAEGQAYQHLGTPTGFRVQQTPEDTIREILQDAAKIDASLLAPWQKINALNTFLIPRIAFVLRGSAVAKVPLNKADNNIRQLVKKWLSLPQRASNELVYIAHRHGGANVPRMGDLCDIAVITHAFRLLTCPDATVKNIATTALRAATAKRVAGSPSDQDVAAFLNGSLDGEFGRFRGDVASLWSRARNATRRLGKRLGCRWVWSKDRREPGVLVPRIGTEDNTIVSPGARGMLEKTLKAAVHALYVDTLKKKSDQGKAFEVTSKWDSSNHFLPAGSFTRFADWRFIHRARLNCVPLNGAVRHGNRDKRCRKCGYAMETLPHVLCSCKPHARAWQLRHNAVQDRLVKATAPHLGKITVNRAIPGTDSTLRPDIVVTDEDRKKIILVDVTIPFENRTLAFREARSRKLEKYAPLADTLQSKGYEVCTEALIVGALGAWDPYNERVLRTCGVGRRYAQLMRRLMVSDTIRWSRDIYTEHITGHRQYQE

SEQ ID NO: 25296 - protein, 820 aa, Chelydra serpentina
MREVLDGPPSYCTIPPDRLHNHFHGVFSGVPRNDAQRPECLRPLPRIADSTDLDADFTPKEVMTRLSRTKNTAPGKDGIPYSLLKKRDPGCLVLSSIFNLCRRFGRSPTSWKKAMTVLIHKKGERDDPSNWRPISLCSTMYKLYAGCLAARITEWATTGGAISPAQKGFMPSEGCYEHNFLLQTVIQTTRRARKQCAIAWLDLANAFGSIPHHHIFDTLQEFGMPESFLRLIRELYEGCSTTIRSVEGETAEIPIRSGVKQGCPLSPIVFNLAMEPLLRAISDGADGFDLHGERVNVLAYADDLVLIADDPERLQGMLDTIGRAADWTGLRFNAKKCASLHVDGNTRDSVLTTEFLVQGESVVPLAEGQAYQHLGTPTGFRVRQTPEDTIQEILQDAAKIDASLLAPWQKINALTTFLIPRIAFVLRGSAVAKVPLNKADNTIRKLVKSWLSLPQRASNEIIYIAHRHGGANVPRMGDLCDTAVITHAFRLLTCPDTKVKNVATAALHAVIGKRIGRPPSGRDVATFLSGSLDGEFARDGGDIASLWSRARNATRRLGKRTGCRWVWNEERRELGVLVPRIESEDNTTITPGARGVLERTLKAATHALYVDTLKKKPDQGKAFEVTSKWDSSNHFLPTGSFTRFADWRFIHRARLNCVPLNGAVHHGNRDKRCRKCGYAAETLPHVLCSCKPHARAWQLRHNAVQDRLVKAIDPRLGQVAVNRAIPGTDSQLRPDIVITDEVGKKIILVDVTIPFENRTPAFRAARARKLEKYAPWPTPCGQRATWCTPTPCSSGPWVHGTHVTKTCCGPVGWAVSTRDS

SEQ ID NO: 25297 - protein, 1263 aa, Emydura subglobosa
MNLSNFPMPLLRTPPGPMGDPPPLPPTFFPRRSSLTRHQTAGDRAPSPDQAGHRGSGTTGRLVSSNRSSSDARGPLPRAQASLGDGARSPRFLPSPHRSSTSHQQTGAAQTTRVPLPPGKVRSSRQSGRAPERTGGGSSQTGPLPADTRPTHAEPSGKRSRGSRPPPRLPTEPGAPPSPPAPLPSLPPARRSSAPNLRQSNNHTPNITPVPTEAQPDHQVEEAPERPGRGEPQTTCLSGDQSDPPPGNDGGAQRPAPRNATPWQLLWRNKLSEADDFGDFDRLVDELTAELAAEVEANRPNRGPTQASRRPQNDQAGPRRIPVRGDARRRYDPAAASRIQKLYRVNRAKAVREVLEGPSTFCQLTAEQLHAFYTVVFNHERQPPRERPPCIPPLPRVDDAGDLEAPFSPEEVASRLSRTKNTAPGKDGIRYSLLKKRDPGCLVLSSLFNRCKHFSRTPTSWKKAMTVLMYKKGDREDPSNWRPISLCSTMYKLYASCLAARITDWAVRGGAVSPTQKGFMSCEGCYEHNFILQSALQTARRDRRRCAVAWLDLTNAFGSMPHQHIFTTLEEFGMPGDFIRLLRELYEGSTTIIRSTEGETAEIPIRRGVKQGCPLSPIIFNLAMEPLIRAASSNPGGFQVQGERVNILAYADDLVLMADDPKSLQDMLAVTSRAADWMGLHFNAKKCASLDVDGRQRAAVQATVFQIQDDPMTPLKEGQAYQHLGTPTGFRAQQTPEDTIKEILSDADKIDKSLLAPWQKINALNTFLIPRISFVLRGSAVAKVPLNKADSTIRRLVKGWLSLPMRASNELTYIGHKQGGANVMRMGDLCDIAVITHAFRLLTCPDTTVSSIATRALSQAVRKRIRQEPSKHDIATYLSGSLDDIFGRDACDITSLWSRARNATRRLGKRTGCRWTWCEERQELSVLIPRIKADGHTIVPPRARGMLERYLKASVHSLYVENLRKKPDQGKVFEVTSQWDASNHFLAEGKYTRFADWRFIHRARLNCLPLNGAIRFGNRDKRCRRCGYTNETLPHVICGCKPHSRAWQLRHNAVQNLLVKAIPARLGTVTVNSSIPGTNSQLRPDVTITDEEHKKIVMVDITVPFENRTPALLAARTNKEEKYAPLADTLREQGYLVQVHALIVGALGAWDPRNEPVLWACGVGRRYAQLMRRLMVSDAIRWSRDIYVEHITGHRQYQEEEAEEPPLEPAGPSDSSDPSGLVEGHTTRGRGGRATRDRGRGGRSSRRREDHRERRRDRPANRP

SEQ ID NO: 25298 - protein, 1314 aa, Mauremys reevesii
MPPPTSRVMEDDQEGPNAPQNGRPTLHTVYLQYPLTTDALNCPICMPPRRFTELRGLTRHLKRCHSLSTAFSCALCSLPCESQKKCKAHQTSCKKARTTATPASVPRHPVPQPTAPGPQRARGTLSTAALKPTPAPELVVQGTAAKTTATAARNTDRAPTNWNPFTPTQVARKLSELRRLSAPSNQGDSAPRRVSAPPRMAARDPAAGGINAGSRHTLRAPATRVTNTTPQPALQTSPTGGAGTTPQTAPHTATTGGPAAMTRPQHQTPIARQTGTAPRDARPTPTTRRPHAPTTTPRTTATHGSPGTAPTPTDPNQVTPSTSNATTPLMSTPQGPTEKSPEPQTRSPTNQTADTIPTQAEEHEDRRSTTKPATPWQTTWIEKLQAAASFEEFDLLVNRLTQELSAETAPKRTPNQETTRPTFKRPAPNHATSTRGAGRRNASHRYDPAAASRIQKLYRSNRLKAVREVLDGPPAYCTIPPERLYRYFLGVFGGTPRNDTQRPECLHPLPRVTNADGLEADFTPKEVSARLSRTKNTAPGKDGIPYGLLKKRDPDCLVLSGIFNLCRRFGRSPTSWKKAMTVLIHKKGERDDPSNWRPISLCSTMYKLYASCLAARITEWATTGGAISPAQKGFMPSEGCYEHNFLLQTVLQTTRRAQKQCAIAWLDLANAFGSIPHHHIFSTLREFGMPETFLRLIRELYEGCSTTIRSVEGETAEIPIRSGVKQGCPLSPIIFNLAMEPLLRAISDGANGFDLHEERVSILAYADDLVLTADDPERLQSMLDTIGRAANWTGLRFNAKKCASLHIDGSKRHSVLTTEFLVQGEPVIPLAEGQAYQHLGTPTGFRVQQTPEDTIREILQDAAKIDASLLAPWQKINALNTFLIPRIAFVLRGSTMAKVPLTKADNTIWQLVKKWLSLPQRASNELVYIAHWHGGANVPRMGDLCDIAVVTHAFRLLRCPDATVKNIATTALRAATAKRIAGSPSDQDVAAFLNGSLDGEFGRFRGDVASLWSRARNATRRLGKRLGCRWVWSEDRREPGVLVPQIGTEDNTIVSPGARGMLEKTLKAAVHALYVDTLKKKPDQGKAFEVTSKWDSSNHFLPAGSFTRFADWRFIHRARLNCVPLNGAVRHGNRDKRCRKCGYAMETLPHVLCSCKPHARAWQLRHNAVQDRLVKAITPYLGKITVNRAIPGTDSTLRPDIVVTDEDRKKIILVDVTIPFENRTPAFREARSRKLEKYAPLADTLRSKGYEVCTEALIAGALGAWDPYNERVLRTCGVGRRYAQLMRRLMVSDTIRWSRDIYTEHITGHRQYQE

SEQ ID NO: 25299 - protein, 858 aa, Chrysemys picta
MYRTNRLKAVREILDGPPSYCTIPPERLYNYFLGVFGGVPRNDAQRPECLRPLPRIPDADGLEADFTPKEVTARLSRTKNTAPGKDSIPYSLLKKRDPGCLLLSTIFNLCKRFGRSPTSWKKAMTVLIPKKGERDDPSNWRPISLCSTMYKLYASCLAARITEWATTGGAISPAQKGFMPSEGCYEHNFLLQTVIQTTRRTRRQCSIAWLDLANAFGSIPHHHIFDTLQEFGMPETFLHLIRELYEGCSTTIRSVEGETAEIPIHSGVKQGCPLSPIVFNLAMEPLLRAISDGGDGFDLHGERVSVLAYADDLVLIADDPERLQGMLDTIGRAADWTGLRFNAKKCASLHVDGSKRDSVLMTEFLIQGESVVPLAEGQAYQHLGTPTGFRVQQTPEDTIGGILQDVAKIDTSLLAPWQKINALNTFLIPRIAFVLRGSAVAKVPLNKADNAIRKLVKNWMSLPRRASNELVYIKHRHGGAGVPRMGDLCDVAVLTHAFRLLTCPDAKVKNVAMAALHAATEKRIGRPPSDQDVATFMSGSLDGDFARDRGDFASLWTRARIATRRLGKRLGCRWEWNEEQQELGVLIPRIGTEDNIIVTPGARGVLERSLKAAVHALYVDALKKKPDQGKVFEVTSKWDSSNHFLPTGSFTRFADWRFIHRARLNCVPLNGAIRHGNRDKRCRKCGYVNETLPHVLCCCKPHARAWQLRHNAVQDRLVKAINPRLGEITVNRAVPGTDSPLRPDIVVTDEVGKKIILVDVAIPFENRTPAFREARARKLEKYAPLADTLRTKGYEVHVDALLVGALGAWDPCNERVLRTCGVGRHYARLMRRLMVSDAIRWSRDIYIEHITGHRQYQE

SEQ ID NO: 25300 - protein, 1427 aa, Pelusios castaneus
MDEKITATPASSPSRSPPRIVPASYALDPPQEAHNSATHDATGLADSHAAISAPDLQEHNMADPCPSEAPSRDIESRVNAVLNYLRQNDTRTQTSAPDPATQDPAALTNPVTVPDGASSMGEPSDRLGATPADETGDTGDCIYLLYPLSKAALRCPICQPPREFHLLGGVTRHLRRIHNKGVAFRCITCGLPFTTQKKCKSHYTSCNKENLGTTRRRTTSTRIGKPQQTRAHAASPSRAPAAATPRPPILKQQQGSISHHLAETRPTPCPTHRIAAAASTTPTSTLASQGPAAKAPSAPSRIPLSRRLSMPGGQPSRNGPDSRRISAPTRMTTLYSSAKQTSMSPHTLPRTPAARSDSPDPGSQHPSIFPTSYVRGPAPGALVAFTVPNPASPDCESPSGAQEPRQPSDASRRSGVSPADPDPPQRSHTPQRTPSAGPTPQDANALTERAPEVPEDEGAQPACSPNAQPELAPTDLPDIPRPTTRLPTPWQLLWLERLRAAKTFDDLDPLVDEMTQGLSAEVKARSERTQEGSSPTRRPPANRHNRSAPRRRNTSRRYDPAAASRIQKLYRSNRAKAMREILDGPSSFCTIPPERLFTYFSNIFDRVALLTSGRPECLPPLPRIGDAEDLETDFTPEEVMTRLARTKNTAPGKDGVPYSILKRRDPGCLVLSALFNRCKEFCRTPSAWKKAMTVLVYKKGERDDPSNWRPISLCSTIYKLYASCLAARITTWSVNGGAISSVQKGFMSCEGCYEHNFILQTAIQTARRSRKQCAMAWLDLANAFGSMPHQHIFSTLQEFGMSATFLQLLRELYDGSTTTIRSIEGETAEIPIRSGVKQGCPLSPIIFNLAMEPLIRAIAEGPEGLDLHGKRVSILAYADDLVLVADDPKHLHNMLHTTSLIADWMGLRFNAKKCASLHLDGSKKDAAQPTSFQIQGEPVACLEDGQAYQHLGTPTGFRVQQTPDDTIQSILQDAGKIDASLLAPWQKVNALNSFLIPRIAFVLRGSAVAKVPLNKADGAIRRLVKRWLFLPLRASNELTYIDHKQGGANVPRKGDLCDIAVITHAFRLLTCPDPTVKNIATNALHEVAAKRIKRIPSNTDVTTYLSGSLEGEFGQDRGDISSLWTRARVATRRLGKRIGCRWSWCEERQELSVLVPRNRTEDRTIVPPNARGQLERILKAAVHALYVEDLKRKPDQGKVFELTSKWDASNHFLPEGSYTRFADWRFIHRARLNCVPLNGAVRHGHRDKRCRKCGYANETLPHVLCSCKLHSRAWQLRHNAVQARLVKAIPPHLGAVKVNSTVPGTDSLLRPDVVVTDEDQKKVIMVNITVPFENRSPAFLGARTRKEEKYAPLADTLRAKGYTVQIHALIVGALGAWDPANEGVLQACGVSKRYARLMRRLMVSDTIRWSRDIYIEHITGHRQYQEE

SEQ ID NO: 25301 - protein, 735 aa, Actinemys marmorata
MTVLIHKKGERDDPSNWRPISLCSTMYKLYASCLAARITEWATTGGAISPAQKGFMPSEGCYEHNFLLQTVIQTTRRTRKQCAIAWLDLANAFGSIPHHHIFDTLQEFGMPEAFLHLIRELYEGCSTTIRSVEGETAEIPIHSGVKQGCPLSPIVFNLAMEPLLRAISDGTDGFDLHGERVSVLAYADDLVLIADDPERLQGMLDTIGRAADWTGLRFNAKKCASLHVDGSKRDPVLMTEFLIQGESVVPLAEGQAYQHLGTPTGFRVRQTPEDTIREILQDATKIDTSLLAPWQKINALNTFLIPRIAFVLRGSAVAKVPLNKADGTIRRLVKEWLSLPRRASNELIYIKHRHGGAGVPRMGDLCDIAVITHAFRLLTCPDTKVRNVAMTALHAATEKRIGRPPSDRDAATFLSGSLDGDFARDRGDLASLWSRARNATRRLGKRLGCRWEWNEERQELGVLIPRIGTEDNTIVAPGARGVLERSLKAAVHALYVDTLKKKPDQGKAFEVTSKWDSSNHFLPTGSFTRFADWRFIHRARLNCVPLNGAIRHGNRDKRCRKCGYVTETLPHVLCSCKPHARAWQLRHNAVQDRLVKAIDPRLGEVTVNRTVPGTDSPLRPDIVVTDEVGKKIILVDVTIPFENRTPAFRVARARKLEKYAPLADALRSKGYEVHTDALLVGALGAWDPCNERVLKTCGVGRHYARLMRRLMVSDTIRWSRDIYTEHITGHRQYQE

SEQ ID NO: 25302 - protein, 957 aa, Emydura subglobosa
MAAEIAAGKPDQGSAPGPRREPANRDDPGKAPERGNANRRYDPAVASRIQKLYRANRVKAMREVLDGPSAFCQIPSGRLFAYYKGVFDRADPPSGERPACVAPLPRVVDADDLQAAFAPGEVASRLSRTKNTAPGKDGIRYGFLKKKDPGCLVLSTLFERCRQFRRTPTSWKKAMTVLVYKKGERDDPSNWRPISLCSTIYKLYASCLAARITDWAVGGGAVSPVQKGFMSCEGCYEHNFILQSVLETARRDRRRCVMAWLDLANAFGSMPHRHVFATLEEFGMPGDFLQLLRELYDGCTTTIRSTEGETAEIPIRSGVKQGCPLSPIIFNLAMEPLIRAVANDPRGFELHGEKVNILAYADDLVLVAEDPESLRGMLAATSQAADWMGLRFNAKKCASLDVDGANKASVQATSFRIQGDPMIPLEEGQAYQHLGTPTGFRVRQTPEDTIQEILRDASSIDASLLAPWQKINALNTFLIPRISFVLRGSAVAKVPLNKADRVIRQLVKGWLFLPQRASNELTYIGHKQGGANVPRMGDLCDIAVITQAFRLLTCPDATVSGIAAKALEKAVAKRIRRAPTSDDIATYLSGSLDGEFAQDGGDISSLWSRARNATRRLGKRLGCRWTWCEERRELSVLVPRIRVDGHTIVTPRARCMLERCLKASVHALYLESLKKKPDQGKAFEVTSKWDASNHFLAGGGYTRFADWRFIHRARLNCLPLNGAIRHGIRDKRCRRCGYVNETLPHVLCGCKPHSRAWQLRHNAVQDRLAKAIPAHRGSVAVNCTIPGTDSPLRPDIVITDEDRKKIVMVDVTVPFENRSPAFHAARARKEEKYAPLADTLRERGYDVQIHALIVGALGAWDPRNEPVLWACGVGRRYAKLMRRLMVSDSIRWSRDIYIEHVTGHRQYQEERDGAPPQDSASGPADPTDDNHDRRGGRRGGGHTNGRGGGHTNGRGGC

SEQ ID NO: 25303 - protein, 1073 aa, Chrysemys picta
MGSTPQPTPQTTAARGVNATTGPQHQTPIIRRTGTAPEATRPVPAARRSHVSATTPQTAAAHGRPGVTPAPLDPVQIPPTTSGDPTPPTTMPRDPTEESPDPQVRQPLDYTTNSRPTPTEEPEDQRPKTRPATPWQAAWIAELQAAASFAEFDSLVDRLTRELSAEIAFRRTPNQETARPAPRQPAPHRDNNTRGAGRRNTGRRFDPAAASRIQKMYRTNRLKAVREILDGPPSYCTIPPERLYNYFLGVFGGVPRNDAQRPECLRPLPRIPDADGLEADFTPKEVTARLSRTKNTAPGKDSIPYSLLKKRDPGCLLLSNIFNLCKRFGRSPTSWKKAMTVLIHKKGERDDPSNWRPISLCSTMCKLYASCLAARITEWATTGGAISPAQKGFMPSEGCYEHNFLLQTVLQTTRRTRRQCSIAWLDLANAFGSIPHHHIFDTLQEFGMPETFLHLIRELYEGCSTTIRSVEGETAEIPIHSGVKQGCPLSPIVFNLAMEPLLRAISDGGDGFDLHGERVSVLAYADDLVLIAHDPERLQGMLDTIGRAADWTGLRFNAKKCASLHVDGSKRDSVLMTEFLIQGESVVPLAEGQAYQHLGTPTGFRVQQTPEDTIGGILQDVAKIDTSLLAPWQKINALNTFLIPRIAFVLRGSAVAKVPLNKADNAIRKLVKNWMSLPRRASNELVYIKHRHGGAGVPRMGDLCDIAVLTHAFRLLTCPDATVKNVATTTLHAATEKRIGRPPSDRDVATFLSGSLDGDFARDRGDFASLWTRARNATRRLGKCLGCRWEWNEERQELGVLIPRIGTEDNIIVTPGARGVLERSLKAAVHALYVDALKKKPDQGKVFEVTSKWDSSNHFLPTGSFTRFADWRFIHRARLNCVPLNGAIRHGNRDKRCRKCGYVNETLPHVLCCCKPHARAWQLRHNAVQDRLVKAINPRLGEININRAVPGTDSPLRPDIVVTDEVGKRIILVDVAIPFENRTPAFREARARKLEKYAPLADTLRTKGYEVHVDALLVGALGAWDPCNERVLRTCGVGRHYARLMRRLMVLDAIRWSRDIYIEHITGHRQYRE

SEQ ID NO: 25304 - protein, 1021 aa, Actinemys marmorata
MTTPQMTAAHGRPGITPAPIDPVQFPPTTSGHSTPPATTPRDPTEGSPDPQARQPADHATNSLPTPTEEPEDQRPKTRPATPWQAAWIKELQAAASFTEFDPLIDRLTRELSAEIAFRRTPNQETTRPAPRRPAPHCDTNTRGVGRRNTGRRFDPAAASRIQKLYRTNRLKAVREVLDGPPSYCTIPPERLYNYFHGVFGGVPRNDAQRPECLRPLPRITDADDLEADFTPKEVTARLSRTKNTAPGKDSIPYSLLKKRDPGCLVLSSIFNLCKRFGRSPTSWKKAMTVLIHKKGERDDPSNWRPISLCSTMYKLYASCLAARITEWATTGGAISPAQKGFMPSEGCYEHNFLLQTVIQTTRRTRKQCAIAWLDLANAFGSIPHHHIFDTLQEFGMPEAFFHLIRELYEGCSTTIRSVEGETAEIPIHSGVKQGCPLSPIVFNLAMEPLLRAISDGTDGFDLHGERVSVLAYADDLVLIADDPERLQGMLDTIGRAADWTGLRFNAKKCASLHVDGSKRDPVLMMEFLIQGESVVPLAEGQAYQHLGTPTGFRVRQTPEDTIREILQDATKIDTSLLAPWQKINALNTFLIPRIAFVLRGSAVAKVPLNKADNTIRRLVKGCLSLPRRASNELIYIKHRHGGAGVPHMGDLCDIAVITHAFRLLTCPDTKVKNVATTALHAATEKRIGRPPSDRDVATFLSGSLDGDFARDRGDLASLWSRARNATRRLGKRLGCRWEWNEERQELGVLIPRIGTEDNTIVAPGARGVLERSLKAAVHTLYVDTLKKKPDQGKAFEVTSKWDSSNHFFPTGSFTRFADWRFIHRARLNCVPLNSAIRHGNRDKRCRKCGYVTETLPHGLCSCKPHARAWQLRHNAVQDRLVKAIDPRLGGVTVNRTVPGTDSPLHPDIVVTDVVGKKIILVDVTIPFENRTPAFRVARARKLEKYAPLADALRSKGYEVHTDALLVGALGAWDQCNERVLKTCGVGRHYARLMRCLMVSDTIRWSRDIYTEHITGHRQYQE

SEQ ID NO: 25305 - protein, 1100 aa, Chrysemys picta
MLIHIQSHTHTHTHTKMFCSCWIVTSPECSLSSQPAPQTAAARGVNATTGPRHQTPIIRRTGTAPEATRPVPAARRSHVPVTTPQTAAAHGRPGVTPAPFDPVQIPPTTSDDPTPPATTPRDPTEESPDPQVRQPLDHTANSRPTPTEEPEDQRPKTRPATPWQAAWIEELQATASFAEFDSLVDRLTRELSAEIAFRRTPNQETTRPAPRRPAPHRDNNTRGAGRRNTGRRFDPAAASRIQKMYRTNRLKAVREILDGPPSYCTIPPERLYNYFLGVFGGVPRNDAQRPECLRPLPRIPDADGLEADFTPKEVTARLSRTKNTAPGKDSIPYSLLKKRDPGCLLLSTIFNLCKRFGRSPTSWKKAMTVLIPKKGERDDPSNWRPISLCSTMYKLYASCLAARITEWATTGGAISPAQKGFMPSEGCYEHNFLLQTVIQTTRRTRRQCSIAWLDLANAFGSIPHHHIFDTLQEFGMPETFLHLIRELYEGCSTTIRSVEGETAEIPIHSGVKQGCPLSPIVFNLAMEPLLRAISDGGDGFDLHGERVSVLAYADDLVLIADDPERLQGMLDTIGRAADWTGLRFNAKKCASLHVDGSKRDSVLMTEFLIQGESVVPLAEGQAYQHLGTPTGFRVQQTPEDTIGGILQDVAKIDTSLLAPWQKINALNTFLIPRIAFVLRGSAVAKVPLNKADNAIRKLVKTWMSLPRRASNELVYIKHRHGGAGVPRMGDLCDIAVLTHAFRLLTCPDATVKNVATTALHAATEKRIGRPPSDRDVATFLSSSLDGDFARDRGDFASLWTRARNATRRLGKRLGCRWEWNEERQELGVLIPRTGTEDNIIVTPGARGVLERSLKAAVHALYVDALKKKPDQGKVFEVTSKWDSSNDFPTGSFTRFADWRFIHRAQLNCVPLNGAIRHGNRDKRCRKCGYVNETLPHVLCCCKPHARAWQLRHNAVQDRLVKAINPRLGEITVNRAVPGTDSPLRPDIVVTDEVGKKIILVDVAIPFENRTPAFREARARKLEKYAPLADTLRTKGYEVHVDALLVGALGAWDPCNERVLRTCGVGRHYARLMRRLMVSDAIRWSRDIYIEHITGHRQYQE

SEQ ID NO: 25306 - protein, 1595 aa, Gopherus evgoodei
MFGVPGGPCPAPRLLPPKLLGDPDPAPHLLLPEQPGEPRGAPLQPPLWSPGDSCPAPRLPPEQTEEPHHVLRPLTPETLGDPLPMPPPQVQPGEPCYMLWPLHLERPGELCPVSRLPLPEEPRGTLLPPLLWPRGDPWLPCPEPPGEPCGVSWLLLPGPPGDPRPGPLSPRLAAPGEPLDVFQTSEVRPSTTTPLQIPQDLPAAHRPPQPPRDASPVFLRSPITPPAPQQLRDDSPDPLRSPDTPTAPQHLTPPRSKSPDPLQDTCTPQELQPPGGILNVPETQLPPKDAAPLASCAPENDQEGPNAPQDGCFAPDTVYLQYPLTADALICPICLPPRRFHLLGGVTRYLKRCHGQSTAFSCARCSLPFECQRKCKAHQASCTKASKKTTPVLRHPVPQPAAPVPKRSRATVLTAAQKPTPAPEPADQNPATGTTNAATGSVDRAPTNRGPVTSSQVARKISELRHLSAPSNLHEPAPRRASAPPRVAIRNPTPRGTNTGSRPALRAPATRGANATPQPTLRTPPGRGQGPPPRPANIGDPTTTSGPQPQNPTIRESDAAPTGTSPLSANRRPSTNTATPRAMTTRERPDADAAPAEPSRAPPTSNATTPPTAMPRGPTERSPELQGRRPAGQTANPLPARTEEPEDRQPTIRPATPWQAAWIEKLRATASFEEFDQLINELTCELSTEIVSRRTPNQEAARPTSRRPAPNRDATTRGAGRRNPSHRYNLAAASQIQKMYRTNRLKAMRKVLDGPSSYCTIPPERLYRYFLEVFADKPRNDVQRPECLHPLPRITNADGLEADFTPKEVMARLSRTKNTAPGKDGIPYSLLKKRDPGCHVLSGIFNLCRCFGRPPTSWKKAMTVLIYKKGERDDPSNWRPISLCSTMYKLYASCLAARITEWATTGGAISPAQKGFMPSEGCYEHNFLLQTVLQTTRRAHNQCAIAWLDLANAFGSIPHHHIFSTLREFGMPETFLRLIRELYKGCSTTIRSVEGETAEIPIRSGVKQGCPLSPIIFSLAMEPLLRAISDGADGFDLHGERVNVLAYADDLVLIADDPERLQGMLNTIGRVAEWTGLRFNAKKCASLHVNCSKKNSVQATDFLIQGESVVPLAEGQAYQHLGTPTGFRVRQTPEDTIQEILQDASRIDVSLLAPWQKIDALNTFLIPRIAFVLRGSAVAKVPLNKADNVIRQLVKKWLSLPQRASNELVYIAHRHGGANVPRMGDLCDIAVITHAFRLLTCPDAVVKKVATTALCSATAKRIDRAASGQDMATFLSGSMDDDFARDRGDIASLWTRARNATRRLGKRLGCRWVWSEDRRELGVLIPWTETEDTVISPGARGTLERSLKAAVRALYLGTLKKKPDQGKVYEVTSKWDSSNHFLHSGSFIRFADWRFIHRARLNCVPLNGAVRHGTRDKRCRKCGYAMETLPHVLCSCKPHARAWQLRHNAIQDRLVKAIAPQLGEKVTNRTVPGTDSPLRPDIVVMDEARKKIILVDVTVPFENRTLAFREARARKLEKYTPLADTLRSKGYEVYTDALIVGALGAWDPCNERVLRACGVGRRYAQLMRRLMVSDTIRWSRDIYTEHVTGHRQYQE

SEQ ID NO: 25307 - protein, 1013 aa, Gopherus evgoodei
MTTRERPDADAAPAEPSRAPPTNNATTPLTAMPRGPTERSPELQGRRPAGQTANPLPARTEEPEDRQPTIRPATPWQAAWIEKLRATASFEEFDQLINELTCELSTEIVSKRTPNQEAARPTSRRPAPNRDATTRGAGRRNPSRRYDPAAASQIQKLYRTNRLKAMRKVLDGPSSYCTIPPERLYRYFLEVFTDKPRNDVQRPECLHPLPRITNADGLEADFTPKEVMARLSRTKNTAPGKDGIPYSLLKKRDPGCHVLSGIFNLCRCFGWPPTSWKKAMTVLIYKKGERDDPSNWRPISLCSTMYKLYASCLAARITEWATTGGAISPAQKGFMPSEGCYEHNFLLQTVLQTTRRAHNQCAIAWLDLANAFGSIPHHHIFSTLQEFGMPETFLRLIRELYKGCSTTIRSVEGETTEIPIRSGVKQGCPLSPIIFSLAMEPLLRAISDSADGFDLHGERVNVLAYADDLVLIADDPERLQGMLNTIGRVAEWTGLRFNAKKCASLHVNCSKKNSVQATDFLIQGESVVPLAEGQAYQHLGTPTGFRVRQTPEDTIQEILKDAARIDVSLLAPWQKIDALNTFLIPRIAFVLRGSAVAKVPLNKADNVIRQLVKKWLSLPQRASNELVYIAQRHGGANVPHMGDLCDIAVVTHAFRLLTCPDAVVKNVATTALRSATAKRIDRAASGQDMATFLSGSMDGDFARDRGDIASLWTRARNATRRLGKRLGCRWVWSEDQRELGVLIPRTETEDTVISPGARGTLERSLKAAVRALYLGTLKKKPDQGKVFEVTSKWDSSNHFLHSGSFIRFTDWRFIHCARLNCVPLNGAVRHGNRDKRCRKCGYAMETLPHVLCSCKPHARAWQLRHNAIQDRLVKAIAPHLGEKVTNRTVPGTDSPLRPDIVVTDEAQKKIILVDVTVPFENRTLAFREARARKLEKYTPLADTLRSKGYEIYIDALIVGALGAWDPCNERVLRACGVGRRYAQLMRRLMVSDTIRWSRDIYTEHVNGHRQYQE

SEQ ID NO: 25308 - protein, 1188 aa, Gopherus evgoodei
MLTAAQKPTPAPEPADQNPATGTTNAAMGSVDRAPTNRGPVTSSQVARKISELRHLSAPSNLHEPVPRRASAPPRVAIRNPTPRGTNTGSRPALRAPATRGANATPQPTLRTPPGRGTGATPQTAPRTVNIGDPTATTGPQPQTPTARESDAAPTGTSPLSANRRPPTPTATPRARTTRERPDADAAPAEPSRAPPTNNATTPPTAMPRGPTERSRELQGRRPPGQTANPLPARTEEPEDRQPTIRPATPWQAAWIEKLRATASFEEFDQLISELTCELSTEIVSKRTPNQEAARPTSRRPAPNHNATTRGAGRRNSSRRYDPAAASQIQKLYRTNRLKAMRKILDGPSSYCTIPPERLYRYFLEVFADKPRNDVQRPECLHPLPRITNADGLEADFTPKEVMARLSRTKNTAPGKDGIPYSLLKKRDPGCHVLSGIFNLCRCFGRPPTSWKKAMTVLIYKKGERDDPSNWRPISLCSTMYKLYASCLAARITEWATTGGAISPAQKGFMPSEGCYEHNFLLQTVLQTTRRAHNQCAIAWLDLANAFGSIPHHHIFSTLREFGMPETFLRLIRELYKGCSTTIRSVEGETAEIPIRSGVKQGCPLSPIIFSLAMEPLLRAISDGADGFDLHGERVNVLAYADDLVLIADDPERLQGMLNTIGRVAEWTGLRFNAKKCASLHVNCSKKNSVQATDFLIQGESVVPLAEGQAYQHLGTPTGFRVRQTPEDTIQEILQDAARIDVSLLAPWQKIDALNTFLIPRIAFVLRGSAVAKVPLNKADNVIRQLVKKWLSLPQRASNELVYIAHRHGGANVPRMGDLCDIAVVTHAFRLLTCPDAVVKKVATTALCSATAKRIDRAASGQDMATFLSGSMDGDFARDRGDIASLWTRARNATRRLGKRLGCRWVWSEDRGELGVLIPRTETEDTVISPGARGTLERSLKAAVRTLYLGTLKKKPDQGKVYEVTSKWDSSNHFLHSGSFIRFADWRFIHRARLNCVPLNGAVRHGTRDKRCRKCGYAMETLPHVLCSCKPHARAWQLRHNAIQDRLVKAIAPHLGEKVTNRTVPGTDSPLRPDIVVTDEARKKIILVDVTVPFENRTLAFREARARKLEKYTPLADTLRSKGYEVYTDALIVGALGAWDPCNERVLRACGVGRRYAQLMRRLMVSDTIRWSRDIYTEHVTGHRQYQE

SEQ ID NO: 25309 - protein, 2028 aa, Gopherus evgoodei
MESPTTISEKIDAALQIYSSSETALHTDTADLHMHCSDATLEENSYSLSSTDTLSRIAAAPAHSSARKTRQKPAPKTRATSKDGNTRSQRKKTPLDTSSGKISSRKPALRDPTPRRKEVTTASLRRGTRRTSPAPPVQDTEHRPTAPETDDAGRVPPRIQAQEANRPPSGKDAAGAAPPSTKDQDSDDPRAGKDAAGGAPATTEDQDASHNPTWRDDQQLQGAYLSIHLPWEDSSAEHQQLQRDYPPLPEEETPTNQLLPGSSKCPTTPQPLAPWEDRRPAPLRGDPCPEPLLRALPGDSHGVETPGSPCPTRLLPTGSLHLPPQRCSGRLLPEPPGNPGPTLCLPLLGRPGEPCSAPPGSPSGSCPAAISPLPGGPRGMPRMPVTEPPGDSCPAPRPLPPELPVNSGPAPGLPLSGQPGEPCGALLPPMFGVPGGPCPAPRLLPPKLLGDPDPAPHLLLPEQPGETRGAPLQPPLWSPGDSCPAPRLPPEQIEEPHHVLRPLTPEPLGDPLPMAPQQVQPGEPCYMLWPLHLEQPGKLCPVSRVPLPEEPHGTLLPPLLWPRGDPWLPCPEPPGEPCGAPWPLLPGPPGDLRPAPLPPRLAAPGEPLDVFQTSEVRPSTTTLLQIPQDLPAAHRPPQPPRDASPVLLRSPITPPAPQQLRDDSPAPLRSPDTPTAPQHLTLPRSKSPDPLQDTCTPQELQPPGGILNAPETQLPPKDAAPLASCAPENDQEGPNAPQDGCFAPDTVYLQYPLTADALICPICLPPRRFHLLGGVTRHLKRCHGQSTAFSCARCSLPFECQRKCKAHQASCTKTSKKTTPVLRHPVPQPAAPVPKRSRATVLTAAQKPTPAPEPADQNPATGTTNAATGSVDRAPTNRGPVTSSQVARKISKLRHLSAPSNLHEPAPRRASAPPRVAIRNPTPRGTNTGSRPALRAPATRGANATPQPTLRTPPGQGTGATPQTAPRTVNIGDPTAMTGPQPQTPTVRESDAAPTGTSPLSANRRPSTPTATPRAMTTRERPDADAAPAEPSRAPPTNNATTPPTAMPRGPTERSPELQGRRPASQTANPLPTRTEEPEDRQPTIRPATPWQAAWIEKLRATASFEEFDQLINELTCELSTEIVSKRTPNQEAARPTSRRPAPNRDATTRGAGRRNPSHRYDPAAASQIQKLYRTNRLKAMRKVLDGPSSYCTIPPERLYHYFLEVFADKPRNDVQRPECLHPLPRITNADGLEADFTPKEVMARLSRTKNTAPGKDGIPYSLLKKRDPGCHVLSGIFNLCRCFGRPPTSWKKAMTVLIYKKGERDDSSNWRPISLCSTMYKLYASCLAARITEWATTGGAISPAQKGFMPSEGCYEHNFLLQTVLQTTRRAHNQCAIAWLDLANAFGSIPHHHIFSTLREFGMPETFLRLIRELYKGCSTTIRSVEGETAEIPIRSGVKQGCPLSPIIFSLAMEPLLRAISDGADGFDLHGKRVNVLAYADDLVLIADDPERLQGMLNTIGRVAEWTGLRFNAKKCASLHVNCSKKNSMQATDFLIQGESVVPLAEGQAYQHLGTPTGFRVRQTPEDTIQEILQDAARIDVSLLAPWQKIDALNTFLIPRIAFVLRGSAVAKVPLNKADNVIRQLVKKWLSLPQRASNELVYIAHRHGGANVPRMGDLCDIAVVTHAFRLLTCPDAVVKNVAMTALRSATAKRIDRTASGQDMATFLSGSMDGDFARDRGDIASLWTRARNATRRLGKRLGCRWVWSEDRRELGVLIPRTEMEDTVISPGARGTLERSLKAAVRALYLGTLKKKPDQGKVFEVTSKWDSSNHFLHSGSFIRFADWRFIHRARLNCVPLNGAVRHGNRDKRCRKCGYALETLPHVLCSCKPHARAWQLRHNAIQDRLVKAIAPHLGEKVTNRTVPGTDSPLRPDIVVTDEARKKIILVDVTVRFENRTLAFREARARKLEKYTPLADTLRSKGYEVYTDALIVGALGAWDPCNERVLRACGVGRCYAQLMRRLMVSDTIRWSRDIYTEHVTGHRQYQE

SEQ ID NO: 25310 - protein, 2028 aa, Gopherus evgoodei
MEFPAAISEKIDAALETFSSSETALHTDTADLHMHCSDATLEENFHSLSSTAAVSRIAAVPAHSSTRKTQQKPAPKTQANSKDGNTKSQRKKTPLDTSSGKISSRKPALRDPIPRRKEVTTASLRRGTRRTSPAPPVQDAEHRPTAPETDHAGGVPPRIQAQDANRPPAGKDAAGGAPPSTKDQDSDGPPAGKDAAGGAPATTEDQDAAHSPTWRDDQQLQGAYLSIHLPWEDSSAEHQQLQRDYPPLPEEETPTNQLLPGSSKCPTTPQPLVPWEDPRPAPLRGDPCPEPLLRALPGDSHGVETPGSPCPTRLLPTGSLHLPPQRCSGRLLPEPPGNPSPTLCLPLLGRPGEPCRAPPGSPSGSCPAAISPLPGGPRGMPRMPVTEPPGDSCPAPRPLPPELPVNSGPAPGLPLSGQPGEPRGALLPPLFGVPGGPCPAPRLLPPKLLGDPDPAPHLLLPEQPGEPRGAPLQPPLWSPGDSCPAPRLPPEQIEEPHHVLRPLTPEPLGDPLPVAPQQVQPGEPCYMLWPLHLEQPGKLCPVSRVPLPEEPRGTLLPPLLWPRGDPWLPCPEPPGEPCGAPWPLLPGPPGDPRPAPLLLRLAAPGEPLNVFQTSEVRPSTTTPLQIPQDLPAAHRPPQPPRDASPVLLRSPITPPAPQQPRDDSPAPLRSPDTPTAPQHLTPPRSKSPDPLQDTCTPQELQPPGGILNVPETQLPPKDAAPLASCAPENDQEGPNTPQDGCFAPDTVYLQYPLTADALICPICLPPRRFQLLGGVTRHLKRCHGQSIAFSCASCSLPFECQRKCKAHQASCTKASKKTTPVLRHPAPQPAAPVPKRSRATMLTAAQKPTPAPEPADQNPATGTTNAAMGSVDRAPTNRGPVTSSQVARKISELRHLSAPSNLHEPVPRRASAPPRVAIRNPTPRGTNTGSRPALRAPATRGANATPQPTLRTPPGRGTGATPQTAPRTVNIGDPTATTGPQPQTPTARESDAAPTGTSPLSANRRPPTPTATPRARTTRERPDADAAPAEPSRAPPTNNATTPPTAMPRGPTERSPELQGRRPAGQTANPLPARTEEPEDRQPTIRPATPWQAAWIEKLRATASFEEFDQLINELTCELSTEIVSKRTPNQEAARPTSRRPAPNCDATTRGAGRRNPSHRYDPAAASQIQKLYRTNRLKAMRKVLDGPSSYCTIPPERLYRYFLEVFADKPRNDVQRPECLHTLPRITNADGLEADFTPKEVMARLSRTKNTAPGKDGIPYSLLKKRDPGCHVLSGIFNLCRCFGRPPTSWKKAMTVLIYKKGERDDPSNWRPISLCSTMYKLYASCLAARITEWATTGGAISPAQKGFMPSEGCYEHNFLLQTVLQTTRRAHNQCAIAWLDLANAFGSIPHHHIFSTLREFGMPETFLRLIRELYKGCSTTIRSVEGETAEIPIRSGVKQGCPLSPIIFSLAMEPLLRAISNGADGFDLHGERVNVLAYADDLVLIADDPERLQGMLNTIGRVAEWTGLRFNAKKCASLHVNCSKKNSVQATNFLIQGESVVPLAEGQSYQHLGTPTGFRVRQTPEDTIQEILQDAARIDVSLLAPWQKIDALNTFLIPRIAFVLRGSAVAKVPLNKADNVIRQLVKKWLSLPQRASNELVYIAHRHGGANVPRMGDLCDIAVVTHAFRLLTCPDAVVKNVATTALRSATAKQIDRAASGQDMATFLSGSMDGDFARDRGDIASLWTRARNATRRLRKRLGCRWVWSEDRRELGVLIPRTETEDTVISPGARGTLERSLKAAVRALYLGTLKKKPDQGKVFEVTSKWDSSNHFLHSGSFIRFADWRFIHRARLNCIPLNGAVRHGNLDKRCRKCGYAMETLPHVLCSCKPHARAWQLRHNAIQDRLVKAIAPHLGEKVTNRTVPGTDSPLRPDIVITDEARKKIILVDVTVPFENRTLAFREARARKLEKYTPLADTLRSKGYEVYTDALIVGALGAWDPCNERVLRACGVGRRYAQLMRRLMVSDTIRWSRDIYTEHVTGHRQYQE

SEQ ID NO: 25311 - protein, 2050 aa, Gopherus evgoodei
MESSAAMFEKIDAALEIYSSSETALHTDTADLHMHCSDATLEENSHSLSSTDTLSRIAAAPAHSSARKTQPKPALKTRATSKDGNTRSQRKKTPLDTSSGKISSRKPALRDPTPRRKEVTTASLRRGTRRTSPAPPVQDAEHRPTAPETDHAGGVLPRIQAQDANRPPAGKDAAGGAPRSTKDEDSDGPSAGKDAAGGAPLSTKDEDSDGPPAGKDAAGGAPATTDDQDAAHSPTWRDDQQLQGAYLSIHLPWEDSSAEHQQLQRDYPPLPEEETPTNQLLPGSSKCPTTPQPLVPWEDPRPAPLRGDPCPEPLLRALPGDSHGVETPGSPCPTRLLPTGSLHLPPQRCSGRLLPEPPGNPSPTLCLPLLGRPGEPCRAPPGSPGGSCPAAVSPHPGGPRGMPRMPVTEPPGDSCPAPRPLPPELPVNSGPAPGLPLSGQPGEPRGALLPPLFGVPGGPCPAPLLLPPKLLGDPDPAPHLLLPEQPGEPRGAPLQPPLWSPGDSCPAPRLPPEQIEEPHHVLRPLTPEPLGDPLPMAPQQVQPGEPCYMLWPLHLEQPGKLCPVSQVPLPEEPRGTLLPPLLWPRGDPWLPCPEPPGEPCGAPWPLLPGPPGDPRPAPLPLRLAAPGEPLNVFQTSEVRPSTTTPLQIPQDLPTAHRPPQPPRDASPVLLRSPITPPAPQQPRDDSPAPLRSPDTPTAPQHLTPPRSKSPDPLQDTCTPQELQPPGGILNVPETQLPPKDAAPLASCAPENDQEGPNTPQDGCFVPDTVYLQYPLTADALICPICLPPRRFQLLGGVTRHLKRCHGQSIAFSCASCSLPFECQRKCKAHQASCTKASKKTTPVLRHPAPQPAAPVPKRSRATMLTAAQKPTPAPEPADQNPATGTTNAAMGSVDRAPTNRGPVTSSQVARKISELRHLSAPSNLHEPVPRRASAPPRVAIRNPTPRGTNTGSRSALRAPATRGANATPQPTLRTPPGRGTGATPQTAPRTVNIGDPTTTTGPQPQTPTARESDAAPTGTSPLSANRRPPTPTATPRARTTRERPDADAAPAEPSRAPPTNNATTPPTAMPRGPTERSPELQGRRPAGQTANPLPARTEEPEDRQPTIRPATPWQAAWIEKLRATASFEEFDQLINELTCELSTEIVSKRTPNQEAARPTSRRPAPNRDATTRGAGRRNPSHRYDPAAASQIQKLYRTNRLKAMRKVLDGPSSYCTIPPERLYRYFLEVFADKPRNDVQRPECLHPLPRITNADGLEADFTPKEVMARLSRTKNTAPGKDGIPYSLLKKRDPGCHVLSGIFNLCRCFGRTPTSWKKAMTVLIYKKGERDDPSNWRPISLCSTMYKLYASCLAARITEWATTGGAISPAQKGFMPSEGCYEHNFLLQTVLQTTRRAHNQCAIAWLDLANAFGSIPHHHIFSTLREFGMPETFLRLIRELYKGCSTTIRSVEGETAEIPIRSGVKQGCPLSPIIFSLAMEPLLRAISNGADGFDLHGERVNVLAYADDLVLIADDPERLQGMLNTIGRVAEWTGLRFNAKKCASLHVNCSKKNSVQATDFLIQGESVVPLAEGQAYQHLGTPTGFRVRQTPEDTIQEILQDAARIDVSLLAPWQKIDALNTFLIPRIAFVLRGSAVAKVPLNKADNVIRQLVKKWLSLPQRASNELVYIAHRHGGANVPRMGDLCDIAVVTHAFRLLTCPDAVVKNVATTALRSATAKRIDRAASGQDMATFLSGSMDGDFARDRGDIASLWTRARNATRRLRKRLGCRWVWSEDRRELGVLIPRTETEDTVISPGARGTLERSLKAAVRALYLGTLKKKPDQGKVFEVTSKWDSSNHFLHSGSFIRFADWRFIHRARLNCVPLNGAVRHGNRDKRCRKCGYAMETLPHVLCSCKPHARAWQLRHNAIQDRLVKAIAPHLGEKVTNRTVPGTDSPLRPDIVVTDEARKKIILVDVTVPFENRTLAFREARARKLEKYTPLADTLRSKGYEVYTDALIVGALGAWDPCNERVLRACGVGRRYAQLMRRLMVSDTIRWSRDIYTEHVTGHRQYQE

SEQ ID NO: 25312 - protein, 2028 aa, Gopherus evgoodei
MESPAAISEKIDAALETFSSSETALHTDTADLHMHCSDATLEENFPSLSSTDTLSRIAAVPAHSSIRKTQQKPAPKTQANSKDGNTKSQRKKTPLDTSSGKISSRKPALRDPIPRRKEVSTASLRRGTRRTSPAPPVQDTEHRPTAPETDDAGKVPVRIQAQDAYHPPAGKNADGGAPPSTKDQDSDGPPAGKDAARGAPATTEDQDAAQSPTWRDDQQLQGAYLPIHLPWEDSSTEHQQLQRDYPPLPEEETPTNQLLPGSSKCPTTPQPLAPWEVPCPAPLRGDPCPEPLLRALPGDSHGVEMPRSPCPTRLLPTGSLHLPPQRCSGQLLPEPPGNPGPTLCLPLLGRPGEPCITPPRSPGSSCPAAIWPLPGGPCGMPRLPVTEPPGDSCPAPRPLPPELPVNSGPAPGLPLSGQPGEPRGALLPPMFGVPGGPCPAPRLLPPKLLGDPDPAPHLLLPEQPGEPCGAPLQPPLWSPGDSCPAPRLPPEQTEEPHHVLRPLTPEPLGDPLPMPPPQVQPGEPCYMLWPLHLERPGELFPVSRVPLPEEPRGTLLPPLLWPRGDPWLPCPEPPGEPCGAPWPQLPGPPGDPRPAPLPPRLAAPGEPLDVFQISEVHSSTTTPLQIPQDLHAAHRPPQPPRDASPVLLRSPITPPAPQQPRDDSPAPLRSPDTPTAPQHLTPPRSKSPDPLQDTCTPQELQPPGGILNVPETQLPPKDAAPLASCAPENDQEGPNTPQDGCFAPDTVYLQYPLTADALICPICLPPRRFQLLGGVTRHLKRCHGQSIAFSCARCSLPFECQRKCKAHQASCTKASKKTTPVLRHPAPQPAAPVPKRSRATMLTAAQKPTPAPEPADQNPATGTTNAAMGNVDRAPTNRGPVTSSQVARKISELRHLSAPSNLHDPVPRRASAPPRVAIRNPTPRGTNTGSRPALRAPATRGANATPQPTLRTPPGRGTGATPQTAPRTVNIGDPTATTGPQPQTPTARESDAAPTGTSPLSANRRPPTPTATPRARTTRERPDADAAPAEPSRAPPTNNATTPPTAMPRGPTERSRELQGRRPAGQTANPLLARTEEPEDRQPTIRPATPWQAAWIEKLRATASFEEFDQLINELTCELSTEIVSKRTPNQEAARPTSRRPAPNHNATTRGAGRRNSSRRYDPAAASQIQKLYRTNRLKAMRKILDGPSSYCTIPPERLYRYFLEVFADKPRNDVQRPECLHPLPRITNADGLEADFTPKEVMARLSRTKNTAPGKDGIPYSLLKKRDPGCHVLSGIFNLCRCFGRPPTSWKKAMTVLIYKKGERDDPSNWRPISLCSTMYKLYASCLAARITEWATTGGAISPAQKGFMPSEGCYEHNFLLQTVLQTTRRAHNQCAIAWLDLANAFGSIPHHHIFSTLREFGMPETFLRLIRELYKGCSTTIRSVEGETAEIPIRSGVKQGCPLSPIIFSLAMEPLLRAISDGADGFDLHGERVNVLAYADDLVLIADDPERLQGMLNTIGRVAEWTGLRFNAKKCASLHVNCSKKNSVQATDFLIQGESVVPLAEGQAYQHLGTPTGFRVRQTPEDTIQEILQDAARIDVSLLAPWQKIDALNTFLIPRIAFVLRGSAVAKVPLNKADNVIRQLVKKWLSLPQRASNELVYIAHRHGGANVPRMGDLCDIAVVTHAFRLLTCPDAVVKKVATTALCSATAKRIDRAASGQDMATFLSGSMDGDFARDRGDIASLWTRARNATRRLGKRLGCRWVWSEDRRELGVLIPRTETEDTVISPGARGTLERSLKAAVRALYLGTLKKKTDQGKVYEVTSKWDSSNHFLHSGSFIRFADWRFIHRARLSCVPLNGAVHHGTRDKRCRKCGYAMETLPHVLCSCKPHARAWQLRHNAIQDRLVKAIAPHLGEKVTNRTVPGTDSPLRPDIVVTDEARKKIILVDVTVPFENRTLAFREARARKLEKYTPLADTLRSKGYEVYTDALIVGALGALDPCNERVLRACGVGSRYAQLMRRLMVSDTIRWSRDIYTEHVTGHRQYQE

SEQ ID NO: 25313 - protein, 1188 aa, Gopherus evgoodei
MLTAAQKPTPAPEPADQNPATGTTNAAMGSVDRAPTNRGPVTSSQVARKISELRHLSAPSNLHEPVPRRASAPPRVAIRNPTPRGTNTGSRPALRAPATRGANATPQPTLRTPPGRGTGATPQTAPRTVNIGDPTATTGPQPQTPTARESDAAPTGTSPLSANRRPPTPTATPRARTTRERPDADAAPAEPSRAPPTNNATTPPTAMPRGPTERSPELQGRRPAGQTANPLPARTEEPEDRQPTIRPATPWQAAWIEKLRATASFEEFDQLINELTCELSTEIVSKRTPNQEAARPTSRRPAPNHDATTRGAGRRNSSRRYDPAAASQIQKLYRTNRLKAMRKVLDGPSSYCTIPPERLYRYFLEVFADKPRNDVQRPECLHPLPRITNADGLEADFTPKEVMARLSRTKNTAPGKDGIPYSLLKKRDPGCHVLSGIFNLCRCFGRPPTSWKKAMTVLIYKKGERDDPSNWRPISLCSTMYKLYASCLAARITEWATTGGAISPAQKGFMPSEGCYEHNFLLQTVLQTTRRAHNQCAIAWLDLANAFGSIPHHHIFSTLREFGMPETFLRLIRELYKGCSTTIRSVEGETAEIPIRSGVKQGCPLSPIIFSLAMEPLLRAISDGADGFDLHGERVNVLAYADDLVLIADDPERLQGMLNTIGRVAEWTGLRFNAKKCASLHVNCSKKNSVQATDFLIQGESVVPLAEGQAYQHLGTPTGFRVWQTPEDTIQEILQDAARIDVSLLAPWQKIDALNTFLIPRIAFVLRGSAVAKVPLNKADNVIRQLVKKWLSLPQRASNELVYIAHRHGGANVPRMGDLCDITVVTHAFRLLTCPDAVVKKVATTALCSATAKRIDRAASGQDMATFLSGSMDGDFARDRGDIASLWTRARNATRRLGKRLGCRWVWSEDRRELGVLIPRTETEDTVISPGARGTLERSLKAAVRALYLGTLKKKPDQGKVYEVTSKWDSSNHFLHSGSFIRFADWRFIHRARLNCVPLNGAVRHGTRDKRCRKCGYAMETLPHVLCSCKPHARAWQLRHNAIQDRLVKAIAPHLGEKVTNRTVPGTDSPLRPDIVVTDEARKKIILVDVTVPFENRTLAFREARARKLEKYTPLADTLRSKGYEVYTDALIVGALGAWDPCNERVLRACGVGRRYAQLMRRLMVSDTIRWSRDIYTEHVTGHRQYQE

SEQ ID NO: 25314 - protein, 975 aa, Cuora mccordi
MSRGPTERSPEPQTRLPVDQTANTLPTQAEEHEDRRSMTRPTTPWQATWIEKLQAAASFEEFDLLIDGLTRKLSAEIVSKRTPNQEATRPALRRPLPNRDTSARGTGRRNASHRYDPAAASRIQKLYRTNRPKAVREVLDSPPSYCTIPPERLYNYFLGVFGDVPRNDAQRPECLCPLPRVTDADHLEADFTPKEVTARLSRTKNTAPGKDGIPYSLLKKQDPGCLVLSNIFNLCRHFGRSPTSWKKAMTVLIHKKGERDDSSNWRPISLCSTMYKLYASCLAARITEWATTGGAISPAQKGFMPSEGCYEHNFLLQTVLQSTRRERKQCTVAWLDLANAFGSIPHHHIFNTLQEFGMPETFLRLIRELYEGCSTTIRSVEGETAEIPIRSGVKQGCPLSPIVFYLAMEPLLRAISDGTDGFDLHGERVSVLAYADDLVLIADDPERLQGMLDTIGRAADWTGLRFNAKKCASLHVDGSKRDSVLTTEFLIQGESVVPLAEGQAYQHLGTPTGFHVRQTPEDTIREILQDTAKIDASLLAPWQKINALNTFLIPRIAFILRGSAVAKVPLNKADNNIRQLVKKWLSLPQRASHKLVYIAHRHGGANVPRMGDLCDIAVITHAFRLLTCPDAVVKNIATAALRAATSDQDVSTFLSGSLDGEFAWGRGDIASLWTHARNATRQLGKRLGCHWVWSEERRELGVLVPHIGTEGNTIVGPGARGVLERSLKAAVRALYLDTLKKKPDQGKAFEVTSKWDSSNHFLPSGRFIRFADWRFIHRARLNCVPLNGAIRHGNPDKRCRKCGYIMETLPHVLCSCRPHGRAWQLRHNAVQDRLVKAIAPHLGEIAVNRAIPGTDSLLPLDIVVTDEDRKKIILVDVTIPFENRTTAFRQARARKLEKYAPLADTLRAKGYEVHTDALIIGALGAWDPLNERVLRTCGVGRRYARLMRCLMVSDAIRWSRDIYTEHVTGHRQYQD

SEQ ID NO: 25315 - protein, 1005 aa, Podocnemis expansa
MAALRPETRAPEPTHQQGANTPRTPNSGSSHGAPGTLPVPPTHRLSDGSHGRQDRGNPRARRPSNGCPEPPPEDSNEPPETRPATPWQLLWLEQLAAAESFDVFDPLVERLTQELTDEITAAKTPAQGTTSATPRRPPANRGNVERGPRRRNQTRRYDPAAASKIQKLFRANRTRAVREILNGPSPYCTIAPERLVAYFTEVFDRADLVTPERPACVPPLPRISEVGDLEADFTPQEVAARLARTKNTAPGKDGIRYGILKKRDPGCLVLSALFNRCKRLLRTPTAWKKAMTVLIHKKGERDDPGNWRPISLCSTMYKLYTGCLAARITDWAVAGGAVSSVQKGFMACEGCYEHNFLLQSTLQTARRARRQCTVAWLDLANAFGSMPHQHIFSTLAEFGMPDSFIQLLRELYDGCVTTIRSTEGETAEVAIRSRVKQGCPLSPIVFNLAMEPLIRAVAQDPRGFQLHGEKVNILAYADDLVLIAEDPLHLQDMLDATSRAADWIGLRFNAKKCASLHIDGRRKDPVQPSPFLIQGETMTPLEEGQAYQHLGTPTGFRVCQTPEDTIHEILQDAAKLDASLLAPWQKIAALNTFLIPRIAFVLRGLAVAKVPPNKADGAIRRLVKHWLFLPQRASNELTYIGHRQGGANVPRMGDLRDVAVITQAFRLLTCPDAQVKTIAARALHEAVQKRIARPPSGQDIATYLSGSLDGEFHRDGGDISSLWSRARVATRRLGCHWTWCEERQELSVLVPRFNAPDNTIVPPHARGTLERTLKDAVHALYVETLKKKPDQGKVFELTSKWDASNHFLAEGSYTRFADWRFIHRARLNCLPLNGAIHHGNRDKRCRKCGYVNETLPHVLCSCKPHSRAWQLRHNTVQDRLAKAIPARLGTVATNSSIPGTDSQLRPDLVITDEERKRVIMVDITIPFENRSPAFHAARIRKEEKYAPLADALRAKGYEVQVHALIMGALGAWDPRNETVLRACGVGWRYARLMRRLMVSDCIRWS

SEQ ID NO: 25316 - protein, 850 aa, Gopherus evgoodei
MNRLKAVREVLDGPPSYCTIPPEHLYSYFLGVFGGKPRNNAQRPECLRPLPHITNTGDLEADFTPKEVTARLSRTKNTAPGKDGIPYSLLRKRDPGCLVLTGIFNLCRHFGRSPTSWKKAMTVLIHKKGERDDPSNWRPISLCSTMYKLYASCLAARITEWATAGGAISPAQKGFMPSEGCYEHNFLLQTILQMTKRARKQCAIVWLDLSNAFGSIPHHHIFSTLREFGMPETFLRLIRELYEDCSTTIRSVEGETAEIPIHSGVKQGCPLSPIIFNLAMEPLLRAISDHADGFDLHGERVSILAYADDLVLIVDDPERLQNMLNTIGRAADWTDLRFNAKKCASLHVDGSKRDSVQTTEFQIQGESVVPLAEGQAYQHLGTPTGVRVRQTPEDTIREILQDAAKIDASLLAPWQKINALNTFLIPRIAFVLRGSAVAKVPLNRADNTIRQLVKQWLFLPQRASNELIYIAHRHGGANVPRMGDLCDIAVVTHAFRLLTCPDATVKNVAAAALRTIIEKRIGRPPSGPDVATFLSGSLDGEFARDGGDIASLWSCARNAMRRLGKRLGCRWVWSEERQELGVLVPRIETEGNTIISPGARGVLEKSLKAAVHALYVDTLRKKPDQGKAFEVTSKWDSSNHFLPAGSFTRFADWRFIHRARLNCVPLNGAVHHGNRDKRCRKCGYALETLPHVLCSCKPHARAWQLRHNAVQDRLVKAIAPHLGDIAVNRTIPDTDSLLRPDIVVTDEERKKIILVDVTIPFENRTLALREARARKLEKYAPLAEILRAYTDALIVGALGAWDPCNERVLRASGVGRRYARLMRRLMVSDTIRWSRDIYTEHITGHRQYQE

SEQ ID NO: 25317 - protein, 1974 aa, Gopherus evgoodei
MHPAAPRSQQKALPSVCHTARHKLPVVSLQRVPSAALVVPRTRQIVKPKEQKEIKKDPPRDAVSRSGKPARENPTREKGLRPAPRATEDHPAVLQLPQEPPAARSQLRPPEASLTGPPTLEEPPPNGQRLQEARTTTLLLREGSPPDHRQPRKDHLPTALQRGRPAAAQPLMQPEICPSASQPPEGSPDAQLLLSATVSQLPERGPAAQLMVSATPIPSGDPCPSPLPRALPGEPGRVLWSLLTEPTGDPCATLQPPLRLVRPGEPHLAPRPMRSEPPGDPCPAAQLFAWPGGPHHVLWPLLPAPPGDPCSGRPGGPLGVLRPPLLGPAGDPCPAPWPPLPGRPCSVSPPPLLGPLGDPCPAPGLPLSERPGEHHGTPRLLGPPEEAGPMPQPPPPAASGELRTVLQETRPDTCPQPQAPGDCPATCQPSRRQGNAPARPRPQRDPPAAPQQLRPPKASPTGQGLPQAPSPPTPQPQGGPLITHQQPQPRRDPTDEPLQSARALATDPQTLKLPREVSPVLLRSPNTPPALQQLQPLQDDSPVLIQSPDTPPVLQPLRDGSPVLLRSPDTPPALQLMQDGSPVLMWSSDTPPVLQPPRDDSPAFLWSPDTPPVLSQLQPLKDGSPTLPQPLDMPPALQPIQDGPEALLQPPDTLPALQQPPPPKGNPPDLKQDTPRDDCSALDIVYFKYPLTADALICPSCWPSRRFHLLGGLTRHLRRCHNKTTAFSCALCSLPFESQKRCKAHQTSCKKVHTAATPASTPIPHHSVHGPAAPAPRGNSTTPPAAVQKLTPVPEPVDQGPTVRTTPAAEGDVSQAPASRGPVTSSQVTRKLFELRRLSASSKSIQRDPTSRRVSAPPHVAARRPAPGGTTADPRPTLQTLTARGADATPPPALRATPTGRTGTTLQTALHTAPVAVPAATTKLHHQSPIIRRTNTTPKDARPVPATRRLRAHTDTHQITTTHERPGATSTPTNPNQVPPATNNGATPLVTLPQEPTKRPPRPLVKQPVDHTTNPLPTPVEETEQRRPKDRPATPWQAIWIEELQVAASFEDFDSLINRLTCELTAEATSKRAPNQATTRPAFRRPIPNHGTNSRGARRRNTNRRYDPAAASKIQKLYRSNRLKAVREVLDGPPSYCRIPPKRLYSYFLGVFGGKPRNDTQRPECLRPLPRITNTDNLEADFTPKEVAARLSRTKNTAPGKDGIPYSLLKKRDPGCFVLSCIFNLCRRFGKSPTSWKRAMTVLIHKKGERDDPSNWRPISLCSTMYKLYASCLAARITEWATAGGAISPAQKGFMPSEGCYEHNFLLQTVLQMTKRARKQCAIAWLDLSNAFGSIPHHHIFSTLREFGMPETFLGLIRELYEDCSTTIRSVEGETAEILIHSGVKQGCPLSPIIFNLAMEPLLRAISDRTDGFDLHGERVSILAYADDLVLIADVPERLQSMLNTIGGVADWTGLRFNAKKCASLHVDGSMRDSVQATEFQIQGESIIPLADGQAYQHLGTLTGVRVRQTPEDTIRVILQDAAKIDASLLAPWQKINALNTFLIPRIAFVLRGSAVAKVPLNKADNTIRRLVKQWLSLPQRASNELIYIAHRHGGANVPRMGDLCDIAVVTHAFRLLTCPEATVKNIAAAALRTVIEKRIGRPPSGPDVATFLSGSLDGEFARDGGDIASLWSRARNATRRLGKRLGCRWVWSEERQELGVLVPRIETEGNTIVSPGARGVLEKALKAAVRALYVDTLRKKPDQGKAFEVTSKWDSSNHFLPAGSFTRFADWRFIHRARLNCVPLNGAVRHGNRDKRCRKCGYALETLPHVLCSCKPHARAWQLRHNAVQDRLVKAIAPHLGEIAVNHTIPDTDSLLRPDIVVTDEERKKIILVDVTIPFENRTPAFREARARKLEKYAPLVDTLRAKGYEVYTDALIVGALGAWDPCNEQVLRACGVGRHYARLMRRLMVSDTIRWSRDIYTEHITGHRQYQE

SEQ ID NO: 25318 - protein, 733 aa, Mauremys reevesii
MTVLIHKKGEQDDPSNWRPISLCSTMYKLYASCLAARITEWATTGGAISPAQKGFMPSEGCYEHNFLLQTVLQTTRRARKQCAIAWLDLANAFGSIPHHHIFSTLREFGMPETFLRLIRELYEGCSTTIRSVEGETAEIPIHSGVKQGCPLSPIIFNLAMEPLLRTISDGTDGFDLHEERVSILAYADDLVLTADDPERLQSMLNTIGRAADWTGLRFNAKKCASLHIDGSKRDSVLTTEFLVQGEPVVPLADGQAYQHLGTPTGFRVQQTPEDTIREILQDAAKIDASLLAPWQKINALNTFLIPRIAFVLRGSAVAKVPLTKADNTIRQLVKKWLSLPQRASNELVYIAHRHGGANVPRMGDLCDIAVITHAFRLLTCPDATVKNIAMTALRAATAKRIAGSPSDQDVAAFLNGSLDGEFGRFRGDVASLWSRARNATRRLGKRLGCRWVWSEDRREPGVLVPRIGTEDNTIVSPGARGMLEKTLKAAVHALYVDTLKKKPDQGKAFEVTSKWDSSNHFLPAGSFTRFADWRFIHRARLNCVPLNEAVRHGNRDKRCRKCGYAMETLPHVLCSCKPHARAWQLRHNAVQDRLVKAIAPHLGKIAINRAIPGTDSTLRPDIVVTDRKKIILVDVTIPFENRTPAFHEARSRKLEKYAPLADTLRSKGYEVCTEALIVGALGAWDPCNERVLRTCGVGCRYAQLMRRLMVSDTIRWSRDIYTEHITGHRQYQE

SEQ ID NO: 25319 - protein, 1306 aa, Cuora mccordi
MEDDQEGPNAPQNGCPTPDTVYLQYPLATDALICPICLPPRRFTRIGGLTRHLKRCHGLSTTFSCALCSLPFESQKKCKAHQTSCRKARTTATPAPASRHPVPQPTAPAPQSARATLPTATRTPTPAPELADQGAAARTTTTTARNIDRAPTNWNPFTSTQVARKLSELRRLSAPSNQSDTAPRRVSAPPRVTTRDPAAVGTNAGSRHTLRAPATRVTNATPQPALRTSPTGGAGTTPQTAPHTTTNGGPTATTGRQHQTPIARQTGTAPRDARPTPTTSRSDAPTATPQMTAARGSPGSDPTPAGPNQVTPSTSNATAPPGPTPQEPTERSPEPQTRPPINQTADTLPTQAEEHEDRRLTTSPATPWQTTWIEKLQAAASFEEFDLLINRLTQELSAETAPKRTPNQETTRPAFRRPAPNRGTSARGTGRRNASRRYDPAAASRIQKLYRSNHLKAVREVLDGPPSYCTISPERLYRYFLGVFGGTPRNDAQRPECLRPLPRVTNADGLEADYTPKEVSSRLSRTKNTAPGKDGIPYGLLKKRDPGCLVLSGIFNLCRRFGRSPTSWKKAMTVLIHKKGEREDPSNWRPISLCSTMYKLYASCLAARITEWATTGGAISPAQKGFMPSEGCYEHNFLLQTVLQTTRRERKQCAIAWLDLANAFGSIPHHHIFSTLREFGMPETFLRLIRELYEGCSTTIRSVEGETAEIPIRSGVKQGCPLSPIIFNLAMEPLLRAISDGTDGFDLHDERVSVLAYADDLVLTADDPERLQGMLDTIGRAADWTGLRFNARKCASLHVDGSKRDSVLTTEFLVQGEPVVPLAEGQAYQHLGTPTGFRVRQTPEDTIREILQDAAKIDASLLAPWQKINALNTFLIPRIAFVLRGSAVAKVPLNKADNTIRQLVKKWLSLLQRASNELVYIAHRHGGANVPRMGDLCDIAVVTHAFRLLTCPDATVKNIATTALRAATAKRIGGSSSDQDVAAFLNGSLDGEFGWFRGDVASLWSRARNATRRLGKRLGCRWVWSEDRREPGVLVPRIGTEDNTIVSPGARGMLEKTLKAAIHALYVDTLRKKPDQGKAFEVTSKWDSSNHFLPAGSFTRFADWRFIHRARLNCVPLNGAVRHGNPDKRCRKCGYAMETLPHVLCSCKPHARAWQLRHNAVQDRLVKAIAPHLGKIAVNRAIPGTDSPLRPDIVVTDEDRKKIILVDVTIPFENRTPAFREARARKLEKYAPLADTLRSKGYEVHTDALIVGALGAWDPCNERVLRTCGVGRRYAQLMRRLMVSDTIRWSRDIYTEHITGHRQYQE

SEQ ID NO: 25320 - protein, 1317 aa, Mauremys reevesii
MEDAPPTTSRVMEDDQEGPNASQNGRPTLHTVYLQYPLTTDALNCPICMPPRRFTDLGGLTRHLKRCHGLSTAFSCALCSLPFESQKKCKAHQSSCKKARTTATPASVPRHPVPQPTAPGPQRARGTRSTAARKPTPAPELVVQGTAAKTTPTTARNTDRAPANWNPFTSTQVARKLSELRRLSAPSNQGDSAPRWVSAPPRMAARDPAAGGINAGSRRTLRAPATRVTNTTPQPALRTSPTGGAGTTPQTAPHTATTRGPAAMTRPQHQTPIARQTGTAPRNARPTPTTRRPHAPTTTRRTTATRGSPGTARTPTDPNQATPSASNATTPPASTPQGPTERSPEPQTRSPINQTTDTLPTQAEEHEDRRSATKQATPWQTTWMEKLRAAASFEEFDLLVNRLTQELSAETAPRRTPNQETTRPAFRRPAPNRATSTRRAGSRNASHRYDPAAASRIQKLYRSNRLKAVREVLDGPPAYCTIPPERLYRYFLGVFGDTPRNDVQRPKCLRPLPRIANADGLEADFTPKEVSARLSRTKNTAPGKDGIPYGLLKKRDPGCLVLSGIFNLCRRFGRSPTSWKKAMTVLIHKKGDRDDPSNWRPISLCSTMYKLYASCLAARITEWATTGGAISPAQKGFMPSEGCYEHNFLLQTVLQTTRRARKQCAIAWLDLANAFGSIPHHHIFSTLREFGMPETFLRLIRELYEGCSTTIRSVEGETAEIPIHSGVKQGCPLSPIIFNLAMEPLLRAISDGTDGFDLHEERVSILAYADDLVLTADDPERLQSMLNTIGRAADWTGLRFNAKKCASLHIDGSKRDSVLTTEFLVQGEPVVPLAEGQAYRHLGTPTGFRVQQTPEDTIREILQDAAKIDASLLAPWQKINALNTFLIPRIAFVLRGSAVAKVPLTKADNTIRQLVKKWLSLPQRASNELVYIAHRHGGANVPRMGDLCDIAVITHAFRLLTCPDATVKNIATTALRAATATRIAGSPSDQDVAAFLNGSLDGEFGRFRSDVASLWSRARNATRRLGKRLGCRWVWSEDRREPGVLVPRIGTEDNTIVSPGARGMLEKTLKAAVHALYVDTLKKKPDQGKAFEVTSKWDSSNHFLPAGSFTRFADWRFIHRARLNCVPLNGAVRHGNRDKRCRKCGYAMETLPHVLCSCKPHARAWQLRHNAVQDRLVKAIAPHLGKIAVNRAIPGTDSTLRPDIVVTDEDRKKIILVDVTIPFENRTPAFHEARSRKLEKYAPLADTLRSKGYEVCTEALIVGALGAWDPCNERVLRTCGVGRRYAQLMRRLMVSDTIRWSRDIYTEHITGHRQYQD

SEQ ID NO: 25321 - protein, 1306 aa, Mauremys reevesii
MEDDQEGPNAPQNGRPTLHTVYLQYPLTTDALNCPICMPPRRFTELRWLTRHLKRCHGLSTAISCALCSLPCESQKKCKAHQTSCKKARTTATPASVPRHPVPQPTAPGPQRARGTLSTATRKPTPAPELVVQGTAAKTTATAARNTDRAPTNWNPFTPTQVARKLSELRRLSAPSNQGDSAPRRVSAPPRMAARDPAAGGINAGSRHTLRAPATRVTNTTPQPALRTSPTGGAGTTPQTAPHTATTGGPATTTRPQHQTPIARQTGTAPRDARPTPTTRWPHAPTTTPRTTATHGSPGTAPTPTDPNQVTPSTSNATTPLMSTPQGPTEKSPEPQTRSPTNQTADTIPTQAEEHEDRRSTTKPATPWQTTWIEKLQAAASFEEFDLLVNRLTQELSAETAPKRTPNQETTRPTFKRPAPNRATSTRGAGRRNASHRNDPAAASRIQKLYRSNRLKAVREVLDGPPAYCMIPPERLYRYFLRVFGGTPRNDAQRPECLRPLPRVTNADGLEADFTPKEVSVRLSRTKNTAPGKDGIPYGLLKKRDPDCLVLSGIFNLCQRFGRSPTSWKKAMTVLIHKKGERDDPSNWRPISLCSTMYKLYASCLAARITEWATTGGAISPAQKGFMPSEGCYEHNFLLQTVLQTTRRAQKQCAIAWLDLANAFGSIPHHHIFSTLREFGMPETFLRLIRELYEGCSTTIRSVEGETAEIPIRSGMKQGCPLSPIIFNLAMEPLLRAISDGANGFDLHEERVSILAYVDDLVLTADDPERLQSMLDTIGRAADWTGLRFNAKKCASLHIDGSKRHSVLTTEFLVQGEPVIPLAEGQAYQHLGTPTGFRVQQTPEDTIREILQDAAKIDASLLAPWQKINALNTFLIPRIAFVLRGSAVAKVPLNKADNTIRQLVKKWLSLPQRASNELVYIAHRHGGANVPRMGDLCDIAVVTHAFRLLTCPDATVKNIATTALRTATAKRIAGSPSDQDVAAFLNGSLDGEFGRFRGDVASLWSRARNATRRLGKRLGCRWVWSEDRREPGVLVPRIGTEDNTIVSPGARGMLEKTLKAAVHALYVDTLKKKPDQGKAFEVTSKWDSSNHFLPAGSFTRFADWRFIHRARLNCVPLNGAVRHRNRDKRCRKCGYAMETLPHVLCSCRPHGRAWQLRHNAVQDRLVKAIAPHLGEIAVNRAIPGTDSLLRPDIVITDENRKKIILVDVTIPFENRTPAFHEARARKLEKYAPLADTLRSKGYEVCTDALIVGALGAWDPCNERVLRTCGVGRRYAQLMRRLMVSDTIRWSRDIYTEHITGHRQYQE

SEQ ID NO: 25322 - protein, 1283 aa, Trachemys scripta
MPPAPQQLQPSRDGSPVSRRAPVTPPGPQQSPPDPQQDTLTGETSTTTENPAPQGADEDTIYLTYPLAAGALTCPICLPPRRFQLLGGVTRHLKRCHGKSTTFSCALCNLPFESQKRCKAHQASCKRARSVTTLVPASRPPVPRPAALAPRGNGAPLPTATLKPTPTPQPLDQSSTVETAPPTAGNVNRAPASWTPFTSTQVARKLSELRRLSALPTPNQRNPIPRRVSAPPRVAARNPVPRGTDAGLQATLRAPTAGRANATPQPAPRTPPAEGTGSTPQLAPQTTAARGVNATTGPQHQTPIVRRTGMSPEATRPIPAARRSHASATTPQTAAAHGRPGITPAPLDPVQISPTTSGDPTPPVTTPRDPTEESPDPQVRQPIDHTTNSLPTPTEEPEDQRPKTRPATPWQAAWIEELQVAASFAEFDSLVDRLTRELSAEIAFRRTLNQETTRPAPGQPTPLRDNNPRGAGRRNTGRRFDPAAASRIQKLYRTNRLKAVREILDGPPSYCTIPPERLYNYFLRVFGGVPRNDAQRPECLRPLPRIPDADGLEADFTPKEVTARLSRTKNTAPGKDSIPYSLLKKRDPGCLLLSNIFNLCKRFGRSPTSWKKAMTVLIHKKGERNDPSNWRPISLCSTMYKLYASCLAARITEWATTGGAISPAQKGFMPSEGCYKHNFLLQTVIQATRRTRKQCSIAWLDLANAFRSIPHHHIFDTLQEFGMPETFLHLIRELYEGCSTTIRSVEGETAVIPIYSGVKQGCPLSPIVFNLAMEPLLQAISDGADGFDLHGERVSVLAYADDLVLIADDPERLQGMLDTIGRAADWAGLRFNAKKCASLHVDGSKRDSVLMTDFLIQGESVVPLAEGQAYQHLGTPTGFRVRQTPEDTIREILQDAAKINTSLLAPWQKINALLIPRIAFVLRGSAVAKMPLNKADNAIRKLVKNWLSLPWRASNELVYIKHRHGGAGVPCMGDLCDISVLTHAFRLLTCPDAKVKNVAMTALHAATEKRIGRPPSDRDVATFLSGSLDGDFAWVRGEFTSLWTRARNAMRRLGKRLGCRWEWNEERQELGVLIPRIGTEDNIIVTPGARGVLERSLKAAVHALYVDALKKKPDQGKVFEVTSKWDSSNHFLPTGSFTRFADWRFIHRARLNCVPLNGAIRHGNRDKRCRKCGYVNETLPHVLCCCKPHSRAWQLRHNAVQDRLVKAINPRLGEITVNRTVPGTDSPLRPDIVVTDEVGKKIILNQHPYTPAQFTSQFSFSCTERNSRDLAQGREGIACVCSD

SEQ ID NO: 25323 - protein, 735 aa, Terrapene carolina
MTVLIYKKGERDDPSNWRPISLCSTMYKLYASCLAARITEWATSGGAISPAQKGFMPSEGCYEHNFLLQTVIQTTRRVRKQCAIAWLDLANAFGSIPHHHIFDTLREFGMPETFLRLIRELYEGCSTTICSVEGETAEIPIHSGVKQGCPLSPIVFNLAMEPLLRAISDGANSFDLHGERVNVLAYADDLLLIADDRERLQGMLDTIGRVADWAALRFNAKKCASLHVDGSVRDSVLATEFLIQGEPVIPLAEGQAYQHLGTPTGFRVQQTPEDTIREILQDAAKIDASLLAPWQKINALNTFLIPRITFVLRGSAVAKVPLNRADTTIRQLVKSWLSLPQRASNELIYIAHRHGGANVPRMGDLCDIAVITHAFRLLTCPDAKVKTVAMTALRSVVEKRIGRPPSDRDVATFLSGSLDGEFARDGGDIASLWSRARNATRRLGKRLGCRWVWNEERRELGILLPRTESEDNTIITPGARGVLERSLKAAVHALYVDTLKKKPDQGKAFEVTSKWDSSNHFLPTGSFTRFADWRFIHRAQLNCVPLNGAVRHGNRDKRCRKCGYVAETLPHVLCSCKPHARAWKLRHNAVQDRLVKAIDPRLGEVTVNHTVPGTDSLLRPDIVITDEVGKKVIMVDITIPFENRTPAFREARARKLEKYTPLAETLRSKGYEVHTDALLVGALGAWDPCNERVLKTCGVGRHYARLMRRLMVSDTIRWSRDIYTEHITGHRQYQE

SEQ ID NO: 25324 - protein, 1039 aa, Mesoclemmys tuberculata
MRRPPRPPHLGPCRPCKSPPEGIPVTGGPATPQGPGRRPADPQDPRPELPSPPTNKEPAPPKRQVQARRTGPPGRCQHPQPTAQASGPTGARAEETHGTDAHPMGAPSPPPKEGDKPLKTRPATPWQLLWLEQLAAAQSFDVFDTLVERLTQELAEEIATGRTPTQVTTPAPRGPPANCGNDGRGPGRRNQARRYDLAAASRIQKLFRANRAKAVREILEGPSSYCTIAPERLVAYFTEVFDRADPVAAKHPACVPPLPRVGEVVDLEADFTPQEVVARLARTKNTAPGKDGIRYGVLKKWDPGCLVLSALFNRCKQLLRTPTAWKKAMSVLMHKKDERDDPGNWRPISLCSTMYKLYTSCLAARITDWAVAGGAVSSVQKGFMACKGCYEHNFLLQSALQTARRARRQCTVAWLDLANAFGSMPHQHIFSTLAEFGMPESFIQLLRELYHGCITTIRSTEGETAEVAIRSGVKQGCPLSPIVFTLSMEPLIRAVAQDPRGFQLHGEKVNILPYADDLVLIAEDPLHLQDMLDATSRTADWIGLRFNAKKCASLHVDGRRKDPVQASPFVIQGETMTPLEEGQAYQHLGTPTGFRVRQTPEDTIHEILQDAAKLDASLLAPWQKIAALNSFLIPRIAFVLRGSAVAKVLLNKADGAIRRLVKRWLFLPQRASNELTYIGHRQGGANVLRMGDLCDVVVITQAFHLLTCPDAQVKAVAASALHEAVQKSIARSPSGQDIATYLSGSLDGEFHQDGGDISSLWSRARIATRRLGKRLGCRWTWCEERQELSVLVPRISAPNNTIVPPCTRGMLERTLKDAVHALYIETLRKKSDQGKVFELSNHFLAEGSYTRFPDWCFIHRSWLNCLPLNGAVHHGNRDKCCRKCGYINETLPHVLCGCKPHSRAWQVRHNTVQDRLAKAIPAWLGTVAVNSSVPGTDSQLRPDLVVTDEERKRVTIPFENRSLAFHAARTRKEKYAPLDDTLRAKGYEVRVHALIVGALGAWDPRNEAVLLALRPPHATPHGIGLHPVVTWGYIPAHPG

SEQ ID NO: 25325 - protein, 856 aa, Actinemys marmorata
MNRTKAMREILDGTSSYCAIQPERLYSYFKDVFDHEAQTNLRRPECLSPLPQIDLTEDLERDFSPQEVQARLTRTKNTAPGKDGIRYPLLEKRDPGCLVLAAIFNKCKQFHYVPGSWKTSMTVLIHKKGERDDPGNWRPISLCSTIYKLYASCLAARITDWSVCGGAVSSVQKGFMSCEGCYEHNFLLQTAIQEARRSKRQCAVAWLDLTNAFGSIPHHHILSTLGEFGMPETFIQILRDLYKDCTTTIRATDGETDAIPIRRGVKQGCPLSPIIFNLAMEPLIRAISSGPTGFDLHGKKLSILAYADDLVLTADDPESLQGMLDATSRATDWMGLRFNAKKCATLHIDGSKRDLVQTTGFQIQGEPVIPLAEGQAYQHLGTPTGFRVRQTPEDTIQEILQDAAKIDASLLALWQKINALNTFLIPRISFTLRGSAVAKVPLNKADKIIRKLVKKWLFLPQRASSELVYIAHRHGGANVPRMGDLCDVAVITHAFRLLTCPDATVRNIAANALRDATEKRIGRAPSNQDIATFLSGSLDGEFGQDGRDIASLWSRTRNATRRLGKRIGCRWEWCEERQELGVRVPQIRSDDNTMVTPTARGLLERTLKVAIRSLDVETLKRKPDQGKAFELTSKWDASNHFLAGGGFTRFADWRFIHRARLNCVPLNGAIRHGDRDKRCRKCGYSNETLPHVLCSCKPHSRAWQLRHNAIQNRLVKAIAPHLGEIAVNCTIPGTDSQLQPDVVVTDEAQKKIILVDVTVSFENRTPAFREARARKLEKYAPLADTLRAKGYEVQMDALIVGALGAWDPCNEPVLRTCGIGRRYAPLMRRLMVSDAIRWSRDIYIEHITGHRQYQEA

SEQ ID NO: 25326 - protein, 1149 aa, Dermatemys mawii
MLDPAMRRITATSQVSNLSRCLSDFLESIRHSTDMRQGSAPPQVPSCRPAIGTTNTTPRVTEQHPAKGGASRSPQVTRLDPAPTRPNTSSKAAQRDPDRQKSPAPLRTPQLDTACRRTRTMPSTSRHDSAPQKSNTGASRTPLPPGRCSTASETPRAAHTTATGPTPQDSPDHRTPARETTEPQTAPVAPEPVEIARQEERRPRARVATPWQSTWTEELAKVDNFEDFDTLMDRLTTELSAEITAGRREPQEGTRTTSRFPALSHNTTRQGRRGNAGRSFNPAAASRIQKLYRTNRPKAMREILDGTSSYCTIQPQRLYSYFKDVFDHEAQTDAQSPECLPPLPRIDLTEDLERDFSPQEVLARLSRTKNTAPGKDGICYNMLKKRDPGCLVLAAIFNKCKQFHRTPRSWKKSMTVLIHKKGERDDPGNWRPISLCSAIYKLYASCLAARITHWSVCGGAVSSAQKGFMSCEGCYEHNFLLQMAIQEARRSRRQCAIAWLDLTNASGSIPHHHIFATLGEFGMPETFLQILRDLYKDCTTTIRTTDGETDAITIRCGVKQGCPLSPIIFNLAMEPLIRAVSSSSAGFDLYGKRISILAYADDLALVADSSESLQGMLDIASRAAEWMGLRFNPRKCASLHITGNAKALVQASQLLIQGEPMVSLEEGEVYQHLGTPTGVRVQQTPEDTITEILRDAAQIDSSLLAPWQKINALNTFLIPRISFVLRGSAVAKVPLNKADSTLRQLVKKWLYLPQRASADIIYISHRQGGANVPRMGDLCDIAVITHAFRLLTCPDPTVRSIAEEAVRNVVRKRIIRTPSEQDIATYLSGSLEAEFGREGRDLSSLWTRARNASRRLGKRIGCRWSWCEERRELGILVPRIKTPDHTIVTPTARSMLERTLKDTIRCYYAENLKRKPDQGKVFEVSSKWDASNHFLHGGSFTRFADWRFIHRARLNCVPLNGAIRHGNPDKRCRKCGYANETLPHVLCGCKLHSRAWQHRHNVIQNRLVKAIPPSLGKISVNSAIPGTDSRLRPDIVVTDAEKKKVLIVDVTVPFENRSPAFHEARARKSLKYTPLADILRAQGYEVQLHALIVGALGAWDPQNEPVLRACGVGQRYARLMRRLMVSDTIRWSRDIYTEHITGHRQYQVE

SEQ ID NO: 25327 - protein, 840 aa, Actinemys marmorata
MEELAKSEDFENFDTLMDRLTTELSAEITARRREPQEAARATRRFPALSRNNTAREGRRGDVGSRYDPAAASHIQKLYRTNRTKAMREILNGTSSYCAIQTKRLYSYFKDVFDHEAQTNLQRPECLPPLPRINLMEDLERDFSPQEVQARLTRTKNTAPGKAGIHYPLLKKRDPSCLVLAAIFNKCKQFHCIPHSWKNFMTVLIHKKGERDDPGNWRPNSLCSTIYKLYASCLAARITDWSVCGGAVSSVQKGFMSCVGCYEHNFLLQTAIQKARRSKRQCAVEWLDLTNAFGSIPHHHIFATLGEFGMPETFIQILRDLYKDCTTTIRPTEGETDTIPICCGVKQGCPLSPIIFNLAMEPLIRAISSGPTGFDLHGKKISILAYADDLVLTTDDPESLQGMLNTTSRATDWMGLRFNAKKCATLHIDGSKRDSVQATGFQIQGEPIIPLAEGQAYQHLGTPTGFRVWQTPEDTIQEILQDAAKIDASLLSLWQKINALNTFLIPRISFTLRGSAVAKVPLNKADKIIRKLVKKWLFLPQRASNELVYIAHRHGGTNVPRMGDLCNVAVITHAFCLLTCPDATVRNIAANALRDATEKRINRALSNQDIATFLSSSLDGEFGRDGRDIASLWSRTRNATPRLGKRIGCHWEWCEERQELGVWVPQIRSDDNTIVTLSARGLLERTLKAAIHSLYVETLKRKPDQGKAFELTSKWDASNHFLAGGGFTHFTDWQFIHCARLNCVPLNGAVRHGNRNQRCRKCGYPYETLPYVLCSCKPHSRAWQLHHNAIQNRLVKAIAPRLGEISVNCTIPGTDSQLRPDVVVTNEAQKKIILVNVTVSF

SEQ ID NO: 25328 - protein, 918 aa, Dermatemys mawii
MDRLTTELTAEASARRREPQEGTRTTPRFPAPSRNTTRQGRRGNAGHRFDPAAASRIQKLYRTNRPKAMREILDGTSSYCTIQPQRLHSYFKDVFNREAQTDARRPECLLPLPQINLNEDLERDFSPQEVLARITRTKITAPGKDGIRYNMLKKQDPGCLVLAAIFNKCKQFHRIPRSWKKSMMVLIHKKGDQDDPSNWRPISLCSTIYKLYASCLAARITDWSVCAGAVSSAQKGFMSCEGCYEHNFLLQTAIQEARRSRRQCAIAWLDLTSAFGSIPHRHIFATLGEFGMPETFLQILRDLYKDCTTTIRTTDGETDAITIRCGVKQGCPLSPIIFNLAMEPLIRAVSSGSAGFDLHGKRISILAYVDDLALVANSSDSLQGMLDVANQAAEWTGLRFNPKKCASLHITGNAKALVQPSQLLIQGEPMASLEEGEVYQQLGTPTGVRVRQIPEDTVTEILRDTTRIDSSLLAPWQKINALNTFLIPRISFVLRGSAVAKVPLNKADSTIRQLVKKWLYLPQRASTDIIYIPHRQGGANVPRMGDLCDVVVITHAFRLLTCPDLTVRSIAEEAIRNVVRKRILRTPSEQDIATYLGGSLEAEFGREGGDLSSLWSRARNASRRLGKRIGCRWSWCEERWELGILVPRIKTSDHTIVTPTARTMLERTLKGTICCHYVENLKRKPDQGKVFEVTSKWDASNHFLHGGSFTRFSDWRFIHRARLNCVPLNGAIRHGNLEKRCRKCGYANETLPHVLCGCKLHSTAWQHRHNAIQNRLVKAIPPSLGKISVNSAIPGTDSRLRPDIVVTDAEKKKILIVDVTVPFENRSPAFHEARARKSLKYTPLADTLRAQGYEVQLHAFIVEALGAWDPQNEPVLRACGVERRYARLMRRLMVSDTIKWSRDIYIEHITGHRQYQVE

SEQ ID NO: 25329 - protein, 1482 aa, Dermatemys mawii
MESPTAIFEKIAAALEMYLTAGPLEEDLDPKMDSLCVPARSPILTSAAAAFPPFSISRKAQQKTTLGIAKTTRIASKNEKLRTWMTKNPNDIFAWRPSTPRLALWDLTSRSNNISSALQEEESLSTVPTAQDQDADYCPARKAATRGALPKTEDQEDAAGGNPPMKQNQEAAARGAPPMTQDREADRSPAEKAASRRAPPLIQDQDASRCPAAPVRDASMGSTFSTQDPEATDHPAAWRKTAPRGTHSTAQDLDTTSCPSRQRDIMASEPGPHPGATPPPQASLPDREEPPGEVTGTAETRPTEGEAGEDDYIYLQYPIPTGLLLCPFCVPSRGVRTLGALSKHTRKTHNKRIAFRCSRCDLPFEMQKKCKHHQSTCKGPLTTAKDNPTDTLQVPTLTPTDAPPPTPQPVFQEPLNVSGDQRPTEGNVTPVSRTDQQNDTTKKRSPVSRIPMLDPAMRRITATSQVSNLSRCLSDFLESVRHSTDMRRGSAPPQVPSCRPAIGTTNTTPRVTEKHPAKGGASRSPQVTRLDPAPKRPNTSSKTAQRDPDRQKSPAPLRTPQLDTACRRTRTMPSTSRHDSAPQKSNTGASRTPLPPGRCSTASETPRAAHTTATGPTPQDSPDHRTPARETTEPQTASVVPEPVEIARQEERRPRARVATPWQSTWTEELAKVNNFEDFDTLMDRLTTELSAEITAGRREPQEGTRTTSRFPALSHNTTRQGRRGNAGRSFDPAAASRIQKLYRTNRPKAMREILDGTSSYCTIQPQRLYSYFKDVFDHEAQTDAQRPECLPPLPRIDLTEDLERDFSPQEVLARLSRTKNTAPGKDGIRYNMLKKRDPGCLVLAAIFNKCNQFHRTPRSWKKSMTVLIHKKGERDDPGNWRPISLCPAIYKLYASCLAARITDWSVCGGAVSSAQKGFMSCEGCYEHNFLLQTAIQEARRSRRQCAVAWLDLTNAFGSIPHHHIFATLGEFGMPETFLQILRDLYKDCTTIIRTTDGETDAITIRCGVKQGCPLSPIIFNLAMEPLIRAVSSGSAGFDLYGKRISILAYADDLALVADSSESLQGMLDIASRAAEWMGLRFNPRKCASLHVTGNAKALVQASQLLIQGEPMVSLEEGEVYQHLGTPTGVRVRQTPEDTITEILRDAAQIDSSLLAPWQKINALNTFLIPRISFVLRGSAVAKVPLNKADSTLRQLVKKWLYLPQRASANIIYISHRQGGANVPRMGDLCDIAVITHAFRLLTCPDPTVRSIAEEAVRNVVRKRIIRTPSEQDIATYLSGSLEAEFGREGRDLSSLWTRARNASRRLGKRIGCRWSWCEERRELGILVPRIKTLDHTIVTPTARSMLERTLKDTICCYYAENLKRKPDQGKVFEVSSKWDASNHFLHGGSFTRFADWRFIHRARLNCVPLNGTIPHGNPDKRCRKCGYANETLPHVLCRCKLHSRAWQHRHNAIQNRLVKAIPPSLGKISVNSAIPGTDSRL

SEQ ID NO: 25330 - protein, 1595 aa, Dermatemys mawii
MESPAAIFEKIDAALEMYSTAGPLEEDLDPKMHSLCALARSPILTSAAAAFPPFSTSRKAQQKTTLGIAKTTRIASKNEKLRTWMTKNPSDIFAWRPSTPRLALWDLTSRSNIISSALQEEESLSAVPTTQDQDADYCPARKAATREALPKTEDQEDAAGGTPPMSQNQEAAARGAPLMTQDQEADRSPAEKAATRRAPPMIQDQDANRCPAAPVRDASMGSTSSTQDPEATDHPAAWRKTAPRGTHSTAQDLGTTSCPSRQREIMASEPGPHPGATPPPQASLPDREEPPGEVTGTAEGEAGADDCIYLQYPIPTGLLLCPFCVPSRGVRTLGALSKHTRKTHNKRIAFRCSRCDLPFETQKKCKHHQSTCKGPLTTAKDNPTDTLQVPTLTPTDAPPPTPQPVFQEPLHVSGDQRPTEGNATPVSRTDQQNDTTKKRSPVSRIPMLDPAMRRITATSQVSNLSRCLSDFLESIWHSTDMRRGSAPPQVPSCRPAIGTTSTTPRVTEQHPAKGGASRSPQVTRLDPAPTRPNTSSKAAQRDPDRQKSPAPLRTPQLDIACRRTRTMPSTSRHDSAPQKSNTGASRTPLPPGRCSTASETPRAAHTTATGPTPQDSPDHRTPARETTEPQTTPVAPEPVEIARQEERRPRARVATPWQSTWTEELAKVDNFEDFDTLMDRLTTELSAEITAGRREPQEGTRTTSRFPALSHNNTRQGRRGNAGRSFDPAAASRIQKLYRTNRPKAMREILDGTSSYCTIQPQRLYSYFKDVFDHEAQTDAQRPECLPPLPRIDLTEDLERDFSPQEVLARLSRTKNTAPGKDGIRYNTLKKRDPGCLVLAAIFNKCKQFHRTPRSWKKSMTVLIHKKGERDDPGNWRPISLCSAIYKLYASCLAARITDWSVCGGAVSSAQKGFMSCEGCYEHNFLLQTAIQEARRSRRQCAVAWLDLTNAFGSIPHHHIFATLGEFGMPETFLQILRDLYKDCTTTIRTTDGETDAITIRCGVKQGCPLSPIIFNLAMEPLIRAVSSGSAGFDLYGKRISILAYADDLALVADSSESLQGMLDIASRAAEWMGLRFNPRKCASLHVTGNAKALVQASQLLIQGEPMVSLEEGEVYQHLGTPTGVRVRQTPEDTITEILRDAAQIDSSLLAPWQKINALNTFLIPRISFVLRGSAVAKVPLNKADSTLRQLVKKWLYLPQRASADIIYISHRQGGANVPRMGDLCDIAVITHAFRLLTCPDPTVRSIAEEAVRNVVRKRIIRTPSEQDIATYLSGSLEAEFGREGRDLSSLWTRARNASRRLGKRIGCRWSWCEERRELGILVPRIKTPDHTIVTPTARSMLERTLKDTIRCYYAENLKRKPDQGKAFEVSSKWDASNHFLHGGSFTRFADWRFIHRARLNCVPLNGAIRHGNPDKRCRKCGYANETLPHVLCGCKLHSRAWQHRHNAIQNRLVKAIPPSLGKISVNSAIPGTDSRLRPDIVVTDAEKKKVLIVDVTVPFENRSPAFHEARARKSLKYTPLADILRAQGYEVQLHALIVGALGAWDPQNEPVLRACGVVQRYARLMRRLMVSDTIRWSRDIYTEHITGHRQYQVE

SEQ ID NO: 25331 - protein, 1595 aa, Dermatemys mawii
MESPAAIFEKIDAALEMYSTAGLLEEDLDPKMHSLCALARSPILTSAAAAFPPFSTSRKAQQKTTLGIAKTTRIASKKEKLRTWMTKNPSDIFAWRPSTPRLALWDLTSRSNNISSALQEEESLSAVPTTQDQDADYCPARKAATREALPKTEDQEDAAGGTPPMSQNQEAAARGAPPMTQDQEADRSPAEKAATRQAPPMIQDQDANRCPAAPVRDASMGSTSSTQDPEATDHPAAWRKTAPRGTHSTAQDLGTTSCPSRQREIMASEPGPHPGATPPPQASLPDREEPPGEVTGTAEGEAGADDCIYLQYPIPTGLLLCPFCVPSRGVRTLGALSKHTRKTHNKRIAFRCSRCDLPFETQKKCKHHQSTCKGPLTTAKDNPTDTLQVPTLTPTDAPPPTPQPVSQEPLHVSGDQRPTEGNATPVSRTDQQNDTTKKRSPVSRIPMLDPAMRRITATSQVSNLSRCLSDFLESVRHSTDMRRGSAPPQVPSCRPAIGTTSTTPRVTEQHPAKGGASRSPQVTRLDPAPTRPNTSSKAAQRDPDRQKSPAPLRTPQLDIACRRTRTMPSTSRHDSAPQKSNTGASRTPLPPGRCSTASETPRAAHTTATGPTPQDSPDHRTPARETTEPQTTPVAPEPVEIARQEERRPRARVATPWQSTWTEELAKVDNFEDFDTLMDRLTTELSAEITAGRREPQEGTRTTSRFPALSHNNTRQGRRGNAGRSFDPAAASRIQKLYRTNRPKAMREILDGTSSYCTIQPQRLYSYFKDVFDHEAQTDAQRPECLPPLPRIDLTEDLERDFSPQEVLARLSRTKNTAPGKDGIRYNTLKKRDPGCLVLAAIFNKCKQFHRTPRSWKKSMTVLIHKKGERDDPGNWRPISLCSAIYKLYASCLAARITDWSVCGGAVSSAQKGFMSCEGCYEHNFLLQTAIQEARRSRRQCAVAWLDLTNAFGSIPHHHIFATLGEFGMPETFLQILRDLYKDCTTTIRTTDGETDAITIRCGVKQGCPLSPIIFNLAMEPLIRAVSSGSAGFDLYGKRISILAYADDLALVADSSESLQGMLDIASRAAEWMGLRFNPRKCASLHVTGNAKALVQASQLLIQGEPMVSLEEGEVYQHLGTPTGVRVRQTPEDTITEILRDAAQIDSSLLAPWQKINALNTFLIPRISFVLRGSAVAKVPLNKADSTLRQLVKKWLYLPQRASADIIYISHRQGGANVPRMGDLCDIAVITHAFRLLTCPDPTVRSIAEEAVQNVVRKRIIRTPSEQDIATYLSGSLEAEFGREGRDLSSLWTRARNASRRLGKRIGCRWSWCEERRELGILVPRIKTPDHTIVTPTARSMLERTLKDTIRCYYAENLKRKPDQGKVFEVSSKWDASNHFLHGGSFTRFADWRFIHRARLNCVPLNGAIRHGNPDKRCRKCGYANETLPHVLCGCKLHSRAWQHRHNAIQNRLVKAIPPSLGKISVNSAIPGTDSRLRPDIVVTDAEKKKVLIVDVTVPFENRSPAFHEARARKSLKYTPLADILRAQGYEVQLHALIVGALGAWDPQNEPVLRACGVVQRYARLMRRLMVSDTIRWSRDIYTEHITGHRQYQVE

SEQ ID NO: 25332 - protein, 1039 aa, Cuora amboinensis
MAPKDARPIPTTRRSHAPTATPRTTAAHGSPGTTPTPTDPNQVTPSTSNATIAPAPMSRGPTERSPEPQTRLPVDQTANILSTQAKEHEDRRSTTRPTTPWQATWIEKLQAAASFEEFDLLIDRLTRELSAEIAPKRTPNQEAIRPALRRPLPNHDTSARGTGRRNASHRYDPAAASRIQKLYRTNLPKAVREVLDSPPSYCTIPPERLYNYFLGVFGDVPRNDTQRPECLRPLPRVTDADYLEANFTPKEVMARLSRIKNTAPGKDGIPYSLLKKWDPGCLMLSNIFNLCRRFGQSPTSWKKAMTVLIHKKGERDDPSNWRPISLCSTMYKLYASCLAARITEWATTGRAISPAQKDFMPLEGCYEHNFLLQTVLQATRRERKQCTVAWLDLANAFGSIPHHHIFNTLQEFGMPEIFLRLIRELYEGCSTTIRSVEGETAEIPIRSGVKQGCPLSPIVFNLAMEPLLRAISDGAYGFDLHGERVSILAYADDLVLIADNPKRLQGMLDIIGRAADWTGLRFNAKKCASLHIDGSKRDSVLTTEFLIQGESVVPLVEGQAYQHLSTPTGSRIRQTPEDTIREILQDAAKIDASLLAPRQKINVLNTVLIPRIAFVLRGSTVAKVPLNKADNTIRQLVKKWLSLPQRASNELVYIAHRHGGTNVPRMGDLCEIVVVTHAFRLLTCPDAMVKNIATTALRAATAKRIGRAPSDQGVATFLSGSLDGEFAWDRSDIASLWTHARNATHRLRKRLGCRWVWSEERQELGVLVPHIGTEGNTVIKPGARGMLERSLKVAIRALYVDTLKKKPDQGKAFEVTSKWDSSNHFLPSGSFIRFADWRFIHRARLNCVPLNRTIRHGNPDKRCRRCGYAMETLPHVLCSCRPHGRAWQLRHNAVQDRLVKAIAPHLGEIAVNRAIPGTDSLLRPDIVVTDADRKKIILVDVTIPFENRTTAFRQARARKLEKYAPLADTLRAKGYEVHTDALIVGALGAWDPLNERMLRTCGVGRRYARLMRCLMVSDAIRWSRDIYTEHVTGHRQYRE

SEQ ID NO: 25333 - protein, 935 aa, Actinemys marmorata
MEELAKAEDFENFDTLMDRLTAELSVEITARRREPQEAARATRRFPAPSCNNTAREGRRGHIGRRYDPAAASPIQKPYRMNRTKAMREILDGTSSYCAIQPERLYSYFKDVFNHEAQPNLRHPQCLSPLPRIDLTEDLERDFSPQEVQARLSRTKNTTPGKDGIRYPLLKKRDPGCLVLAAIFNKCKKFHRVPRSWKKSMTVLIHKKGDQDDPSNWRPISLCSTIYKLYASCLAARITDWSVCGGAVSSVQKGFMSCEGCYEHNFLLQMAIQEARRSKRQCAVAWLDLTNAFGSIPHHHIFATLGEFGMPETFIQIPQDLYKDCTTTIHATDGETDAIPIRRGVKQGCPLSPIIFNLAMEPLIRAISSGPTSFDLHGKKLSILAYVDDLVLTADDPESPQGMLDATSRATDWMGLRFNAKKCATLHIDGSKRDSVQTTGFQIQVEPVIPLAEGQAYQHLGTPTGFRVRQTPEDTIQEILQDTAKIDASLLAPWQKINALNTFLIPHISFTLRGSAVAKVPLNKADKIIRKQVKKWLFLSQRASNKLVYIAHRHGGANVPRTGDLCDVAVITHAFRLLTCPDATVRNIAANALRDATEKRIGRAPSNQDIATFLSGSLDGEFGRDGRDIASLWSRTRNATRRLGKRIGCRWEWCEERQELGVRVPQIRLDNNTIVTPTARGLLERTLKAAIRSLYVETLKRKPDQGKAFELTSKWDASNHFLAGGGFTRFADWRFIHRAWLNCVPLNGAVRHGNRDKHCRKCSYPNETLPHVLCSCKPHSRAWQLSHNAIQNRLVKAIAPHLGEISVNCTIAGTDSQLRPDVVVTDEAQKKIILVDVMVSFENRTPAFREAQARKLEKYAPLADTLRAKGYEVQMDALIVGALGAWDPCNERVLRTCRIGQRYARLMRRLMVSDTIRWSRDTYIDHITGHQQYQEL

SEQ ID NO: 25334 - protein, 952 aa, Chrysemys picta
MQQEERWPQARVITPWQFAWMEELAKSEDFENFNTLMDRLTTELSAEITARRREPQEAARATRRFPALSHNNTAREGRRGDVGRRYDPAAASRIQKLYGTNRRKAMREILNGTSSYCAIQPERLYSYFKDVFDHEAQTNLRRPECLPPLPGIDLMEDLERDFSPQEVQARLTRTKNTAPGKDGIRYPLLKKLDPGCLVLAAIFNKCKQFHCIPHSWKNSMTVLIHKKGERDDPSNWRPISLCSTIYKLYASCLAARIADWSVCGGAISSVQKGFMSCEGCYEHNFLLQTAIKEARRSKRQCAVAWLDLTNAFGTIPHHHIFATLGEFGMPETFIQILRDLYKDCTTTIRATDGETDAIPIRRGVKQGCPLSPIIFNLAMEPLIRAISSGLTGFDLHSKKLSILAYADDLVLTANNPESLQGMLDATSRATDWMGLRFNAKKCTTLHIDGSKRHSVQTRGFQIQGEPVIPLAEGQAYQHLGTPTGFRVRQTPEDTIQEILQVAVKIDASLLAPWQKINALNTFLIPRISFTLRRSAVAKVPLNKADKIIRKLLKKWLFVPQRASNELVYIAHRYGGTNVPHMGDLCDIAVITHPVRLLTCTDATVRNFAANALRDATEKRISRAPSNQDIATFLSGSLDGEFGWDGRDIASLWSRTRNTTRRLGKRIGCHCEWCEEHQELGVRVPQIRSDDNTIVTPSARGLLERTLKAAIHSLYVETLKRKPDQGKDFELTSKWNTSNHFLAGGSFTRFTDRRFIHRARLNCVPLNGAVLHGNRDKRCRKCGYFKETRPHVLCSCKPHSRAWQLRYNAIQNRLVKAIAPRLGEICTIPGTNSQLRPDMVVTDEAQKKIILVDVTVSFENRTPAFRKARTRKLEKYAPLADTLRVKRYEVQMDALIVGALGAWDPCNELVLRTCRIGRRYTHLMWRLMVSDAIRWSRDIYIEHITGHRQYQEA

SEQ ID NO: 25335 - protein, 1042 aa, Actinemys marmorata
MPHRGPTSRMPPAEEPEPSPALPNTTTPRQSPAPVLPEPHSLPEDPVLPRRHQELPSPPQDPPEHRSTVRGTTRPQTVPATPEPAETTQQEERRPRARVATPWQSAWMEELAKAEDFENFDTLMDRLTAELSAEITARRGEPQEAARATRRFPALSRNNTAREGRRGDVGRRYNPVAASCIQKLYRMNRMKAMREILDWTSSYCAIQPERLYSYFMDVFDHEAQTNLRHPECLSPLPRIDLMEDLERDFSPQEVQARLSRTKNTAPGKDGIHYPLLKKRDPGCLVLAAIFNKFKQFHRVPRSWKKSMTVLIPQKGDRDDPGNWRPISLCSTIYKLYASCLAARITDWSVCGDAVSSVQKGFMSCEGCYEHNFLLQTAIQEARRSKRQCAVAWLDLTNAFGSIPHHHIFATLGEFEMPETFIQILRDLYKDCTTTIRATDGETDAIPIRRGMKQGCPLSPIIFNLAMEPLIRAISSGPTGFDLHSKKLSILAYADNLVLTTDDPESLQGMLDATSRATDWMGLRFNAKKCATLHIDGSKRDSVQTTGFQIQGEPVIPLAEGQAYQHLGTPTGFRVRQTPEDTIQEILQDAAKIDASLLAPWQKINALNTFLIPRISFTLRGSAVAKVPLNKADKIIRKLVKKWLFLPQRASNDLVYIAHRHGGANVPRMGDLCDVTVITHAFRLLTCPDATVRNFAANALHDATEKRIGRAPSNQDIATFLSGSLDGEFERDRHDIASLWSRTRNTTRRLGKRIGCRWQWCKERQELGVRVLQIRSDDNTIVTPTARGLLERTLKAAIRSLYVETLKRKPDQGKAFELTGKWDASNHFLAGGGFTRFADWRFIHHARLNCVPLNGAVRHGNRDKRCRKCGYPNETLPHVLCSCKPHSRAWQVRHNAIQNRLVKAIAPRLGEISVNYTIAGTDSQLRPDVVVTNEAQKKIILVDVTVSFENRTPALREARARKLEKYAPLADTLRAKGYEVQMDALIVGALGAWDPCNERVLRTCGIGRRYAHLMRRLMVSDAIRWSRDIYIEHITGHRQYQEA

SEQ ID NO: 25336 - protein, 1427 aa, Pelusios castaneus
MDEKITATPASSPSRSPPRIVPASYALDPPQEAHNSATHDATGLADSHAAISAPDLQEHNMADPCPSEAPSRDIESRVNAVLNYLRQNDTRTQTSAPDPATQDPAALTNPVTVPDGASSMGEPSDRLGATPADETGDTGDCIYLLYPLSKAALRCPICQPPREFHLLGGVTRHLRRIHNKGVAFRCITCGLPFTTQKKCKSHYTSCNKENLGTTRRRTTSTRIGKPQQTRAHAASPSRAPTAATPRPPILKQQQGSISHHLAETRPTPCPTHQIAAAASTTPTSTLASQGPAAKAPSAPSRIPLSRRLSMPGGQPSRNGPDSRRISAPTRMTTLYSSAKQTSMSPHTLPRTPAARSDSPDPGSQHPSIFPTSYVRGPAPGALVAFTVPNPASPDCESPSGAQEPRQPSDASRRSGVSPADADPPQRSHTPQRTPSAGPTPQDANALTERAPEVPEDEGAQPACSPNAQPELAPTDLPDDPRPATRLPTPWQLLWLERLRAAKTFDDLDPLVDEMTQGLSAEVKARSERTQEGSSPTRRPPANRHNRSAPRRRNTSRRYDPAAASRIQKLYRSNRAKAMREILDGPSSFCTIPPERLFTYFSNIFDRVALLTSGRPECLPPLPRIGDAEDLETDFTPEEVMTRLARTKNTAPGKDGVPYSILKRRDPGCLVLSALFNRCKEFRRTPSAWKKTMTVLVYKKGERDDPSNWRPISLCSTIYKLYASCLAARITTWSVNGGAISSVQKGFMSCEGCYEHNFILQTAIQTARRSRKQCAMAWLDLANAFGSMPHQHIFSTLQEFGMSATFLQLLRELYDGSTTTIRSIEGETAEIPIRSGVKQGCPLSPIIFNLAMEPLIRAIAEGPEGLDLHGKRVSILAYADDLVLVADDPKHLHNMLHTTSLIADWMGLRFNAKKCASLHLDGSKKDAAQPTSFQIQGEPVACLEDGQAYQHLGTPTGFRVQQTPDDTIQSILQDAGKIDASLLAPWQKVNALNSFLIPRIAFVLRGSAVAKVPLNKADGAIRRLVKRWLFLPLRASNELTYIDHKQGGANVPRKGDLCDIAVITHAFRLLTCPDPTVKNIATNALHEVAAKRIKRIPSNTDVTTYLSGSLEGEFGQDRGDISSLWTRARVATRRLGKRIGCRWSWCEERQELSVLVPRNRTEDRTIVPPNARGQLERILKAAVHALYVEDLKRKPDQGKVFELTSKWDASNHFLPEGSYTRFADWRFIHRARLNCVPLNGAVRHGHRDKRCRKCGYANETLPHVLCSCKLHSRAWQLRHNAVQARLVKAIPPHLGAVKVNSTVPGTDSLLRPDVVVTDEDQKKVIMVNITVPFENRSPAFLGARTRKEEKYAPLADTLRAKGYTVQIHALIVGALGAWDPANEGVLQACGVGKRYARLMRRLMVSDTIRWSRDIYIEHITGHRQYQEE

SEQ ID NO: 25337 - protein, 915 aa, Actinemys marmorata
MEELSKAEDFENFDTLMDRLTAELSAEITARRREPQEASRATRIFPAPSRNNTAREGRRGDVGHRYDPAAASRFQKLYRMNRTKAMREILDGTSFYCAIQPERLYSYFKDVFDHEAQTNLRRPECLSPLPRIDLTEDLERDFSPQEVQARLSRTKNTAPGKDGIRYPLLKKRDPGCLVLAAIFNKCKQFRRVPHSWKKSMTVLIHKKGDRDDPGNWRPISLSSTIYKLYASCLAARITDWSVCGGAVSSVQKGFMSCEGCYEHNFLLQTAIQEARRSKRQCAVAWLDLSNAFGFIPHHHIFATLGEFGMPETFIQILRDLYKDCTTTICAMNGETDAIPIRRGVKQGCPLSSIIFNLAMEPLIRAISSGPTGFNLHGKKLRILAYADDLVLTADDPESLQGMLDATSRATDWMGLRFNAKKCATLHIDGSKRDSVQTTGFQIQGEPVIPLAEGQAYQHLGTPTGFRVRQTPEDTIQEILQDAAKIDASLLAPWQKINALNTFLIPRISFTLRGSAVAKVPLNKADKIIRKLVKKWLFLPQRASNELVYIAHRHGGTNAPRLGDLCDVAVITHAFLLLTCADATVRNIAANALRDATEKRIGRAPSNQVIATFLSSSLDGEFGRDGRDIASLWSHTRNATCRLGKRIGCCWEWCEERQELGIRVPQIRSDDHTVVTPTARGLLERTLNATIRSLYVETLKRKPDQGKAFELTSKWDASNHFLDGGGFTRFADWRFIHCARLNCVPLNGAVRHGNRDKCCRKCGYPNETLPHVLCSCKPHSRAWQLRHNAIQNRLVKAIVPCLGEISVNCTIAGTDSQLRPDVVVTDEAQKKIILVDVTVSFENRTPAFREARARKLEKYAPLADTLRAKGYEVQMDALIVGALGAWDPCNERVLRTCGIGRRYARLMRRLMVSDAI

SEQ ID NO: 25338 - protein, 1073 aa, Chelonia mydas
MPQIALQTPDITGGTSPAAPAKHLAFIARRPSTAPKSILWDTAYERSHAPAATAQAAATSRRTSGVPATPEPNRVSPTASNASIPPEIPPQHPTEGNPDPRDRRQADHAGFEPAPDEVKDHEGQQPMVRVATPWKTAWTEELQAAASFDDFDLLIDRLTQELSAEITPRRSSNQENAPPAHRTPAPNHNTTTRGARSRDASCRYDPSAASRIQKLYRANHSKAMREILDGPSLYCMIPSERLYNYFKDVFDSIARNDAQRPECLRPLPRVDEAGVLETDYTPKEVTARFSKTKNTAPGKDGIPYSLLKKRDPGCLVLATLFNQCKRFCPTPSSWVKAMTVLVYKKGERDDPSTWRPISLCSMMYKLYASCLASRITEWSVSGGAISSIQKGFMSCEGCYEHNFVLQTTIEMARRARRQCMAAWLDLANAFGSMPHHHIFATLLEFGMPENFLRVIREVYEGCSTTIRSVEGETAEIPIRSGVKQGCPLSPIIFNVAMEPLLRAISNGTDGFNLHGERMSILAYADDLVLTTDDPENLQRMLDATSRAADWMGLRFNAKKCATLHIDGSKRDSVQTTGFQIQGEPIIPLAEGQTYQHLGTPMGFRVWQTPEDTIQEILQDAAKIDASLLAPWQKINALNTFLILRISFTLRGSAVAKVPLNKADKIIRQLVKKWLFLPQKASNKLVYITHRHGGANVPRMGDLCDIAVITHAFRLLMCPDAMVWNIAANALHDATKKRIGRAPDNQDTATFLSDSLDGEFGRDSHDIASLWSRARNAMLRLGKRISCHWEWCEERKELGVLVLQIRSDDNTIVTPSARGMLERSLKAAIYSLYMETLKRKPDQGKAFELTSKWDASNHFLTGDGFTRFADWQFIHHARLNCVPLNGAVHHRNQDKHCRKCGYSNETLPHVLCSCKPRSRAWQLRHNAIQNRLVKAIAPRLGEVAVNCAIPGTDSQLRPDVIVSNEAQKKIIFVDITVSFENRTPAFHEARARKLEKYAPLADTLRAKGYEVQMDALIVGALGAWDPCYERVLRTCGIGRLYVGLMRRLMVSDTIRWSRDIYIEHITGHRQYQEA

SEQ ID NO: 25339 - protein, 850 aa, Chelonia mydas
MREILDGPSPYCTIPSERLYSYFKDLFDHTAQDGALRPECLHPLPRVDDAGALEADFTPKEVLARLSKTKNTAPGKDGIRYSLLKKRDPGCLVLATLFNQRKRLCRTPSSWKKAMTVLVYKKGERDDPSNWRPISLCSTMYKLYASCLASRITEWSVCGGAISSTQKGFMYCEGCYEHNFVLQTIIEMARRARRQCTVAWLDLANAFGSMPHHHIFATLQEFGMPENFLRAIQEMYEGCSTTIRSVEGETAEIPIQSGVKQDCPLSPIIFNLAMEPLLRAISKGADGFNLHGERVSVLAYADDLVLTADDPENLQRMLDATSRVADWMGLRFNAKKCASLHIDGSKRDSVQATEFQIQDEPVIPLAEGQAYRHLGTPTGFRVRQTPEDTIQEILQDAAKIDTSLLAPCQKINALNAFLIPRISFVLRGSAVAKVPLNKADKIIRQLVKKWLFLPQRASSELVYITHRHGGANVPRMGDLCDIAVITHAFRLLTCPDAMVRSIAAKALHDATQKRIGRAPSNQDTASFLSGSLDGEFRRDGGDTASLWSRARNATRRLGKRIGCRWEWCEERQELGVLVPQIRSEGNTIVTPSARGLLERTLKAATHSLYVEALKCKQDQDKAFELTSKWDASNQFLARGSFTRFADWRFIHRARLNCVPLNGAVRHRNRDKRCRKCGYSNETLPHVLCSCKPHSRAWQLHHNAIQNRLVKAISPRLGEVAVNCAIPGTDSPLRPDVVVTNETQKKIILVDITVPFENRSPAFREARARKLEKYAPLADTLRAKGYEVQLDALIVGALGTWDPCNERALRTCGISRHYARLMRRLMVSDAIRWSRDIYIEHITGHRQYQEE

SEQ ID NO: 25340 - protein, 1407 aa, Chelonia mydas
MPGADGALTALHTSKRGISTDGTSISPETTQRVTSALPDACPASEAAQRDRRPLPDARPAGPLDPTCPCQDEPASDTAGAAGTPPLQGNEDTIYLQYPLVADVLICPICFPPRSFHLLCGVTRHLKRCHSKQVAFSCALCSLPFETQKQCKTHQVTCRKRSKGTAQPPAPAPSPAAACRPTAPEPQQRTANVQAAVKKPAPPVARPAQRGAAIEKVPAAAGSTTQVLASRRPISPSHIARQISILRRLSSTLPPAQHVPVPRRISAASRIAAQDPVARRVSAAPQTTPRTPTAGGARAPPQTALRTPTAGGARATPQSALQTPAAEGASAQPQAALQAPDIAEGTNPTATENHRALITRRPSTAPESILRDAANSGSHVPAATAQAAAAPRRTSAVPATPEPDRVPPTTSNARIPPEIPPEIPPQLPTKGNDGSRDRRQVDCAGIESASNEVEDHEGQQPVERAATPWQTAWTEKLQATASFDDFDLLVDSLTQALSAETAPRRRPSQENAPPAHRTPAPNLNTTTRGTRRRGANRHYDPAAASRIQKLYRANRSKAMREILDGPSPYCTIPSERLYSYFKDVFDHTAQDGALRPECLRPLPRVDDAGALEADFTPKEVLARLLKTKNTAPGKDGIRYNLLKKRDPGCLVLATLFNQCKRFCRTPSSWKKAMTVLVYKKGERDDPSNRRPISLCSTMYKLYASCLASRITAWSVHGGAISSTQKGFMSCEGCYEHYFVLQTIIETTRRARRQCTVAWLDLANAFGSMPHHHIFATLQEFGMPQNFRRVVQEMYEGCSTTIRSVEGETAEIPILSGVKQGCPLSPIVFNLAMEPLLRAISQGADGFNLHGERVSVLAYVDDLVLTADDPENLQRMLDATSQVADWMGLRFNAKKCTSLHIDGSKRDLVQATEFQIQGEPVIPLAEGQAYRHLGTPTGFHVQQTPEDTIQEILQDAAKIDSSLLAPWQKINALNTFLIPRISFVLRGSAVAKVPLNKADKIIRQLVKKWLFLPQRASNELVYITHRHGGANVPRMGDLCDIAVITHAFRLLTCPDAMVRSIAATALHDITQKRIGRAPSSQDIASFLSGSLAGEFGRDGGDIASLWSHARNATRRLGKRIGCRWEWCEERQELGVLVPQIRSEGNTIVTPSARGLLERTLKAATHSLYVEALKRKPDQGKAFELTSKWDASNHFLAGGGFTRFADLRFIHRARLNCVPLNGAIRHRNRDKCCRKCGYANETLPHVLCSCKPHSRAWQLRHNAIQNRLVKAISPRLGEVAVNCAIPGTDSQLRPDVVVTNETQKKIILVDITVPFENRSPAFREARARKLEKYAPLADTLRAKGYEVQLDALIVGALGAWDPCNERVLRTCGISKRYARLMRRLMVSDTIRWSRDIYIEHITGHRRHQEE

SEQ ID NO: 25341 - protein, 1012 aa, Gopherus evgoodei
MTTRERPDADTAPAEPSRAPPTNNATTPPTAMPRGPTERSPELQGRRPAGQTANPLPARTEEPEDRQPTIRPATPWQAAWIEKLQATVSFEEFDQLINELTCELSTEIVSKRTPNQEAARPTSRRPAPNRDATTRGAGRRNPSRRYDPAAASQIQKLYRTNRLKAMRKVLDGPSSYCTIPPERLYRYFLEVFADKPRNDVQRPECLHPLPRITNADGLEADFTPKEVMARLSWTKNTAPGKDGIPYSLLKKRDPGCHVLSGIFNLCRCFGRPPTSWKKAMTVLIYKKDERDDPSNWRLISLCSTMYKLYASCLAARITEWATTGGAISPAQKGFMPSEGCYEHNFLLQTVLQMTRRAHNQCAIAWLDLANAFGSIPHHHIFSTLREFGMPETFLRLIRELYKGCSTTIRSVEGETAEIPIRSGVKQGCPLSPIIFSLAMEPLLWAISDGADGFDLQSERVNVLAYADDLVLIADDPESLQGMLNTIGRVAEWTGLRFNAKKCASLHVNCSKNSVQATDFLLQGESIVPLAKGQAYQHLGTPTGFHVRQTPEDTIQEILQDAARIDVSLLAPWQKIDALNTFLIPRIAFVLRGSAVAKVPLNKADNVIRQLVKKWLSLPQRASNELVYIAHRHGGTNVPRMGDLCDIAVVTHAFRLLTCPDAVVKNVATTALRSATAKRIDRAASGQDMATFLSGSMDGDFARDRGDIASLWTRARNATRRLGKRLGCRWVWSEDQRELGVLIPRTETEDTVISPGARGTLERSLKAAVRALYLGTLKKKTDQGKVFEVTSKWDSSNHFLHSGSFIRFADWRFIHRARLNCVPLNGAVRHGNRDKRCRKCGYAMETLPHVLCSCKPHARAWQLRHNAIQDRLVKAIAPHLGEKVTNRTVPGTDSPLRPDIVVTDEAQKKIILIDVTVPFENRTLAFCEARARKLEKYTPLADTLRSKGYEVYTDALIVGALGAWDPCNERVLRACGVGRRYAQLMRRLMVSDTIRWSRDIYTEHVTGHRQYQE

SEQ ID NO: 25342 - protein, 1287 aa, Limonius californicus
MPLGPTGKGSGKGSPAPGPSGVPRRPSKSNRSGPSTSTASSVTERKAPLSPSTPGLSQVPKRTATPPTTTGAKKRPGPSQPSTSTAQTPATPFQCGTCGKTYQAKAALAKHIKDCGKGDLERCMVCGARFPTFAGVRQHERRAHPIEYRKALEEKLPASEAELMSKIAHSEVRCPAGMNFKTVMADTGLTQHQVRYRREKAEYAQYLDRAKRELKKSRQDLFHASTSRATHPRVQCPPKEVTPPTSTGPPSPSLGLSSPLTNIVPSPNIPGRPVITSPPTTAPILSCRSKSSPPGTDFTSPSSCSHSKKRKQASPLTQPSAARPRLDLPPSPLPTASEHTIPLITTGGSPTTPPLALSEPKRKRSPSPTPPRAPRPRLNPPPGGPPSDPEDNDDEPPSSPLPSPDPPIQRSQSDPALGIPPAEEEEGNEEGRFLQHLLEAYHEADATSKKLLQLCFTGTLPELDRGINEWLDAVFPAARRTYPRRGRTPATGAALPPPPRNTRDLKQATYKKAQDLFRKNRPALAQSILEGKPLLEEEVYPTIEDVCSTFAGIYESPSPPDAAVPVPPLAPANMNILTAPILPEHLVEAVSGWRNSSPGPDGITVAAVRSCSPESLSLLFNVILYRQLSPTAWSTCRTIVLPKDGDRRDAGNWRPITIGSAVQRIFHRILARRMSQSLVLSLHQRGFTETDGTLANVLILEHYIRERRLQGKSYNIVSLDIRKAFDSVSHNAILRALRRFSIPPFLRRYLEAMMGSAHTHISVGSAQTREIHFRRGVKQGDPLSPLLFNMVMDELLVTLNAGPIGGSLGPQTRVGVMAFADDLVLLEDEDRHMPNSLDNTTQFLEARGMALSPKKCYAISAAVCRGKSVVRTRSIFKVQGQFLPAIADLATFRYLGHHFSGTGVNKPTIFNLVRWLQHLQAAPLKPDQKLAILKGHLIPRLYHGLQSPAVTGEMLNESDRLIKKFVKRALHLNIHTGDQFLFAKVKDGGLGIPQLRGVLPFILQKRLEALSIWGDETVSYILSVDSSLAFRRRVDILARLGNPTPRWREEIATRPYSKGLEGAVEDVASRSWIERIPTGWTGRDYVRAVQLRTNNLPTVGLPYNNQDQRMCRAGCPRVESLSHVLQACPATHHERISRHDQVVHQMARHTRRKGWLTEVEPRVRHREGQLFKPDLVIHRDRQTLIVCDVQVSWEGPRSLAQSWENKRMVYDNHRFREAASTKWPNKELIFLPLIIGARGIWPRCNTATAQALSLPQGVKNNMVNGIIKWGSTIHHHFSASVWRRRRP

SEQ ID NO: 25343 - protein, 1160 aa, Limonius californicus
MGKAHYRTLHHLRIRYLFLTPPTLLLTPLKSRNWLAKCGRGISYKRVMADTGLTEHQIRHRREKREYAKYLDRAKRELKKTGLTQFFNPKSKVPVRPSTSSVSTLSPDIPSSSGLSPSTPSSPLTPREPLPLSISPRRPQQKGTPSPQASIQVARSRSSPPGHTITSDHPRKRKPASPLNPPLVTRPKLDSSVASRISADPGKPEITSEGVTPPSSQTVTTDKRKRSPSPPTPRQSKLRPATLLPEPDPPDEPPSSPDDPPGSPPTPEEPVRRSLSDPAISYTPRARIEEDDDVSGFLQHLLDALPTAEPHTKKLLQLSCTGTSAELDRGITEWLEAVFPATTRKIPKSGKPPTARNFPPPPKNQRDKRAAYYKKVQDLYAKDRPSLAQKILDGRPLDAVETYPSIDAVTALYGGIYESDSPPDPEDPSPPIRPANKEPLQAPITIEDITCAKSGWSNSSPGPDGITIAAVKSCPNQLLMALFNSILYRQLSPSAFASCRTILIPKDGDRRDPGNWRPITIGSAVQRLFHRILAKRLSSALSLSLHQRGFTETDGTLANVTLLEHYIKTRRVQGKSYNIVSLDIKKAFDSVSHASVLRALRRFEVPPFLRGYLEEMMKAAHTTITVGGEKSRIVHFRRGVKQGDPLSPILFNIVMDELLVRANNNHHGGTMGPTTKVAAIAYADDLVLIEDRDVDMPNALELVTSFLASRGMLLNPRKCNAICATTTRGKSVPRTRPFLKIAGQFIQLIADLSTFRYLGHSFSCKGSTKPTIFNLVQWLTNLSSAPLKPDQKLAILKIFLIPRLYHSFQCPAVTGEILNESDRAIKRFVKKTLKLSTHTGDQHLYAGVRDGGLGIQQLRAVIPYILHRRLEALTTSGDEAINTVLAHGFALAFKTRVEKLAAKGNPAPKWREEVATRAYSKGLECAAEDAASRSWVLNKPNGWSGRDFVRAVQLRTNNLPTAGLPYNPPDQRRCRAGCQRIESLCHVLQACPATHHERISRHNQVAKQVARHTRRKGWQTEMEPHVRHRDGQLFKPDLVIHRDPHTLVICDVQICWEGPRTLSQSWENKRLVYDQPRFVEAARTRWPDKEFLFLPLLVGARGIWPRCNQPTAQLLSFPPSMKANIVNGVLKWGSTIHQHFSTSVWRRRRPQNAARRNNGP

SEQ ID NO: 25344 - protein, 1137 aa, Nilaparvata lugens
MKWTDEINRKLLLCYYIVTNNETNKTGYRPLLRNKFLNMYPELHSLSEQRLADQIRVIHRNNRIPINERENLKQQALQTQTTADTTPNLNTEQTTAETTPNLNSTQDDVIQQTAVEAQLLQTRETVQDEENTSGGPSDNLDEYKAQVRSKFNEMYMLHEGMDPHQRQRIPRLQNIPKATHTIAIVNDLIREAINNEQNPNIDEVILLIYSGATTVTQLCNKQPPVGKNRNTKTIPNWRRRLEGKISELRAEIGQITQYLKGNLTERKIKKYKLTVQHLSESEIWDLLDSKKQLLAAKSKRLKRYMKCTLRHKQNQAFNNNQKQFYKSLEHNQNQNNSETPLIEKVEEFWSNIWSQNVQHDETAEWIEQERQDHMNIQLMEEMEISVDDFNIAINRIHNWKAPGPDKIQNFWLKKFTHIHKPLLTILNSFLENPESVPDHIMQGITYLIPKDNDTKNPANYRPITCLSNIYKLLTSIITAKLKIHTEPLMCEEQKGCRSNSKGCKEQLMIDAEITSNAKRKHRNLSYAYIDYKKAYDSVPHSWLLHVLQVYRVNPQIIKFLKTVMAKWTTILSMNKNKTKPIRITRGIFQGDSLSPLWFCLALNPLSNMLNKTKYGYKLEGNQQNTYTLSHLFYVDDLKLFAPNRQQLDYLLKTTENFSHDICMQFGLEKCKINSIRKGRQVTELPYTTNSNEKIEHMAEGDTYKYLGYHQGIGTTQTEIKLTLKSRYMKRLKTILNTHLSARNKVKAVNTYAIPILTYSFGIIDWTETDLEALNTLTRTSFNKSCAHHLHSATERFTLPRSEGGRGVIDIKNMCNEQIDSLRKYFYAKAQSIPLHSAITHLPTSGTPLKLNNPDLQPQINNNTIEKKKTSWKQKTLHGKHINHLLQPHIDQKASNTWLTKGNIFIETEGFMTAIQDQIINTRNYKKYILKDPTTQTDTCRLCNRTTETIDHITSGCSVLAPTDYTRRHDNVCKILHQELALKYKLVNNHTPYYKYQPSNVLENSEVKIYWNRDIITDRTVPHNRPDITVIDKEMKHTYLIDATIPNTGNIQKKTTEKIAKYQLLCDEIKQMWHQERVYIVPIVISSTAVIPKSLHKSIEQLNLSPDLYTQLQKSVVLDTCSITRRVLNITENNSEEN

SEQ ID NO: 25345 - protein, 1194 aa, Nilaparvata lugens
METRQNLIENRQNQGRFGNRSPIHIENSNNLDIQTPAPDVLLDLRPATTRAGLPRQRMKWTDEINRKLLLCYYIVTNNETNKTGYRPLLRNKFLNMYPELHSLSEQRLADQIRVIHRNNRIPINERENLKQQALQTQTTADTTPNLNTEQTTAETTPNLNSTQDDVIQQTAVEAQLLQTRETVQDEENTSGGPSDNLDEYKAQVRSKFNEMYMLHEGMDPHQRQRIPRLQNIPKATHTIAIVNDLIREAINNEQNPNIDEVILLIYSGATTVTQLCNKQPPVGKNRNTKTIPNWRRRLEGKISELRAEIGQITQYLKGNLTERKIKKYKLTVQHLSESEIWDLLDSKKQLLAAKSKRLKRYMKCTLRHKQNQAFNNNQKQFYKSLEHNQNQNNSETPLIEKVEEFWSNIWSQNVQHDETAEWIEQERQDHMNIQLMEEMEISVDDFNIAINRIHNWKAPGPDKIQNFWLKKFTHIHKPLLTILNSFLENPESVPDHIMQGITYLIPKDNDTKNPANYRPITCLSNIYKLLTSIITAKLKIHTEPLMCEEQKGCRSNSKGCKEQLIIDAEITSNAKRKHRNLSYAYIDYKKAYDSVPHSWLLHVLQVYRVNPQILKFLKTVMAKWTTILSMNKNKTKPIRITRGIFQGDSLSPLWFCLALNPLSNMLNKTKYGYKLEGNQQNTYTLSHLFYVDDLKLFAPNRQQLDYLLKTTENFSHDICMQFGLEKCKINSIRKGRQVTELPYTTNSNEKIEHMAEGDTYKYLGYHQGIGTTQTEIKLTLKSRYMKRLKTILNTHLSARNKVKAVNTYAIPILTYSFGIIDWTETDLEALNTLTRTSFNKSCAHHLHSATERFTLNRSEGGRGVIDIKNMCNEQTDSLRKYFYAKAQSIPLHSAITHLPTSGTPLKLNNPDLQPQINNNTIEKKKTSWKQKTLHGKHINHLLQPHIDQKASNTWLTKGNIFIETEGFMTAIQDQIINTRNYKKYILKDPTTQTDTCRLCNRTTETIDHITSGCSVLAPTDYTRRHDNVCKILHQELALKYKLVNNHTPYYKYQPSNVLENSEVKIYWNRDIITDRTVPHNRPDITVIDKEMKHTYLIDATIPNTGNIQKKTTEKIAKYQLLCDEIKQMWHQERVYIVPIVISSTAVIPKSLHKSIEQLNLSPDLYTQLQKSVVLDTCSITRRVLNITENNSEEN

SEQ ID NO: 25346 - protein, 938 aa, Sogatella furcifera
MTVTQLCNRQPKIARQRNSNNTPNWRKRLEGQIAELRTEIGQVTQFLKGNLSENKMRKSKISFHLLKETEIFEILDSKKKKQLLAAKSKRLKRYVKCTLRHKQNLTFTNNQKQFYKSLDQNKFKNNSDTPSIQEKEEFWSSIWSQKVQHEESTEWIQQETGKHENMQLMEESEISEDDFKNSINRLHSWKAPGPDKIQNFWLKSFKSVHKTLIRIFNLYLNHPENVPDHLMQGITYLLPKDNNTKNPAKYRPITCLSNLYKLLTSIIAKKLKSHIEPLMCIEQKGCSSGSKGCKEQLIIDSKVLNNAKVKHRNLFYAYIDYKKAFDSVPHSWLLKVLHIYRVNPQIIKFLASVMAKWKTTLNMNNNLQSKPITITQGIFQGDSLSPLWFCLALNPLSNLLNRTKYGYKLNEKSQNSYTLSHLFYVDDLKLYAASRQQLDNLIKTTEEFSQDICMQFGFEKCKINSIRKGKQVTESPFQAQNEEIIELMAHGNTYKYLGYHQGTSTENSKIKLDLKNQYSHRLKKVLNTQLSARNKVKAVNSYAIPILTYSFGIIEWSDTDLEALNTLTRTTFSKLGAHHPHAAVERFSLPRREGGRGIIDIKNLCYKQIDNLRKYFYSKAENVPLHSAIINLPTAGTPLKLNNKELHPHTKITTIEQKKNNWKQKTLHGKHVNHLSQPNIDTTASNTWLTNGNLFIETEGFMLAIQDQIVSTRNYKKYILKDQATQTDSCRLCNKAQETIDHITSGCSMLAPTEYTKRHDNVCRIVHQELAKKYKLIEEITPYYKYKPANILENSEVKIYWNRDIITDRTVPHNRPDITLINKTAKHTYLIDVTIPNTGNIQKKTAEKITKYQLLCDEIKQMWHQDQVFTIPIVISSTAVIPKALHKYIERLQLPAGLYTQLQKSVVLDTCSITRRVLSSTKTVKNNSVNTVKKETLQ

SEQ ID NO: 25347 - protein, 1152 aa, Bradysia coprophila
MGDSSIGKPSGSGIANMKDLLENTKKEYQAFHPKNKEWPCPFCFIKSKTLIQCRIHIYHEHRSIANADRFDFFSNIQSKTSVPLSSLSERSRPTLNRKCKQKECSITDDVEQESESNEIHKRKDHNLFNVKENMSRIGSHPESKSTKDSNVSTTDDLTKFLKLINDGTNKESVLGDELSTSSMHMADRSTELFEDDDEEVFYCPYDCTNKKPFRNRRGVNIHIGKVHQGKAKIKREDVEYVYITNESAETSDFGRKLAYFKTTTATLRRCPKGARQDLAVTLTKVIRKIVINNSENSWNDLLIFPYATLRIPDRSENVMNLTSFVRQNIKEWNEGNVNIIENTIIAQNNRKFENEISKKAEAKLSDGDISGALRLISSDDCIAPNNDHTLNALKHKHPEHPEPSNFPDSSIDVDQIIPTEEEVRRSIMSFKNGSAGGLDSLRPQILKDLLNIRNGEASNQLLSAITSLTEIILHGDVPASVCPYLYGAMLTALQKICGGIRPIAVGNTWRRISAKLACYRTSSTLSNLFKPNQLGVGIKNGAEAGAHTARIYFNHKHKSIKVFLKIDVKNAFNELRRDALLHEVKRNVPEIFKFVEQCYRNPTNVYYGEHLILSQRGVQQGDPLGPALFCLTIQRIIASLQLLNLDLNLWYLDDGTIAGHPHDVLLGLEMIIEKAREVGLELNHGKCEISILGSHSIDNSNEVVKMFQMVSPGIQEIREGNEFLLGSPLTDQASVICLEKKIIELQRLSNKLTKISAHSAYFLLRISITTPRLIFFLRGTPMWRNHVGLKRYDEVLKESLESLLNIQLTPKAWSESALPIKSGGIGIRHATEIALPCFLSSIYQVSDLVDDLLSEEYRQTDPPKSEAEELWCEEFGELPEEGLRRFQKIWELDAIKNKIDSLSTSFEKTEDKARFLANSITETGAWLQVLPSPQLGTHLSNDEFRIAMSLRLGTTIVQPHKCICGEKVTEFGRHGLSCSKAKGTKVRHAMVNNILQRSLRSAEVPAILEPPGCSRPDGKKPDGLTLIPWAKGKSLLWDYTCRDTFAPSYLSSTSKHAGHAAKKAEVDKINHYSELSNQFVFVPVASETSGIFGKLALNLIKKIGSKIADVTNEKRSTSYLIQRISVAIQKGNVVSILGTIPESKNLGEIFYL

SEQ ID NO: 25348 - protein, 866 aa, Montipora efflorescens
MVEQDADNNKPNYKTTKQTSKDDEMVFESIQDACSYWKHLWETSGSTANTKPGWLVEVRRAFEKLVPVPRQDSFQLNQTKCADAIKKKRNWSAPGPDRIANYWWKRAVTLHEGTAASFKTILTGEVGYPSWFTGGRTNLIPKPGELSSQNQRPITCLNTQYKWFTTCLLSPMDEHLETHNLLEEEQRGARTKCSGTLDNLMIDRMVCRDSRNGSRNLSMAWIDVRKAFDSVSHAWLQEMMTMHKFPLWMCRTVASLCESWNTKITARTKEGYETSDVIRFNKGLPQGDALCPRLFTLCLNPISWKLKASEGYKLSRPLSGKITHLLYIDDMKIYAASKDKLERVMKTVKEAMADVGLEWNEKKCSTAHVRRGSLDSSLGGTAIGERQVIQNLKKGETYKFLGVLENSKQEDSSVLWGASKVCLQRLSIIWSSPLSDFHKVLASNQYALPVVTYPMWTLTWPLADLQQLDREARKIIKENGGYHPLGSTELLYLPRKCGGRGLKSFESLYKQTKFKTTMKLYANEDRTMSLVREFEEKCERAGRRSLVKDAKKFALEMDITLDLSYPDPKALQTDSGEEAHVKGVGRTLRAREEERSMREVREQRWQGKLFGERWDDNKVIDCFTWLSKWKSAPVHTVAGIYELYQQLLPTKLYHQSKTKTLTTSDTTCRMCGKGPESMAHVISGCGTLAQTKYMQRHNAALKILFFEFLKDLDLIQCIPPWYSPVSPKPEYKNDRACAYWDVPVFAENTEVRANRIDARIVDRKEKKVILIEMSCPWVSNREQKEQEKTDKYAPLRWEMRQQFPGHTITQFNVIVDVLGGYSMETAEKVRKFLGLDRGNQVLFNMQKAVLSYTLNIARSFKVSTSY

SEQ ID NO: 25349 - protein, 927 aa, Montipora cactus
MLEKECGKLSAASIVTYIERKKSDLRKAKRAFMRKKKQKEARDLNTRFHADPGGVFAQFSRMVEQDADNNKPNYKTTKQTSKDDERVFESIQDACSYWKHLWETSGSTANTKPGWLVEVRRAFEKLVPVPRQDSFQLNQTKCADAIKKKRNWSAPGPDRIANYWWKRAVTLHEGTAASFKTILTGEVGYPSWFTGGRTNLIPKPGELSSQNQRPITCLNTQYKWFTTCLLSPMDEHLETHNLLEEEQRGARTKCSGTLDNLMIDRMVCRDSRNGSRNLSMAWIDVRKAFDSVSHAWLQEMMTMHKFPLWMCRTVARLCESWNTKITARTKEGYETSDVIRFNKGLPQGDALCPRLFTLCLNPISWKLKASEGYKLSRPLSGKITHLLYIDDMKIYAASKDKLERVMKTVKEAMADVGLEWNEKKCSTAHVRRGSLDSSLGGTAIGERQVIENLKKGETYKFLGVLENSKQEDSSVLWGASKVCLQRLSIIWSSPLSDFHKVLASNQYALPVVTYPMWTLTWPLADLQQLDREARKIIKENGGYHPLGSTELLYLPRKCGGRGLKSFESLYKQTKVKTTMKLYANEDRTMSLVREFEEKCERAGRRSLVKDAKKFALEMDITLDLAYPDPKALQTDSGEESHVKGVGRTLRAREEERSMREVREQRWQGKLFGERWDDNKVIDCFTWLSKWKSAPVHTVAGIYELYQQLLPTKLYHQSKTETLTTSDTTCRMCGKGPESMAHVISGCGALAQTKYMQRHNAALKILFFEFLKDLDLIQCIPPWHSPVSPKPEYKNDRACAYWDVPVFAENTEVRANRIDARIVDRKEKKVILIEMSCPWVSNREQKEQEKTDKYAPLRWEMRQQFPGHTITQFNVIVDVLGGYSMETAEKVRKFLGLDRGNQVLFNMQKAVLSYTLSIARSFKVSTSY

SEQ ID NO: 25350 - protein, 927 aa, Montipora cactus
MLEKECGKLSAASIVTYIERKKSDLRKAKRAFMRKKKQEEARDLNTRFHADPGGVFAQFSRMVEQDADNNKPNYKTTKQTSKDDERVFESIQDACSYWKHLWETSGSTANTKPGWLVEVRRAFEKLVPVPRQDSFQLNQTKCANAIKKKRNWSAPGPDRIANYWWKRAVTLHEGTAASFKTILTGEVGYPSWFTGGRTNLIPKPGELSSQNQRPITCLNTQYKWFTTCLLSPMDEHLETHNLLEEEQRGARTKCSGTLDNLMIDRMVCRDSRNGSRNLSMAWIDVRKAFDSVSHAWLQEMMTMHKFPLWMCRTVARLCESWNTKITARTKEGYETSDVIRFNKGLPQGDALCPRLFTLCLNPISWKLKASEGYKLSRPLSGKITHLLYIDDMKIYAASKDKLERVMKTVKEAMADVGLEWNEKKCSTAHVRRGSLDSSLGGTAIGERQVVQNLKKGETYKFLGVLENSKQEDSSVLCGASKVCLQRLSIIWSSPLSDFHKVLASNQYALPVVTYPMWTLTWPLADLQQLDREARKIIKENGGYHPLGSTELLYLPRKCGGRGLKSFESLYKQTKVKTTMKLYANEDRTMSLVREFEEKCERAGRRSLVKDAKKFALEMDITLDLAYPDPKALQTDSGEESHVKGVGRTLRAREEERSMREVREQRWQGKLFGERWDDNKVIDCFTWLSKWKSAPVHTVAGIYELYQQLLPTKLYHQSKTKTLTTSDTTCRMCGKGPESMAHVISGCGTLAQTKYMQRHNAALKILFFEFLKDLDLIQCIPPWYSPVSPKPEYKNDRACAYWDVPVFAENTEVRANRIDARIVDRKEKKVILIEMSCPWVSNREQKEQEKTDKYAPLRWEMRQQFPGHTITQFNVIVDVLGGYSMETAEKVRKFLGLDRGNQVLFNMQKAVLSYTLNIARSFKVSTSY

SEQ ID NO: 25351 - protein, 928 aa, Montipora capitata
MLEKECGKLSAASIVTYIERKKSDLRKAKRAFMRKKKQEEARDLNTRFHADPGGVFEQFSRMVEQDADNNKPNYKTTKQTSKDDERVFESIQDACSYWKHLWETSGSTANTKPGWLVEVRKAFEKLVPVPRQLDSFQLNKTKCAEAIKKKRNWSAPGPDRIANYWWKRAVTLHEGTAASFNTILTTEVGYPSWFTGGKTNLIPKPGELSSQNQRPITCLNTQYKWFTTCLLSPMDEHLETHNLLEEEQRGARTKCSGTMDNLMIDRMVCRDSRNGSRNLSMAWIDVRKAFDSVSHAWLQEMMTMHKFPLWMCRTVARLCESWNTKITARTKEGYEISDVIRFNKGLPQGDALCPRLFTLCLNPISWKLKASEGYKLSRPLSGKITHLLYIDDMKIYSASKDKLERVMKTVKEAMGDVGLEWNEKKCSTAHVRRGSLDSSLGGTVIGERQVIENLKKGETYKFLGVLENSKQEDSSVLWGASKVCLQRLSIIWSSPLSDFHKVLASNQYALPVVTYPMWTLTWPLADLQQLDREARKIIKENGGYHPLGSTELLYLPRKCGGRGLKSFESLYKQTKVKTTMKLYANEDRTMSLVREFEEKCERAGRRSLVKDAKKFALEMDITLDLAYPDPKALQTDSGEESHVKGVGRTLRAREEERSMREVREQRWQGKLFGERWNDNKVIDCFTWLSKWKSAPVHTVAGIYELYQQLLPTKLYQQSKTKTLTTSDTTCRMCGKGPESMAHVISGCGALAQTKYMQRHNAALKILFFEFLKDLDLIQCIPPWYSPVSPKPEYKNDRACAYWDVPVFAENTEVRANRIDARIVDRKEKKVILIEMSCPWVSNREQKEQEKTDKYAPLRWEMRQQFPGHTITQFNVIVDVLGGYSMETAEKVRKFLGLDRGNQVLFNMQKAVLSYTLNIARSFKVSTSY

SEQ ID NO: 25352 - protein, 1192 aa, Montipora capitata
MNSDVLECKAKAKELTELQDPPRYADGKKRGYMSVLKELWDERGYFHLGLSELHLRNQAAYLERVMGNVQDTILRNAKGTESETGQPVEEGNLLYEVQEPSINESEQATSDLHTANENNDLEGPQFLEETNLDAREILEGAIPIFASVNSNTGDFSSRDIDTRVKQRPTQSDINTINTVINELRRREEGHTLDPIRNPFGYLWLANYILYSVVVAFLIHKGWKKEPGTTERRKRKTPSERIKEAFVKQATEVRKKISVAVAELDRIKGNKKITNKGKKNRSMLEKECGKLSAASIVTYIERKKSDLRKAKRAFMRKKKQEEARDLNTRFQADPGGVFAQFSRMVEQDADNNKPNYKTTKQTSKDDERVFESIQDACSYWKHLWETSGSTANTKPGWLVEVRRAFEKLVPVPRQDSFQLNKTKCAEAIKKKRNGSAPGPDRIANYWWKRAVTLHEGTAASFNTILTGEVGYPSWFTGGKTNLIPKPGELSSQNQRPITCLNTQYKWFTTCLLSPMDEHLETHNLLEEEQRGARTKCSGTVDNLMIDRMVCRDSRNGSRNLSMAWIDVRKAFDSVSHAWLQEMMTMHKFPLWMCRTVARLCESWNTKITARTKEAYEISDVIRFNKGLPQGDALCPRLFTLCLNPISWKLKASEGYKLSRPLSGKITHLLYIDDMKIYAASKDKLERVMKTVKEAMGDVGLEWNEKKCSTAHVRRGSLDSSLGGTVIGERQVIENLKKGETYKFLGVLENSKQEDSSVLWGASKVCLQRLSIIWSSPLSDYPMWTLTWPLADLQQLDREARKIIKENGGYHPLGSTELLYLPRKCGGRGLKSFESLYKQTKVKTTMKLYANEDRTMSLVREFEEKCERAGRRSLVKDAKKFALEMDITLDLAYPDPKALQTDSGEESHVKGVGRTLRAREEERSMREVREQRWQGKLFGERWDDNKVIDCFTWLSKWKSAPVHTVAGIYELYQQLLPTKLYHQSKTKTLTTSDTTCRMCVKGPESMAHVISGCGALAQTKYMQRHNAALKILFFEFLKDLDLIQCIPPWYSPVSPKPEYKNDRACAYWDVPVFAGNTEVRANRIDARIVDRKEKKVILIEMSCPWVSNREQKEQEKTDKYAPLRWEMRQQFPGHTITQFNVIVDVLGGYSMETAEKVRKCLGLDRGNQVLFNMQKAVLSYTLNIARSFKVSTSY

SEQ ID NO: 25353 - protein, 1136 aa, Dermatophagoides pteronyssinus
MTSQKEQSASSIGNQGINLESNDISRANLLAWQGEDDDDETQILSQIPSTSSTTTKELVYTSIIQQIKDEEEEQWIIKLVQIITNRFTRMPRGWWQKLLTDYNNKFGKNYSSVDIKNKYNRVKHMLNNQQMNNQQISNQENDIQEERSQPIENTTNPSLYQKVKTTLLSNINKYMVKKEMKTRTKKVFSQKINHQVLDMINKILKQEKIDEKSVDIIQVRDILYACQQTYQQITESVKSPSKWKESIEKKISKLQEKIRIINENHNKNQLTKEMKTICVNNKIHSNNKQRIRELKDEMEGKILVYKKKINIAESRKQFKRTNMMYEFNRHKFYRKLEEEEKQIDPEINVTDVYEFWKEIWNQQQDKEDHSELIETVNPIQVQFTMEDDMQKSVIESMIKKLPNWKAPGYDFVYNFFIKKIHVLHPKLISLIQEIIEEPELIPEELYGGVTYLIAKKQNAKEPKDLRPITCLSTIYKLISKVMTTILQHICDMNSLISPNQMGNRKRTQGAKEQALINKNLNSKFNNNLFTTWIDIQKAFDSVDHQYMEDYLKKLTMPDNIIKFVERMLKYQKVKLLCNQKEIGTIEMTKGIMQGDSMSPLLFVLGIEPLSRVLNQNCAKIPIDEEQILERNHLIFIDDIKLFAKTEEELIDMCQLTARCLKQMNLNINETKSASNIDSNQVFGNVVDDNIGYKYLGILEDSSSIAKIENKNIIRQRIYDRVRKLCQAKLNAKNMFAAVNEFAISTLNYFIGLIAFEPQEFQQIDLEIRKIMNEEGIVRNSANMDRLYLKREELGRGLCNIEEKAEQMLLNLYNHIYQRFEVKPIIENEKASGTFLGTIKEYLITKYEESGLDTLVLNQKKKRMEKIQSKAMHSVIFQNEDNVIDVKESSVWLKHGNITAKEEAMLTKLQDRNIFYDNKKCSHCNQARKTVDHLATQCGRKLDFDYKKRHNDIVRCIHFHYALKFGFSKTKKIKNYRVESVLINDQAKIKSDVPIRTELRLEHNKPDLFIHDLKNNKITLIEIGVTNKNILKQTEITKLRKYEVLANELKILHPNTEVEIIPIVITWDGLVTKFYKKYMDRIGIDKRTKAYVQSITIKRTCESVMIDRRVNHGEEVYFDEVIEAATTIEDHHQQINQ

SEQ ID NO: 25354 - protein, 1327 aa, Trichinella papuae
MGKPSRPAQETPSTAAGSDGQARSGLRRRNHAEVTYPGPFTCTVCSLTECVYSRFKNHCMTHHLHLELSCSVCRKVFPTINAVACHYPHCAKTPRNPNISQNIPETTQVGRTVASSINNKGISENKEPPQNNRVVTRSQVKRAAVGAVTRSRSSLCNGAPAVNAAAGIVRSQVNVVFPDCATLNNNSRQRLMVAPAPPNNGELCSPLSGKVTDGGNVIVRRSARLASNCEAGLHNNGADASSVANVPVIKEVPPARTYRRNRPASANTNITETPRQPPTSMTVPECRRRTREQPQRTTASEATQPAAPTVADNAFPCGECGRVFSTFAGMRLHLKRAHPSSFSSLQPPVKVPRWSALESDTLRELEDALRRNGELSNEKLASLMTDRFERVFTIDMVKGHRRKFRETPRTEGENSRPSTPRESTPAPTAQTSPSTMPVNNITRDNPETAEDINKKLKQHLLHCTTTHNTEVEAEINDIIRNHIIKGNNKNYVTRIVKYLIGAMRPEEERGPKKGRKKKKPEPSVPLNSKQRKRMAYRKVQQAYHKDPKRVVAHLFHSQPLENVSCPVESGEKALQARLGKRPPADRAPFLPKRAPLKNHLLSPISAKEVSEHLKQMNLASASGPDGVKVSHLRDIGPQCLSKIFNTFLLERHIPQVLKDCRTTLIPKVDNPRPDAEDFRPITIGSCIYRLFSKIVTSRLSQLTPLNPRQKAFRSGTDGAFDNITTVASLLKLARKTGKEINLACIDLAKAFDTVNHTSITRALHRHGVDSASIELVESMVGEATTVIINSDGTRSNVIKFNRGVRQGDPISPLLFNLVLDELIDNLDQARCGFSITKEIQVSCVAFADDITLVSGSREGMNNLLTITREFLGERGLGINHSKCKGIRFTKVPKSKSLIIDTNPNCFLIRNQQGTPEPIPMAKPGEPLKTLGINLTLEGNPTFNYPELTRILNTIKHAPLKPHQKVQIIRDHLIPLLQYKLGVPTFYRATLNNIDKSIRLTVKEILHLPTTGLHNSYLYLPLKEGGLGLKRLATQYASRVGLGLSNMATSDDAVSRAVAGLHLSLMDKAKNCLGLSEISKEAIKKAKEKLVQAEIRTLLQCHLGRSHSSFTNDTISNSWMRYPTFLSARNYIMGIKLRAGIIETRAQKWRGRSPPHPTMLLCRHCGARSRTRETDIHVSQKCLHNKKLILRRHNCVVSTLGRRATQQGFAVYYEPCIKHGETVLKPDLVIIKGDTATIIDVAVPWEQGTNLREHNSRKISKYQCLEREAAKYFNVKTVKTGSLVVGARGKWSAGNDSTLKSCGLHCSKRLKKLLCTIALEGTCAVFKH

SEQ ID NO: 25355 - protein, 1097 aa, Trichinella papuae
MDNGNTARSVINHPGNANEQLSPTRAISRQVRSVHTHKRPQATQQHSLVPTIVTIKPNDNLATIKDATAAPPAQPTSITTCSDIFPCGECERVFSTFAGMRLHMKRALPSFFSSLQPPVKAPRWSALESNTLRELEDALRQNGELSNEKLAWLMTDRFERVFTINMVKGHRRKFRETPRTGGEDSRSSITRESTPALTAQTPPSTIPVNAITSDNPETAENINKKLKQHLLHCTTTHNTEVEAEINDIIRDHIIKGNNKNYVTRITKHLIGAMRPEEERRPKTGRKKKKPEPSVPLNSKQRKRMAYRKVQQAYHKDPKRVVAHLFHSQPLENVSCPVESGEKALQARLGKRPPADRAPFLPKRAPLKNHLLSPISVKEVSEHLKQMNLGSASGPDGVKVSHLRDIGPQCLSKIFNTFLLERHIPQVLKDCRTTLIPKVDNPRPDAEDFRPITIGSCIYRLFSKIVTSRLSQLTPLNPRQKAFRSGTDGAFDNITTVASLLKLARKTGKEINLACIDLAKAFDTVNHTSITRALHRHGVDSASIELVESMVGEATTVIINSDGTRSNVIKFNRGVRQGDPISPLLFNLVLDELIDNLDQARCGFSITKEIQVSCVAFADDITLVSGSREGMNNLLTITREFLGERGLGINHSKCKGIRFTKVPKSKSLIIDTNPNCFLIRNQQGTPEPIPMAKPGEPLKTLGINLTLEGNPTFNYPELTRILNTIKHAPLKPHQKVQIIRDHLIPLLQYKLGVPTFYRATLNNIDKSIRLTVKEILHLPTTGLHNSYLYLPLKEGGLGLKRLATQYASRVGLGLSNMATSDDAVSRAVAGLHLSLMDKAKNCLGLSEISKEAIKKAKEKLVQAEIRTLLQCHLGRSHSSFTNDTISNSWMRYPTFLSARNYIMGIKLRAGIIETRAQKWRGRSPPHPTMLLCRHCGARSRTRETDIHVSQKCLHNKKLILRRHNCVVSTLGRRATQQGFAVYYEPCIKHGETVLKPDLVIIKGDTATIIDVAVPWEQGTNLREHNSRKISKYQCLEREAAKYFNVKTVKTGSLVVGARGKWSAGNDSTLKSCGLHCSKRLKKLLCTIALEGTCAVFKH

SEQ ID NO: 25356 - protein, 1133 aa, Coccinella septempunctata
MGCSPRELNTVGPAQARSRGRQHWTREMNISLLNAYFQVTNGEKDTKRYAARLAKAWEELYPDKRFTGKHLIAQIKNIKTRKLLAPDEVQALKADAMSQSHTSRTASIRRSIRRSSAFSTQQVNHEEGEQADTLLDNEPETDPSSDIMLLFEETCLKWGGVMMNVRPKIPKLQQRKEVLNTVQAVDKAIGQIIRNASSWGELCHMVYCAASVACAILEPPKMRAEGRKQQYGKPPWEERLEKKISNIRKEIGVLDNYLRERKSSKRVTRKAQNYAKNCGLKKGDAQFYQKLKAHVETLKQKIAALGNRLKRYHKRCQRYQQNNLFQYNQKKFFRQLDDPGTESTTTPTPYEMATYWTSIWSRDTEHNRSAPWIATEKLQQQSLTEMENVVITEGDIKATIRRLRNWSSPGIDGIQNYWWKYITSTHRVLARLIQNSLGNPQDIPEYFTQGVTYMLPKKGDLTKPENYRPITCLPSAYKILTSTIAHKISIHLKRNNIMAWEQNGCKEKGRGSKELLMIDRELTKQAKRRNKNISIAWIDYQKAYDSVPHSWLLEVLEIYKCDRQIIKLMKFLMTSWRTQIQVGDGANAGSEEIRIKRGIFQGDSLSPLWFCLAMNILSAMLNRSAYGYTMSAEATITHLLYMDDLKLFAKGRKQLEGMLELVRRFSEDVGMTFGLGKCATINVHRGKPTTEDNIRLRDGGEIAELGKEESYRYLGIMQTYEIKQNENKEAVEKELFRRLHKILKTQLTAKNKMEAINIWAHPSFSYTAGVLKWSLSDLQRIDKRVRSTLTRYGLLHPNSAIERVHLPRKEGGRGLGSLEEVCNREEKAMIDYLKKNVSSSVHKWIADQLLSTSAYQGSIGEMEDEGNLEKLRRKWQAKALHGNFYSSLHQREVDRQSSNMYLVKGYLFPQTEGTLLAIQDQVVPTRNYCKFILKQQIENSKCRLCGSYEETVQHLSSGCSAIADTRYMSRHDNMGKVVHQLLCLKENLLTHFTPHHAYVPQSVLENGAIKVYWDFTVTTDRGVEHNRPDMIVWNKQDKTASLIDFAVPLDQNLGKAYEGKISKYEPLARQMKEMWQLKRVEIIPLIISCNGLVHQKTTENLKQMKLPPNTLMWMQKAVLLGTVSIIRSVLYPY

SEQ ID NO: 25357 - protein, 1133 aa, Adalia bipunctata
MGCSPRELNTVGPAQARSRGRQHWTREMNISLLNAYFQVTNGEKDTKRYAARLAKAWEELYPDKRFTGKHLIAQIKNIKTRKLLAPDEVQALKADVMSQSHSSRTASIRRSIRRSSAFSTQQVNHEEGEQADTLLDNEPETDPSSDIMLLFEETCLKWGGVMMNVRPKIPKLQQRKEVLNTVQAVDKAIGQTIRNASSWGELCHMVYCAASVACAILESPKMRAEGRKQQYGKPPWEERLEKKISNIRKEIGVLDNYLRERKSSKRVTRKAQNYAKNCGLKKGDAQFYQKLKAHVETLKQKIAALGNRLKRYHKRCQRYQQNNLFQYNQKKFFRQLDDPGTESTTTPTPYEMATYWTSIWSRDTEHNRSASWVATEKLQQQSLTEMENVVLTEGDIKATIRRLRNWSSPGIDGIQNYWWKYITSTHRVLARLIQNSLGNPQDIPEYFTQGVTYMLPKKGDLTKPENYRPITCLPSAYKILTSTIAHKISIHLKRNNIMAWEQNGCKEKGRGSKELLMIDRELTKQAKRRNENISIAWIDYQKAYDSVPHSWLLEVLEIYKCDRQIIKLMKFLMTSWRTQIQVGDGANAGSEEIRMKTGIFQGDSLSPLWFCLAMNILSAMLNRSAYGYTMSAEATITHLLYMDDLKLFAKGRKQLEGMLELVRRFSEDVGMTFGLGKCATINVHRGKPTTEDNIRLRDGGEIAELGKEESYRYLGIMQTYEIKQNENKEAVEKELFRRLHKILKTQLTAKNKMEAINIWAHPSFSYTAGVLKWSLSDLQRVDKRVRSTLTRYGLLHPNSAIERVHLPRKEGGRGLGSLEEVCNREEKAMIDYLKKNVSSSVHKWIADQLLSTSAYQGSIGEMEDEENLEKLRRKWQAKALHGNFYSSLHQREVDRQSSNMYLVKGYLFPQTEGTLLAIQDQVVPARNYCKFILKQQIENSKCRLCGSYEETVQHLSSGCSAIADTRYMSRHDNMGKVVHQLLCLKESLLTHFTPHHAYVPQSVLENDVIKVYWDFTVTTDRGVEHNRPDMVVWNKQDKTASLIDFAVPLDQNLGKAYKGKISKYEPLARQMREMWQLKRVEIIPLIISCNGLVHQKTTENLKQMKLPSNTLMWMQKAVLLGTVSIIRSVLYPY

SEQ ID NO: 25358 - protein, 1133 aa, Coccinella septempunctata
MGCSPRELNTVGPAQARSRGRQHWTREMNISLLNAYFQVTNGEKDTKRYAARLAKAWEELYPDKRFTGKHLIAQIKNIKTRKLLAPDEVQALKADAMSQSHTSRTASIRRSIRRSSAFSTQQVNHEEGEQADTLLDNEPETDPSSDIMLLFEETCLKWGGVMMNVRPKIPKLQQRKEVLNTVQAVDKAIGQIIRNASSWGELCHMVYCAASVACAILEPPKMRAEGRKQQYGKPPWEERLEKKISNIRKEIGVLDNYLRERKSSKRVTRKAQNYAKNCGLKKGDAQFYQKLKAHVETLKQKIAALGNRLKRYHKRCQRYQQNNLFQYNQKKFFRQLDDPGTESTTTPTPYEMATYWTSIWSRDTEHNRSAPWIATEKLQQQSLTEMENVVITEGDIKATIRRLRNWSSPGIDGIQNYWWKYITSTHRVLARLIQNSLGNPQDIPEYFTQGVTYMLPKKGDLTKPENYRPITCLPSAYKILTSTIAHKISIHLKRNNIMAWEQNGCKEKGRGSKELLMIDRELTKQAKRRNKNISIAWIDYQKAYDSVPHSWLLEVLEIYKCDRQIIKLMKFLMTSWRTQIQVGDGANAGSEEIRIKRGIFQGDSLSPLWFCLAMNILSAMLNRSAYGYTMSAEATITHLLYMDDLKLFAKGRKQLEGMLELVRRFSEDVGMTFGLGKCATINVHRGKPTTEDNIRLRDGGEIAELGKEESYRYLGIMQTYEIKQNENKEAVEKELFRRLHKILKTQLTAKNKMEAINIWAHPSFSYTAGVLKWSLSDLQRIDKRVRSTLTRYGLLHPNSAIERVHLPRKEGGRGLGSLEEVCNREEKAMIDYLKKNVSSSVHKWIADQLLSTSAYQGSIGEMEDEGNLEKLRRKWQAKALHGNFYSSLHQREVDRQSSNMYLVKGYLFPQTEGTLLAIQDQVVPTRNYCKFILKQQIENSKCRLCGSYEETVQHLSSGCSAIADTRYMSRHDNMGKVVHQLLCLKENLLTHFTPHHAYVPQSVLENGAIKVYWDFTVTTDRGVEHNRPDMIVWNKQDKTASLIDFAVPLDQNLGKAYEGKISKYEPLARQMKEMWQLKRAEIIPLIISCNGLVHQKTTENLKQMKLPPNTLMWMQKAVLLGTVSIIRSVLYPY

SEQ ID NO: 25359 - protein, 1133 aa, Adalia bipunctata
MGCSPRELNTVGPAQARSRGRQHWTREMNISLLNAYFQVTNGEKDTKRYAARLAKAWEELYPDKRFTGKHLIAQIKNIKTRKLLAPDEVQALKADVMSQSHTSRTASIRRSIRRSSAFSTQQVNHEEGEQADTLLDNEPETDPLSDIMLLFEETCLKWGGVMMNVRPKIPKLQQRKEVLNTVQAVDKAIGQTIRNASSWGELCHMVYCAASVACAILESPKMRAEGRKQQYGKPPWEERLEKKISNIRKEIGVLDNYLRERKSSKRVTRKAQNYAKNCGLKKGDAQFYQKLKAHVETLKQKIAALGNRLKRYHKRCQRYQQNNLFQYNQKKFFRQLDDPGMESTTTPTPYEMATYWTSIWSRDTEHNRSASWVATEKLQQQSLTEMENVVLTEGDIKATIRRLRNWSSPGIDGIQNYWWKYITSTHRVLARLIQNSLGNPQDIPEYFTQGVTYMLPKKGDLTKPENYRPITCLPSAYKILTSTIAHKISIHLKRNNIMAWEQNGCKEKGRGSKELLMIDRELTKQAKRRNKNISIAWIDYQKAYDSVPHSWLLEVLEIYKCDRQIIKLMKFLMTSWRTQIQVGDGANAGSEEIRIKTGIFQGDSLSPLWFCLAMNILSAMLNRSAYGYTMSAEATITHLLYMDDLKLFAKGRKQLEGMLELVRRFSEDVGMTFGLGKCATINVHRGKPTTEDNIRLRDGGEIAELGKEESYRYLGIMQTYEIKQNENKEAVEKELFRRLHKILKTQLTAKNKMEAINIWAHPSFSYTAGVLKWSLSDLQRVDKRVRSTLTRYGLLHPNSAIERVHLPRKEGGRGLGSLEEVCNREEKAMIDYLKKNVSSSVHKWIADQLLSTSAYQGSIGEMEDEENLEKLRRKWQAKALHGNFYSSLHQREVDRQSSNMYLVKGYLFPQTEGTLLAIQDQVVPTRNYCKFILKQQIENSKCRLCGSYEETVQHLSSGCSAIADTRYMSRHDNMGKVVHQLLCLKGSLLTHFTPHHAYVPQSVLESDVIKVYWDFTVTTDRGVEHNRPDMVVWNKQDKTASLIDFAVPLDQNLGKAYKGKISKYEPLARQMREMWQLKRVEIIPLIISCNGLVHQKTTENLKQMKLPSNTLMWMQKAVLLGTVSIIRSVLYPY

SEQ ID NO: 25360 - protein, 1102 aa, Coccinella septempunctata
MNRSLLNAYFQATDGERNTKKYATKLASIWLELYPDKCFTGKHLIAQIKNIKTRKLLAPDEIDALRAEAMNRSPATRAASIRRSINRLSSSTPQQIGFEEVERIVPQADTQSDASLEIMSLFQEINFKWKGVPMDMRPRIAKVRCSRDVLDTVKAVDVAVGMAIDGSMDFDELCHMVYSAATAINTILETSNKEPELIKQQREKPPWEERLQKKVTALRKEIGILHNYSTEDKPSRKVVRRVQNYANKIGLKRNDPQYNQKIKIYSETLKQKIAALGSRLRRYNKRAQRYRQNNLFLQNQRKFFRQLEDEKDEKSTTPAQEKMVEYWSSIWSQDAQHNNTAPWITPEKLRLQSVTAMENVVVTVEDIKATVKRLRNWSSPGIDGVHNYWWKHLTSTHAALARLLQCALRNPSSVPEYFTQGITYMVPKKGDLSQPNNYRPITCLPSIYKILTSTISCKINQYLKKNNIMAWEQNGCKRKGRGSKELLVIDKELTKQAKKRKKNISIAWIDYEKAYDSVPHSWLVEALKIYKIDDQVIKLLEFLMTSWRTKIYMRGSKTEEIKIKRGIFQGDSLSPLWFCLAMNILSAMLNRSAYGYTISTQVTITHLFYMDDLKLFARGRKQLEGLLELVRRFSEDVGMSLGLGKCATVNVSRGRMTGEENIRLVDGREITEIGTEDGYRYLGIVQTYEIKHQENKEIVEKELFRRMHKILKTQLSSKNKIEAINIWALPSFTYTAGVINWSRTDLQRIDQRMRATLTKYGILHPNSAIERVHLPRKEGGRGLGSIEEACRKENESVSNFFEKNNHLPVHKWVVDQTSAASSSHQGTSEMEEEVDYLENLRRRWQTKALHGNFYSSLHQNEVDLESTNMYLMKGYLYPQTEGTLFAIQDQVVPTRNYSKFILKQQLNNTKCRLCDCVEETVQHLSSGCSAIADTKYMSRHNNMGKVVHQLLCLGERLLQNFTPYHAYTPQTLLENEHTKVYWDFAVLTDQGVEHNRPDMIVWYKTEKTAVLIDFSIPMDQNLAKAYQGKIRKYEPLARQIRDIWKLKRVDIVPLIISCNGLVHKKTTEHLKEMKLPPNTLIWMQKAVLLGTVNIIRSVLYPH

SEQ ID NO: 25361 - protein, 882 aa, Coccinella septempunctata
MAIDGSMDFDELCHMVYSAATAINTILETSNKEPELIKQQRQKPPWEERLEKKVTALRKEIGILHNYSTEDKPSRKVVRRVQNYANKIGLKRNDPQYNQKIKIYSETPKQKIAALGSRLRRYNKRAQRYRQNNLFLQNQRKFFRQLEDEKDEKSTTPAQEKMVEYWSSIWSQDAQHNNTAPWITSEKLRLQSLTAMENVVVTVEDIKATVKRLRNWSSPGIDGIHNYWWKHLTSTHAALARLLQCALRNPSSVPEYFTQGITYMVPKKGDLSQPNNYRPITCLPSIYKILTSTISCKINQYLKKNNIMAWEQNGCKRKGRGSKELLVIDKELTKQAKKRKKNISIAWIDYEKAYDSVPHSWLVEALKIYKIDDQVIKLLEFLMTSWRTKIYMRGSKTEEIKIKRGIFQGDSLSPLWFCLAMNILSAMLNRSAYGYTISTQVTITHLFYMDDLKLFARGRKQLEGLLELVRRFSEDVGMSLGLGKCATVNVSRGRMTGEENIRLVDGREITEIGTKDGYRYLGIVQTYEIKHQENKEIVEKELFRRMHKILKTQLSSKNKIEAINIWALPSFTYTAGVINWSRTDLQRIDQRMRATLTKYGILYPNSAIERVHLPRKEGGRGLGSIEEACRKENESVSNFFEKNNHLPVHRWVVDQTSAASSSQQGTSEMEEEVDYLENLRRRWQTKALHGNFYSSLRQNEVDLEGTNMYLMKGYLYPQTEGTLFAIQDQVVPTRNYSKFILKQQLNNTKCRLCDCAEETVQHLSSGCSAIADTKYMSRHNNMGKVVHQLLCLGERLLQNFTPYHAYTPQTLLENEHTKVYWDFAVLTDQGVEHNRPDMIVWYKTEKTAVLIDFSIPMDQNLAKAYQGKIRKYEPLARQIRDI

SEQ ID NO: 25362 - protein, 780 aa, Coccinella septempunctata
MVEYWSSIWSQDAQHNNTAPWITPEKLRLQSVTAMENVVVTVEDIKATVKRLRNWSSPGIDGIHNYWWKHLTSTHAALARLLQCALRNPSSVPEYFTQGITYMVPKKGDLSQPNNYRPITCLPSIYKILTSTISCKINQYLKKNNIMAWEQNGCKRKGRGSKELLVIDKELTKQAKKRKKNISIAWIDYEKAYDSVPHSWLVEALKIYKIDDQVIKLLEFLMTSWRTKIYMRGSKTEEIKIKRGIFQGDSLSPLWFCLAMNILSAMLNRSAYGYTISTQVTITHLFYMDDLKLFARGRKQLEGLLELVRRFSEDVGMSLGLGKCATVNVSRGRMTEEENIRLVDGREITEIGTEDGYRYLGIVQTYEIKHQENKEIVEKELFRRMHKILKTQLSSKNKIEAINIWALPSFTYTAGVINWSRTDLQRIDQRMRATLTKYGILHPNSAIERVHLPRKEGGRGLGSIEETCRKENESVSNFFEKNNHLPVHKWVVDQTSAASSSHQGTSEMEEEVDYLENLRRRWQTKALHGNFYSSLHQNEVDLESTNMYLMKGYLYPQTEGTLFAIQDQVVPTRNYSKFILKQQLNNTKCRLCDCVEETVQHLSSGCSAIADTKYMSRHNNMGKVVHQMLCLGERLLQNFTPYHAYTPQTLLENEHTKVYWDFAVLTDQGVEHNRPDMIVWYKTEKTAVLIDFSIPMDQNLAKAYQGKIRKYEPLARQIRDIGKLKRVDIVPLIISCNGLVHKKTTEHLKEMKLPPNTLIWMQKAVLLGTVNIVRSVLYPH

SEQ ID NO: 25363 - protein, 1104 aa, Adalia bipunctata
MNRSLLNAYFQVTDGERNTKKYAAKLANLWGELYPDKLFTGKHLIAQIKNIKTRKFLAPDEIEALRADALSRSPTARVASIRRSIHRTSSLMPREIRFDEIDRDVSELEPQLGASAEIMSLFQETSLKWKGIAMDVRPKISRLKYNRDLRGTVQAVDAAISGVVGGSANFGDLCHVVYCAATTVTIIMGTADKQIESTEKQQQRKPPWEERLEKKISALRKEIGLLHDYFTKEKPSKKVVRKVHAYSKNIGLKRSGSHYPENLRIHAETLKQKIAALGNRLRRYHKRTQRFRQNNLFVNNQREFFRKLDEASADKMNTPKPEKMAEYWSAIWSQNAQHNNAAPWIISEKCRQQSLGQMEAIVVTEEDIRSTVKRLRNWTSPGIDSIHNYWWKYLTSTHKMLAHFIQGALRDPRVVPEYFTQGVTYMLPKKGDLSQPENYRPITCLSSAYKILTSTISFKINGHLKSNGVMAWEQNGCKRKGRGSKELLVIDRELTKQAKKRNRNISMAWIDYQKAYDSVPHSWLLEVLEIYKVDKQVIRLLRFLMTSWRTKITSSSKSSYGATEIKIRRGIFQGDSLSPLWFCLAMNILSVMLNKSAYGYTMSPQATVTHLFYMDDLKLFARGHGQLEGLLELVRGFSEDVGMSLGLSKCAAINVKRGKVTEEENIKLLDGREIVGLRGEDRYRYLGIMQTFEINQRENKEMVEKELFRRLHKVLKTQLTAKNRLEAVNIWVVPSFTYTAGVLSWSKTDLQRVDRRVRTTLTEYGILHPNSAIERVYLPRREGGRGLISIEEACRKEENNITNYFRKSCLPVHRWIVDQEGAASTHQEPTEEEENEDLFGQLRRRWQAKPLHGRFYGSLHQADVDLSSTNTYLIQGYLFPQTEGTLLAVQDQVVPTRNYCKFIMKHQLDNTKCRLCNGAEETVQHLSSGCSAIAGTKYLTRHNNMGKVVHQLLCLREQLIHHFTPHHAYTPQTLLENENTKVYWDLTVVTDQGVEHNRPDMVVWNKVEKTAVLVDFAVPMDQNLTKIYGVKIAKYEPLARQLRDMWKLKRVDIRPLIISCNGLVHRKTVEHLKEMNLPPNTLMWMQKAVLLGTVSIIRGVIYPH

SEQ ID NO: 25364 - protein, 949 aa, Zygaena filipendulae
MSSLPCLTRCPHCPTNSSRTFGEHGLKVHIGRVHKNLTRPDPSPMTPLPGVDVAQSRSSGSDISDLETLATLRRNVRVLRHIPRGARNLAAGKLSEVINKCIETNETTDWCELLTFAYSALKAPNKADSGNLTTKVKRNIETAVVDVDEGEGACSGSPSVLKTIESKVFEGDLRGAVRLLMSDDVIAPAGPETLASLQSKHPFPSRPLMFPQPPGRASPVCEIKMEDVVIALGTFHNGSAAGLDGIRPAHLKELTSVSAGDNGHKLLYSLTKLCNFLLGGFLNPEVCPFMYGASLCALTKKDGSVRPIAVGSTIRRLVAKLGCRAVREELAQYLRPHQLGFGTQLGCEAAIHATRAFAMRPESVGNIIIKLDLKNAFNSVERDTLLGEVKENVPSLYPFLSQVYQSPSFLYYNNTCILSQVGAQQGDPLGPLAFSLAIHKRITELKAPLNTWYLDDGTIGGNPEIVAKDLSVLIPRLKELGLEVNPSKCEFFPCCPDAASSFLRFDAILPGLKKLSPSTFLLLGSPVFPDGIPEALQSRKRSLQVVKERLKNLSPHVALLLLRMCFAMPKLTYLLRTTPCWLFPDEITLFDSSLKLLLEDILNIRLDEDQWLQATLPIRFGGLGIRCVRDVSVPAFLASAHGVEDLVTDILFSHGGRVPIPHAADALTAWGALNPGASPPTVPESQRTWDEIGAKRTFSHLLDGAVGVNKARLRSVSQAESGAWLQALPSPNMGTFLDGNSLRVAVALRLGCDVCEKHLCICGSMVESNGYHAMSCCRCAGRFPRHHALNDIIRRALVSANIPCVLEPPGLCRLDGKRPDGMTMVPWEKGRCLLWDATCVSTFAASHLSHTVGRAGAAAEVAAAKKRQKYSALVQNYLFVPFAVETMGCWGSEAKKLVSEIGRRLKEKGGDHRSRSYLVQRLSIAIQRGNAASIMGTFAPGMTRGGLFE

SEQ ID NO: 25365 - protein, 949 aa, Zygaena filipendulae
MSSLPCLTRCPHCPTNSSRTFGEHGLKVHIGRVHKNLTRPDPSPMTPLAGVDVAQSRSSGSDISDLETLATLRRNVRVLRHIPRGARNLAAGKLSEVINKCIETNETTDWCELLTFAYSALKAPNKADSGNLTTKVKRNIETAVVDVDEGGGACSGSPSVLKTIESKVFEGDLRGAVRLLMSDDVIAPAGPETLASLQSKHPFPSRPLMFPQPPGRASPVCEIKMEDVVIALGTFHNGSAAGLDGIRPAHLKELTSVSAGDNGHKLLDSLTKLCNFLLGGFLNPEVCPFMYGASLCALTKKDGSVRPIAVGSTIRRLVAKLGCRAVREELAQYLRPHQLGFGTQLGCEAAIHATRAFAMRPESVGNIIIKLDLKNAFNSVERDTLLGEVKENVPSLYPFLSQVYQSPSFLYYNNTCILSQVGAQQGDPLGPLAFSLAIHKRITELKAPLNTWYLDDGTIGGNPEIVAKDLSVLIPRLKELGLEVNPSKCEFFPCCPDAASSFLRFDAILPGLKKLSPSTFLLLGSPVFPDGIPEALQSRKRSLQVVKERLKNLSPHVALLLLRMCFAMPKLTYLLRTTPCWLFPDEITLFDSSLKLLLEDILNIRLDEDQWLQATLPIRFGGLGIRCVRDVSIPAFLASAHGVEDLVTDILFSHGGRVPIPHAADALTAWGALNPGASPPTVPESQRTWDEIGAKRTFSHLLDGAVGVNKARLRSVSQAESGAWLQALPSPNMGTFLDGNSLRVAVALRLGCDVCEKHLCICGSMVESNGYHAMSCCRCAGRFPRHHALNDIIRRALVSANIPCVLEPPGLCRLDGKRPDGMTMVPWEKGRCLLWDATCVSTFAASHLSHTVGRAGAAAEVAAAKKRQKYSALVQNYLFVPFAVETMGCWGSEAKKLVSEIGRRLKEKGGDHRSRSYLVQRLSIAIQRGNAASIMGTFAPGMTRGGLFE

SEQ ID NO: 25366 - protein, 970 aa, Apolygus lucorum
MATNQHTCVQCSRSFGTKVGLTQHLRHAHPERLSEDRVGQSRNLFWSEEEMKIMASKELELVAQGVPQRQMVGRLAEFMPGRSKDMVKGARSRAPYRLIRETLAMVDEMDNPQQVDQDFVDLACREWRNAELEEQLRKGLAAIRKETRYCESSIHLQEAVLAALCGSDPIDGMKLWLEKIMGECDQGPVLRESGPQTSERRMPIARSGPTTPSPWQKMQSLWRKDRGAAVDEVIGRGRGVRMHTKAQLSEFWNDKWSEESHVWAGDSFRHPNDKSFTNVWKPVTAQEIRAAKLGRSTSGPDGISVECWKAVGIEHKRLFFNLILWRGSMPADFLRARTTLIPKKHIPASPADYRPITVTSVIVRQFHKILGERIEQCVVHVDAQRGLRRYMDGLAQSIYLLDRIMTDAHKKKRELHMCYLDIEKAYDSASQSALILLLRSRGWPPILVNYIQATLEDGRTSVAGGPQIKVTKGVRQGDPLSPILFNCLMDHVLLALPQRIGYTIAHRRVSCAAFADDVALVATSRAGIQALLKAFEGAAAEIGLQINAKKSLYLPLFPRSGKLVIPREGLQLVSSGGTLPTASFNTEWKYLGLDFCVRGVKAWSTDEAGQTLRKIHRAPLTVLQKLELLRTHFLPGLIHPAVLGKPKKYNLRKLDVAVRRYVRKWFWLPADSANAYIYGPVGDGGLGLIQLETLATVLRRDRIARAEQALFGTLQDWEPETAAVRRVRRAEVMHGTTDGMDLKRSREVRASTSWLREAHLTSPSWKGRRMVRVHSGSLPSRLRMTRGRRQVNPITCRAGCPERESAAHVLQSCRSMTLPRIDRHNRVCELIRKSAEIRGWTTYSEPHFNLEGRGWRPDLVISSSAGSAAILDVEIVSGSGRRTLEEMHEAKKQKYSRPSILGAVAALTARPVGRILVIPVIITWRGIWFKDSAAELRKLGLPEYLLGWASERVLLGGGFVWTKFISNYAS

SEQ ID NO: 25367 - protein, 970 aa, Apolygus lucorum
MATNQHTCVQCSRSFGTKVGLTQHLRHAHPERLSEDRVGQSRNLFWSEEEMKIMASKELELVAQGVPQRQMVARLAEFMPGRSKDMVKGARSRAPYRLIRETLAMVDEMDNPQQVDQDFVDLACREWRNAELEEQLRKGLAAIRRETRYCESSIHLQEAVLAALSGSDPIDGIKLWLAKIMGEFDQGQVLRESRPQTSERRMPIARSGPTTPSPWQKMQSLWRRDRGAAVDEVIGRGRGVRMHTKAQLSEFWNDKWSEESHVWVGDSFRHPKDESFTNVWKPVTAQEIRAAKLGRSTSGPDGISVECWTAVGMEHKRLFFNLILWRGSMPADFLSARTTLIPKKHIPASPADYRPITVTSVIVRQFHKILGKRIEQCVVHVDAQRGLRRYMDGLAQSIYLLDRIMTDAHKKKRELHMCYLDIEKAYDSASQSALILLLRSRGWPPILVNYIQATLEDGRTSVAGGPQIKVTKGVRQGDPLSPILFNCLMDHVLLALPQRIGYTIAHERVSCAAFADDVALVATSRAGIQALLKAFEGAAAEIGLKINAKKSLYLPLFPRSGKLVIPREGLRLVSSGGTLPTASFNTEWKYLGLDFCVRGVKAWSTDEAGQTLRKIHRAPLTVLQKLELLRTHFLPGLIHPAVLGKPKKYSLRKLDVAVRRYVRKWFWLPADSANAYIYGPVGDGGLGLIQLETLATVLRRDRIARAEQALFGTVQDWEPETAAVRRVRRAEVMHGTTDGTDLKRSREVRASTSWLREAHLTSASWKGRRMVRVHSGSLPSRLRMTRGRRQVNPITCRAGCPERESAAHVLQSCRSMTLPRIDRHNRVCELIRKSAEIRGWTTYSEPHFNLEGRGWRPDLVISSSAGSVAILDVEIVSGSGQRTLEEMHEAKKQKYSRPSILGAVAALTARPVGRILVIPVIITWRGIWFKDSAAELRKLGLPEYLLGWASERVLLGGGFVWTKFISNYAS

SEQ ID NO: 25368 - protein, 920 aa, Apolygus lucorum
MKIMASKELELVAQGVPQRQMVGRLAEFMPGRSKDMVKGARSRAPYRLIRETLAMVDEMDNPQQVDQDFVDLACREWRNAELEEQLRKGLAAIRKETRYCESSIHLQEAVLAALCGSDPIDGMKLWLKKIMGECDQGPVLRESGPQTSERRMPIARSGPTTPSPWQKMQSLWRKDRGAAVDEVIGRGRGGRMHTKAQLSEFWNDKWSEESHVWAGDSFRHPNDKSFTNVWKPVTAQEIRAAKLGRSTSGPDGISVECWKAVGIEHKRLFFNLILWRGSMPADFLRARTTLIPKKHIPASPADYRPITVTSVVVRQFHKILGERIEQCVVHVDAQRGLRRYMDGLAQSIYLLDRIMTDAHKKKRELHMCYLDIEKAYDSASQSALILLLRSRGWPPILVNYIQASLEDGRTSVAGGPQIKVTKGVRQGDPLSPILFNCLMDHVLLALPQRIGYTIAHRRVSCAAFADDVALVATSRAGIQALLKAFEGAAAEIGLKINAKKSLYLPLFPRSGKLVIPREGLQLVSSGGTLPTASFNTEWKYLGLDFCVRGVKAWSTDEAGQTLRKIHRAPLTVLQKLELLRTHFLPGLIHPAVLGKPKKYNLRKLDVAVRRYVRKWFWLPADSANAYIYGPVGDGGLGLIQLETLATVLRRDRIARAEQALFGTVQDWEPETAAVRRVRRAEVMHGTTDGMDLKRSREVRASTSWLREAHLTSPSWKGRRMVRVHSGSLPSRLRMTRGRRQVNPITCRAGCPERESAAHVLQSCRSMTLPRIDRHNRVCELIRKSAEIRGWTTYSEPHFNLEGRGWRPDLVISLSTGSAAILDVEIVSGSGRRTLEEMHEAKKQKYSRPSILGAVAALTARPVGRILVIPIIITWRGIWFRDSAAELRKLGLPEYLLGWASERVLLGGGFVWSRFISNYAS

SEQ ID NO: 25369 - protein, 1167 aa, Contarinia nasturtii
MPFCLNLLLCARKTKNKTSNCRTPARDDANGVRMSAVSHGNSDIAGNSSGVTWPCGHCDRVFDTKIGLGVHKNRVHREEHNQERLSQTRPSRGSGQRKIISSRSKWSDGEIKVLAKLDFDLRKVNPDMSEAALNKKLAELMPGRSADAIKGRKKGQPFLLALAKVRSEDLVTQPPELPSITNDTTDPVVQSSSTHPSDRELVIEPANASVNTECLGTTVEALTNVSVVVEPEVVSNMPVLTPINRADEADGVNISTEPEISRIKETRLNFVDYQLLAKLKYDAELYAKQIRHNVKKSYRVKLLLHVLNMSRGNPDASIVLDAWLDNVVVNTVIDGESNSTSRRRPKPTTRRRYVQGKELRGKANLTERVYLQNVYKRKGVRGIAKHVFQNIDEDDNLNAIDTSPSSESMIDFWSGIFGANDTTSNSVESTSEEDALANCLLVAITQDDIKRTELVRGKAKGPDGISVGQWKSVPRSVRSLFYNVVLYHGVVLQRLANARTIFLPKVANPSKPGEYRPISITSVVQRQMHRILANKLSKVHKFDDRQVAFRNGVDGVFNNLATLRTIVELKGRMRKNLQIVSLDLKKAFDSVSHDAVFQTMSDLKCPTLFVNYLKQLYSNAQTCLELSNGECKTIRIGRGVFQGDPLSPIIFNYIIDRALKKLDEDMGFPCGEHKVTCVAFADDITVIGESVVGTQSNINALLNELEKYGLKANPSKCQALSMMTDGHRKISVLDTKDKFVINGELVKSITPTTKWKYLGINFTGEKIDKQLPDIHRKLDRVRNALLKPQQKLEIITKVVIPTIYHQAILGNATQEELNSIDIRVRNVVREIMHFPHDIPICYIHAPVKCGGMGVPELLVRIPILRYIRMKRFADSAAKVAPQFSRSITYRYNEGKLKNFLRENELRIQDHGIGVVLKFYLAQLEHNFATRGLTEALSSRQTRNWCNTWSNEISGGDFIKYHLISSCSLPTLARRAWGRSDKGDIRCRHGCGSPETAHHIQQECTLTRGGRSLRHNRVLDLIYNSTVRKFGESFSIEKEPQLETPQGMRKPDLIMYGGNDAIVIDLNIVGKGIESMEIARRNKVAKYRDQPGFTQLVKNRYNVDTVSYETITISYCGVIERLSRDFLRELQFNSRDIFRITTSVLRGSWLNWFRFKKLYQQPFYGSRN

SEQ ID NO: 25370 - protein, 1060 aa, Asobara japonica
MRTHRPLTPTTAQPPTPAVISPVASTSAAKVDFACPNCTQCFNTRIGLGVHRRSKHPDAVNAEIVVDLSRKGLSQEELRMAASEEAYVLKFKHDKEGNPVPFINKFLAPLFPGRTIDGIKYARRTAAYRQLLEHACAAVGEDGSSEEDISSESDEVSEFSGSLDGGPVASPVAVVEPPAEKVGAVPPCHRDRYAEAIRCLALEVSKSGLETGRSLASLAEQLLEGADVTQKVAEWILALRLPAARRNRRPRRPHRSDDEKGTSRQKIRRREYAKIDSLFVTNMSRAAKLVLDGEVEAVIPSLEEMQEYWCPILEHPSIPVEQLPNLPVDRQRGALAVPISVKEVATVNVPRNSSPGVDGITPDVWGQCPVNVRALLYNMVLYMGSFPGQTLASRTVFVPKKEGASKPPDFRPISITSVVVRQMHKILAQRMMAADMVDERQRCLDDGCAENIAVLASAIRHARSQRRELHIVSLDVAKAFDSVSHQAITSALTEAGVPEVIVRYVETTYRLSTTSLEVPGRRSGSISVRRGVRQGDPMSSIIFSLVTDRILRSVPGTVGYSMGHGHLINAVAYADDICLLSSSTTGISAALAAAENTAVRQGLAFNASKCVATSILPSGRDKKVKVLTVPQFSLRDKVPIQQLGPTEEWRYLGVNLSPSGLRRVSPSMEVELRRITRAPLKPQQRLTILRCFLVTRYYHRLVLAGCTLKVLRELDLQIRAAVRKWLRFPKDVPVAYFHTACRDGGLGVPSFLTTIPGLMRSRLMSMKYSSFRSVRIAHESEWVQNKIRWPREFLPWRGKCSLIAPRALNIGPTGCMGLWTARSCGSVGGSAASTRWIGAAVSGVPGRDYVQYHHTRINCLPTLVRTSRSLRRLRTEIKCRAGCSSTETAAHVIQSCFRTHGGRIKRHDAVCRTLAAFLRNRGMQVYEEPRLRTEVGLRKPDLLIKDRGKGFIVDAQVVSGVPPLDGSHRRKVEKYDSPTVKIAAAAALGLLPASVSVTSCTLSWRGVWSGASVESLRSRLGVPLGLLTGMSTRVLQGSHTNWTRWGQITTRVPRVRVGVG

SEQ ID NO: 25371 - protein, 981 aa, Asobara japonica
MAASEEAYVLKFKHDKEGNPVPFINKFLAPLFPGRTIDGIKYARRTAAYRQLLEHACAALGEDGSSEEDISSESDEVSEFSGSLDGGPVAGPVAVVEPPAEEVGAVPPCHRDSYAEAIRRLALEVSKNGLDTGRSLASLAEQLLEGADVTQKVAEWILALRLPAARRNHRPRRPHRSDNEKGTSRQKIRRREYAKMQSLFVTNMSRAAKLVLDGEVEAVIPSLEEMQEYWCPILEHPSIPVEQLPNLPVDRQRGALAVPISVKEVATVNVPRNSSPGVDGITPDVWGQCPVNVRALLYNMVLYMGSFPGQTLASRTVFVPKKEGASKPPDFRPISITSVVVRQMHKILAQRMMAADMVDERQRCLDDGCAENIAVLASAISHARSQRRELHIVSLDVAKAFDSVSHQAITSALTEAGVPEVIVRYVETTYRLSTTSLEVPGRRSGSISVRRGVRQGDPMSSIIFSLVTDRILRSVPGTVGYSMGHGHLINAVAYADDICLLSSSTTGMSAALAAAENTAVRQGLAFNASKCVATSILPSGRDKKVKVLTVPQFSLRDKVPIQQLGPTEEWRYLGVNLSPSGLRRVSPSMEVELRRITRAPLKPQQRLTILRCFLVTRYYHRLVLAGCTLKVLRELDLQVRAAVRKWLRFPKDVPVAYFHTACRDGGLGVPSFLTTIPGLMRSRLMSMKYSSFRSVRIAHESEWVQNKIRWTERALTLEGEVLSDRASRAKHWADRLYGSVDGKELRECGRSAASTRWIGAAVSGVPGRDYVQYHHTRINCLPTLVRTSRGLRRLRTEIKCRAGCSSTETAAHVIQSCFRTHGGRIKRHDAVCRTLAAFLRKRGMEVHEEPRLRTEVGLRKPDLLIKDRGKGFIVDAQVVSGVPPLDGSHRRKVEKYDSPTVKIAAAAALGLLPASVSVTSCTLSWRGVWSGASVESLRSRLGVPLGLLTGMSTRVLQGSHTNWTRWGQITTRVPGVRVGVG

SEQ ID NO: 25372 - protein, 1060 aa, Asobara japonica
MRTHRPLTPATGQPPTPAAISPVASTSAAKADFACPNCTQSFNTRIGLGVHRRSKHPDAVNAEIVVDRARKGLSQEELRMAASEEAYVLKFKHDKEGNPVPFINKFLAPLFPGRTIDGIKYARRTAAYRQLLEHACAALGEDGSSEEDISSESDEVSDFSGSLDGGPVASPVAVVEPPAEDVGAVPPCHRDSYAEAIRCLVLEVSKSGLETGRSLASLAEQLLEGADVTQKVAEWILALRLPAARRNRRPRRPHRSDNEKGTSRQKIRRREYAKMQSLFVTNMSRAAKLVLDGEVEAVIPSLEEMQEYWCPILEHPSIPVEQLPNLPVDRQRGALAVPISVKEVATVNVPRNSSPGVDGITPDVWGQCPVNVRALLYNMVLYMGSFPGQTLASRTVFVPKKEGASKPPDFRPISITSVVVRQMHKILAQRMMAADMVDERQRCLDDGCAENIAVLASAISHARSQRRELHIVSLDVAKAFDSVSHQAITSALTEAGVPEVIVRYVETTYRLSTTSLEVPGRRSGSISVRRGVRQGDPMSSIIFSLVTDRILRSVPGTVGYSMGHGHLINAVAYADDICLLSSSTTGMSAALAAAESTAVRQGLAFNASKCVATSILPSGRDKKVKVLTVPQFSLRDKVPIQQLGPTEEWRYLGVNLSPSGLRRVSPSMEVELRRITRAPLKPQQRLTILRCFLVTRYYHRLVLAGCTLKVLRELDLQVRAAVRKWLRFPKDVPVAYFHTACRDGGLGVPSFLTTIPGLMRSRLMSMKYSSFRSVRIAHESEWVQNKIRWTERALTLEGEVLSDRASRAKHWADRLYGSVDGKELRECGRSAASTRWIGAAVSGVPGRDYVQYHHTRINCLPTLVRTSRGLRRLRTEIKCRAGCSSTETAAHVIQSCFRTHGGRIKRHDAVCRTLAAFLRKRGMEVHEEPRLRTEVGLRKPDLLIKDRGKGFIVDAQVVSGVPPLDGSHRRKVEKYDSPTVKIAAAAALGLLPASVSVTSCTLSWRGVWSGASVESLRSRLGVPLGLLTGMSTRVLQGSHTNWTRWGQITTRVPGVRVGVG

SEQ ID NO: 25373 - protein, 920 aa, Oxygymnocypris stewartii
MLVQSTPLQEDTGTSRVVQPVNVEQWRKDMLEKAYHSLKSDRFQPERLRKWILDILEGRLTKLEGVKLLKEHTAKIFPTRWLPAPPLRTSGKVLRSNKQLRRARYASIQRLYKLRRKDAAKTILEGRWKDAYKDKHRVDGLEEYWTKVYAGTGHSDEPVLTTEKGEQRWEILSPITATEIEDALKGMGNSAVGMDRVSSRDLLRWHQPSLAGFCNVILALETMPSSLANARVTFIPKVELPETPGDYRPIGVSSTLTRALHKILARRMRDIFTFSPLQYAFLQRDGCLEASMLLQALLRGTHDGGTPIAMLFLDIAKVFDTVSHDTILEAARSAGAPEPLVNYLANLYEEAEVNLGTRMTKCGRGVRQGDPLSPILFILVMNKAVKAACPEKGVELGGQIIDAIAYADDLVLIAQNSEDLQLKLDGLCRALRGMGMTLNERKSKAITILKDRRRKCLLLDPHSYSTDEGVIPAMGVLDKQHYMGLDFTWKGKVTPKHTGHLEKMLHEITTAPLKPYQRLEILKVFLVPRLVHELVLGGAHRNTLLKMDKMVRTAVRKWMRLPKDTLLAYLYSPFQAGGLDIPSISTTIPIWQQSRSMKLLSSPNPIERALTEMPSFQKALKRMNRPCRVGGEAITTVKEAREMWAKQLAQSVDGKDITMTDVDAASHLWLEKTERVFPRLHLRGIQLRGGVLSTKARRARGRESSADDIMCRGACQVRETLNHIQQRCDVTHDARCARHNRVVRRLESMLRGRASNVWVEPIIPTAKTFIKPDLLIHKSEKVMVMDVSIVVGSQMEETWRLKTQKYSTPENERAITSWLQHTHNSLEHMPVIISYRGLMYGPSGRALRNQGLSKRDISDLCLLTVAGSLKSYDLYTRGTETKSLPARMTRSKEWRRETLTYSPIASLLQWNNNYTAIARQ

SEQ ID NO: 25374 - protein, 920 aa, Oxygymnocypris stewartii
MLVQSTPLQEDTGTSRVVQPVNVEQWRKDMLEKAYHSLKSDRFQPERLRKWILDILEGRLTKLEGVKLLKEHTAKIFPTRWLPAPPLRTSGKVLRSNKQLRRARYASIQRLYKLRRKDAAKTILEGRWKDAYKDKHRVDGLEEYWTKVYAGTGHSDEPVLTTEKGEQRWEILSPITATEIEDALKGMGNSAVGMDRVSSRDLLRWHQPSLAGFCNVILALETMPSSLANARVTFIPKVELPETPGDYRPIGVSSTLTRALHKILARRMRDIFTFSPLQYAFLQRDGCLEASMLLQALLRGTHDGGTPIAMLFLDIAKVFDTVSHDTILEAARSAGAPEPLVNYLANLYEEAEVNLGTRMTKCGRGVRQGDPLSPILFILVMNKAVKAACPEKGVELGGQIIDAIAYADDLVLIAQNSEDLQLKLDGLCRALRGMGMTLNERKSKAITILKDRRRKCLLLDPHSYSTDEGVIPAMGVLDKQHYMGLDFTWKGKVTPKHTGHLEKMLHEITTAPLKPYQRLEILKVFLVPRLVHELVLGGAHRNTLLKMDKMVRTAVRKWMRLPKDTLLAYLYSPFQAGGLDIPSISTTIPIWQQSRSMKLLSSPNPIERALTEMPSFQKALKRMNRPCRVGGEAITTVKEAREMWAKQLAQSVDGKDITMTDVDAASHLWLEKTERVFPRLHLRGIQLRGGVLSTKARRARGRESSADDIMCRGACQVRETLDHIQQRCDVTHDARCARHNRVVRRLESMLRGRASNVWVEPIIPTAKTFIKPDLLIHKSEKVMVMDVSIVVGSQMEETWRLKTQKYSTPENERAITSWLQHTHNSLEHMPVIISYRGLMYGPSGRALRNQGLSKRDISDLCLLTVAGSLKSYDLYTRGTETKSLPARMTRSKEWRRETLTYSPIASLLQWNNNYTAIARQ

SEQ ID NO: 25375 - protein, 1121 aa, Ctenocephalides felis
MDAAEARERSPAGQGSMEETETPYTVLDVPLAPPFNCVPCLPVPREYKTHNDLLKHLRKEHNRDMMMKFRCSHCGEVHSTLKRATAHIKRSMECSDNRPPSRTTDAAPTRVRRIRMQRTRESPAAAEAVAATEAVAATEAVAATEAVAATEAVAATEAVAAADIAASEAVEAAEAATAAVAVTVAETVLQEESPTLSKLQEEFVLRLQVVTCSEDLEREVSALVSRLQPEDQETAGTGSEKRNNFNHRPRATNAEQDVTRATRIQKLYRSDKKRAYREITEENGGRGCRVPTQTIQDHFMELYKEKNHAVTGSPAEIPTPASVAMNDPLSAEFTPEEVWQRLQRSKNSAPGPDGLRYGVWKRYDQGGHICAAVFNAVRKLQHVPRSWDESSTILIPKKGDPRDINNWRPIALSNTLGKLYASVIASRLSKWCIENDRISPSQKGFMQYDGCAEHNFTLQSIIQDARRKQKQAAIAWLDLKNAFGAVPHAAMFNALEWTGLHADSIAVIRRLYRGSYTRVRGEHGATDEIPVRAGVKQGCPLSPIVFNITLEPLLHALARKADYYELEGQKFNVLAYADDLAIIGADREGLQRLLNTTETIAAWSGLQFNARKCATLHVDGRRRSAIGTTFKLGAENLRALSQEEWYEHLGVPTGFSTFSSGEDVLEQMQQHLSRVDESLLAPWQKIDAVNTFIMRQVEFHLKNGNVAKKILHRFDKQVKRSVKKWAHLPQRASAEVLYLSYKEGGFNILPAAVLADIGQVVHAHRLLTSKDRATSELSRATLADVVRKRVGHEPNTEEIVGFINFGRSGDLDKPANDITTTWSRLRTAVRRLKPKINLQLGLDELTVDNAPVSRENAESSLRAAARRFYKERLLRKPDQGKVFEVTTQNSASNHFLRQGGFTRFAEWKFIHRARLNVLPLNGSRPFGSGDKRCRRCGQHDETLPHVINHCKPHLSAITRRHDSIVQRLITAAKKPADGALYANQPIPEYDGQERPDIVIIDNKEKTAAIIDIAVPFENRTEAFQTTRQLKKDKYAALAEHFRAKGFRTTVDAFIVGSLGGYCSRNWTALAALKVNKKYAVLMKRLMVSDTIRWSRDIYVEHITGHRQYQDAGPTPAATALE

SEQ ID NO: 25376 - protein, 1020 aa, Blattella germanica
METTGNKDLIDIDKPTDSILSETVNFSPSDPIECQDNIHLNTNSSNNEKVIRAVNNDEKDKSDNNIIKNTSSDIWCPYCGKVFKNLNGHIARSHPHIYRQNITERYANASPCLQKTEINNNNGQLKINENKLEPWEKTFSEILNSEKDEVKLDQKLDEFTLFLCNATSLCKGPVHPATKYYKARTTWRPNHEKSNFKTSNNPQRHDRRLKEKRQNQYRYDLMQYYYYYRRKKAVQKIMHLSDYKRCPFSATDVYDYFKETVGTENNNVLHDYPISSPLCNSIDEETIDYDCQYCTVTEKDIDQAMKGINLDTAPGPDRVLFKVVKELKCMKIISIIANIMLSWNYVPNSFQSGRTILIFKSGDPNSLKNWRPITIFSILRRIIERALERKIRPFVELSTCQRGFISTPGTFINSSLINSCLQKSKKEKGDCCITFLDVSKAFDSIGHKHIEMSLNSTSIPSQLKSLVLSLVKNNSVGIELDAITRTKPINIEKGVAQGSPLSPLLFNLSIDFIYRNLNDFQNASQYGYRLTEEVDNLIALGFADDIALISNNETSAVIMIERVNQCLTEIGLNLNASKSKIINIKKGKLMNTTVTTLNDIKINSIQAEETIKYLGVTYNDEIILDKCSIITNLNRSISKLITSSLLKPDQKLNILNQYIWPTLIYPLQCAPLCKLQLGFLQDIDKIVKNAVKEIVGLPCDTPDSMLYTSRKYRGLGVMKATWEAFLQHINICNKLQVSSDPVIGFTRNFNNEIQESLDHLNISREEQPNVRSLRKKLREKEYENWKSLPHRGRGVAHFSEWTHSNTWISSKKGLSSSQWTNAIKMDCNVIPVHSLPGRSEETRCRHCNESETLPHILGFCKKGELLRINRHHKVRSAIAKLLLETGHFEIFEEIHCISTDGSTKRADIIAIDRKRDLGYILDPTVRFEKDLSQAHLVNEEKKKHYQPCCKYLSEKYKINTWEVIGLLFGSRGTITKFCVNILLHFGIKEKSLQEILLAILRDSVHIVHFHLYGHMNIYTE

SEQ ID NO: 25377 - protein, 1060 aa, Blattella germanica
MISDSGGPSLPSNDGKTIALVSCKICGKSFTRHGINIHIARSHRHSQDLIDIDKPTDSILSETVNFSPSDPIECQDNIHLNTNSSNNEKVIRAVNNDEKDKSDNNIIKNTSSDIWCPYCGKVFKNLNGHIARSHPHIYRQNITERYANASPCLQKTEINNNNGQLKINENKLEPWEKTFSEILNSEKDEVKLDQKLDEFTLFLCNATSLCKGPVHPATKYYKARTTWKPNHEKSNFKTSNNPQRHDRRLKEKRQNQYRYDLMQYYYYYRRKKAVQKIMHLSDYKRCPFSATDVYDYFKETVGTENNNVLHDYPISSPLCNSIDEETIDYDCQYCTVTEKDIDQAMKGINLDTAPGPDRVLFKVVKELKCMKIISIIANIMLSWNYVPNSFQSGRTILIFKSGDPNSLKNWRPITIFSILRRIIERALERKIRPFVELSTCQRGFISTPGTFINSSLINSCLQKSKKEKGDCCITFLDVSKAFDSIGHKHIEMSLNSTSIPSQLKSLVLSLVKNNSVGIELDATTRTKPINIEKGVAQGSPLSPLLFNLSIDFIYRNLNDFQNASQYGYRLTEEVDNLIALSFADDIALISNNETSAVFMIERVNQCLTEIGLNLNASKSKIINIKKGKLMNTTVTTLNDIKINSIQAEETIKYLGVTYNDEIILDKCSIITNLNRSISKLITSSLLKPDQKLNILNQYIWPTLIYPLQCAPLCKLQLGFLQDIDKIVKNAVKEIVGLPCDTPDSMLYTSRKYRGLGVMKATWEAFLQHINICNKLQVSSDPVIGFTRNFNNEIQESLDHLNISREEQPNVRSLRKKLREKEYENWKSLPHRGRGVAHFSEWTHSNTWISSKKGLSSSQWTNAIKMDCNVIPVRSLPGRSKETRCRHCNESEALPHILGFCKKGELLRNNRHHKVRSAIAKLLLETGHFEIFEEIHCISTDGSTKRADIIAIDRKRDLGYILDPTVRFEKDLSQAHLVNEEKKKHYQPCCKYLSEKYKISTWEVIGLLFGSRGTITKFCVNILLHFGIKKKSLQEILLAILRDSVHIVHFHLYGHMNIYTE

SEQ ID NO: 25378 - protein, 799 aa, Blattella germanica
MQYYYYYRRKKAVQKIMHLSDYKRCPFSATDVYDYFKETVGTENNNVLHDYPISSPLCNSIDEETIDYDCQYCTVTEKDIDQAMKGINLDTAPGPDRVLFKVVKELKCMKIISIIANIMLSWNYVPNSFQSGRTILIFKSGDPNSLKNWRPITIFSILRRIIERALERKIRPFVELSTCQRGFISTPGTFINSSLINSCLQKSKKEKGDCCITFLDVSKAFDSIGHKHIEMSLNSTSIPSQLKSLVLSLVKNNSVGIELDATTRTKPINIEKGVAQGSPLSPLLFNLSIDFIYRNLNDFQNASQYGYRLTEEVDNLIALGFADDIALISNNETSAVIMIERVNQCLTEIGLNLNASKSKIINIKKGKLMNTTVTTLNDIKINSIQAEETIKYLGVTYNDEIILDKCSIITNLNRSISKLITSSLLKPDQKLNILNQYIWPTLIYPLQCAPLCKLQLGFLQDIDKIVKNAVKEIVGLPCDTPDSMLYTSRKYRGLGVMKATWEAFLQHINICNKLQVSSDPVIGFTRNFNNEIQESLDHLNISREEQPNVRSLRKKLREKEYENWKSLPHRGRGVAHFSEWTHSNTWISSKKGLSSSQWTNAIKMDCNVIPVRSLPGRSEETRCRHCNESETLPHILGFCKKGELLRNNRHHKVRSAIAKLLLETGHFEIFEEIHCISTDGSTKRADIIAIDRKRDLGYILDPTVRFEKDLSQAHLVNEEKKKHYQPCCKYLSEKYKINTWEVIGLLFGSRGTITKFCVNILLHFGIKKKSLQEILLAILRDSVHIVHFHLYGHMNIYTE

SEQ ID NO: 25379 - protein, 1147 aa, Morbakka virulenta
MSVMSNRRNGNNGVNGAGDSYVEDVSPGRCPVVWQRRSGRHQATARTGWSKCMNVAVMECYFESKPVDTNGKSIRGYRRRMFNLWKERGLFECIEQRLCDQARAIRKNEWLTEIELEQIKRRINNTNIIDSDEDLLESDMFDEAEVVGEMRNMDAPEIKDNPERDDNERRIIDDIVKIMNEQDVDCFTSFKKVDRRKLNDITKRVNNIITDLITVNITDTNKLIRAVSVFVARELGLQRRKKQRKGTEPWWKRRITTSINQLRKHISIIERFKKGEIRRIEKYREVDRKYNIKKKGINVVCEELKQRMSAKAKKIHRYEERIKQYRTNMVFQQDERRIYHELNGKMNQDTVAPDANESKQFWSGIWDNPKVHNRDSEWLKELKNRKNQNKQGNILISEGMVREKSRKIPNWKAPGPDGVQGYWIKKLSNLHARIAFQLNDMINGGSEIPAWLTIGKTVLCQKDPIKGNAVDNYRPISCLPLMWKLLTGIIADELYKFLDENEKLPPEQKGCRKKSRGTKDQLLIDKMIIQDCKSRHTNLAMAWVDYKKAYDMVPHSWIIESLELAQVSGNVISFVKKTMSSWKTELTSAGEKLGSVNIRRGIFQGDSLSPLLFVICMMPITDVLKQTKAGYILKGGDLKINHLFFMDDLKVYGKNEKEIDGLLSSVEMISKDIGMEFGIKKCGVLVLKRGKVCKTEGIKLPSNEKVSEVTSEGYKYLGILEYDKIKEREMKDKFGKEYLRRTRLVLGSRLNGRNKLKAINTWAVSLMRYGAGILRWNNEELEQLDRKTRKLMTMHKVLNPNSDVARLYVPRKRGGRGLIGCKQCVRVEENSLGYYIRKSAEPMLKEVVNHKTIATETVIEPKQFKHNRSKELENTWKDKALHGQFVKNLKGVDEINTWKWLVKGDLKGPTEALICSAQEQSLRTNYIKYNIDKSAESPLCRMCGEKGESVSHIVSECSKLAQREYKRRHDNVARYIHWTACGAAGAERAENWYQQQPEGVVETESHKVLWDFNIQCDQAVQARRPDIVVMDKRKKEAIIIDVAIPSDSRVCEKELEKIEKYQLLRDEVARLWDLKKVLIIPVVIGGLGAIGKKFDDYIQKLGLKIMIEVMQKNGFVRNGKNFEESVVFIDLERGLLGPLVTCCHLFP

SEQ ID NO: 25380 - protein, 1128 aa, Morbakka virulenta
MSVMSNRRNGNNGVNGAGGSYVEGASPGRCPAVWQRRPGRHQATAKTGWSKCMNVAVMECYFASKPVDTNGKPIRGYRRRMFNLWKERGLFECTEQRLCDQARAIRKNEWLTEIELEQIKRRINNTNIIDSDEDLLESDMFDEAEVVGEMRNMDAPEIKDNPERDDNERRIIDDIVKIMNEQDVDCFTSFKKVDRRKLNDITKRVNNIITDLITVNITDTNKLIRAVSVFVARELGLQRRKKQRKGTEPWWKRRITTSINQLRKHISIIERFKKGEIRRIEKYREVDRKYNIKKKGINVVCEELKQRMSAKAKKIHRYEERIKQYRTNMFFQQDERRIYHELNGKMNQDTVAPDANESKQFWSGIWDNPKVHNRDSEWLKELKNRKNQNKQGNILISEGMVREKSRKIPNWKAPGPDGVQGYWIKKLSNLHARIAFQLNDMINGGSEIPAWLTIGKTVLCQKDPIKGNAVDNYRPISCLPLMWKLLTGIIADELYKFLDENEKLPPEQKGCRKKSRGTKDQLLIDKMIIQDCKSRHTNLAMAWVDYKKAYDMVPHSWIIESLELAQVSGNVISFVKKTMSSWKTELTSAGEKLGSVNIRRGIFQGDSLSPLLFVICMMPITDVLKQTKAGYILKGGDLKINHLFFMDDLKVYGKNEKEIDGLLSSVEMISKDIGMEFGIKKCGVLVLKRGKVCKTEGIKLPSNEKVSEVTSEGYKYLGILEYDKIKEREMKDKFGKEYLRRTRLVLGSRLNGRNKLKAINTWAVSLMRYGAGILRWNNEELEQLDRKTRKLMTMHKVLNPNSDVARLYVPRKRGGRGLIGCKQCVRVEENSLGYYIRKSAEPMLKEVVNHKTIATETVIEPKQFKHNRSKELENTWKDKALHGQFVKNLKGVDEINTWKWLVKGDLKGPTEALICSAQEQSLRTNYIKYNIDKSAESPLCRMCGEKGESVSHIVSECSKLAQREYKRRHDNVARYIHWTACGAAGAERAENWYQQQPEGVVETESHKVLWDFNIQCDQAVQARRPDIVVMDKRKKEAIIIDVAIPSDSRVCEKELEKIEKYQLLRDEVARLWDLKKVLIIPVVIDALGAVGKKFDDYVQKLGLKIRIEVMQKTALLGTARILRKVLSL

SEQ ID NO: 25381 - protein, 1128 aa, Morbakka virulenta
MSVMSNRRNGNNGVNGAGGSYVEGASPGRCPAVWQRRPGRHQATAKTGWSKCMNVAVMECYFASKPVDTNGKPIRGYRRRMFNLWKERGLFECTEQRLCDQARAIRKNEWLTEIELEQIKRRINNTNIIDSDEDLLESDMFDEAEVVGEMRNMDAPEIKDNPERDDNERRIIDDIVKIMNEQDVDCFTSFKKVDRRKLNDITKRVNNIITDLITVNITDTNKLIRAVSVFVARELGLQRRKKQRKGTEPWWKRRITTSINQLRKHISIIERFKKGEIRRIEKYREVDRKYNIKKKGINVVCEELKQRMSAKAKKIHRYEERIKQYRTNMVFQQDERRIYHELNGKMNQDTVAPDANESKQFWSGIWDNPKVHNRDSEWLKELKNRKNQNKQGNILISEGMVREKSRKIPNWKAPGPDGVQGYWIKKLSNLHARIAFQLNDMINGGSEIPAWLTIGKTVLCQKDPIKGNAVDNYRPISCLPLMWKLLTGIIADELYKFLDENEKLPPEQKGCRKKSRGTKDQLLIDKMIIQDCKSRHTNLAMAWVDYKKAYDMVPHSWIIESLELAQVSGNVISFVKKTMSSWKTELTSAGEKLGSVNIRRGIFQGDSLSPLLFVICMMPITDVLKQTKAGYILKGGDLKINHLLFMDDLKVYGKNEKEIDGLLSSVEMISKDIGMEFGIKKCGVLVLKRGKVCKTEGIKLPSNEKVSEVTSEGYKYLGILEYDKIKEREMKDKFGKEYLRRTRLVLGSRLNGRNKLKAINTWAVSLMRYGAGILRWNNEELEQLDRKTRKLMTMHKVLNPNSDVARLYVPRKRGGRGLIGCKQCVRVEENSLGYYIRKSAEPMLKEVVNHKTIATETVIEPKQFKHNRSKELENTWKDKALHGQFVKNLKGVDEINTWKWLVKGDLKGPTEALICSAQEQSLRTNYIKYNIDKSAESPLCRMCGEKGESVSHIVSECSKLAQREYKRRHDNVARYIHWTACGAAGAERAENWYQQQPEGVVETESHKVLWDFNIQCDQAVQARRPDIVVMDKRKKEAIIIDVAIPSDSRVCEKELEKIEKYQLLRDEVARLWDLKKVLIIPVVIGALGAVGKKFDDYIQKLGLKIRIEVMQKMALLGMARILRKVLSL

SEQ ID NO: 25382 - protein, 1128 aa, Morbakka virulenta
MSVMSNRRNGNNGVNGAGGSYVEGASPGRCPAVWQRRPGRHQATARTGWSKCMNVAVMECYFASKPVDTNGKPIRGYRRRMFNLWKERGLFECTEQRLCDQARAIRKNEWLTEIELEQIKRRINNTNIIDSDEDLLESDMFDEAEVVGEMRNMDAPEIKDNPERDDNERRIIDDIVKIMNEQDVDCFTSFKKVDRRKLNDITKRVNNIITDLITVNITDTNKLIRAVSVFVARELGLQRRKKQRKGTEPWWKRRITTSINQLRKHISIIERFKKGEIRRIEKYREVDRKYNIKKKGINVVCEELKQRMSAKAKKIHRYEERIKQYRTNMVFQQDERRIYHELNGKMNQDTVAPDANESKQFWSGIWDNPKVHNRDSEWLKELKNRKNQNKQGNILISEGMVREKSRKIPNWKAPGPDGVQGYWIKKLSNLHARIAFQLNDMINGGSEIPAWLTIGKTVLCQKDPIKGNAVDNYRPISCLPLMWKLLTGIIADELYKFLDENEKLPPEQKGCRKKSRGTKDQLLIDKMIIQDCKSRHTNLAMAWVDYKKAYDMVPHSWIIESLELAQVSGNVISFVKKTMSSWKTELTSAGEKLGSVNIRRGIFQGDSLSPLLFVICMMPITDVLKQTKAGYILKGGDLKINHLFFMDDLKVYGKNEKEIDGLLSSVEMISKDIGMEFGIKKCGVLVLKRGKVCKTEGIKLPSNEKVSEVTSEGYKYLGILEYDKIKEREMKDKFGKEYLRRTRLVLGSRLNGRNKLKAINTWAVSLMRYGAGILRWNNEELEQLDRKTRKLMTMHKVLNPNSDVARLYVPRKRGGRGLIGCKQCVRVEENSLGYYIRKSAEPMLKEVVNHKTIATETVIEPKQFKHNRSKELENTWKDKALHGQFVKNLKGVDEINTWKWLVKGDLKGPTEALICSAQEQSLRTNYIKYNIDKSAESPLCRMCGEKGESVSHIVSECSKLAQREYKRRHDNVARYIHWTACGAAGAERAENWYQQQPEGVVETESHKVLWDFNIQCDQAVQARRPDIVVMDKRKKEAIIIDVAIPSDSRVCEKELEKIEKYQLLRDEVARLWDLKKVLIIPVVIGALGAVGKKFDDYIQKLGLKIRIEVMQKTALLGTARILRKVLSL

SEQ ID NO: 25383 - protein, 1128 aa, Morbakka virulenta
MSVMSNRRNGNNGVNGAGGSYVEGASPGRCPAVWQRRPGRHQATAKTGWSKCMNVAVMECYFASKPVDTNGKPIRGYRRRMFNLWKERGLFECTEQRLCDQARAIRKNEWLTEIELEQIKRRINNTNIIDSDEDLLESDMFDEAEVVGEMRNMDAPEIKDNPERDDNERRIIDDIVKIMNEQDVDCFTSFKKVDRRKLNDITKRVNNIITDLITVNITDTNKLIRAVSVFVARELGLQRRKKQRKGTEPWWKRRITTSINQLRKHISIIERFKKGEIRRIEKYREVDRKYNIKKKGINVVCEELKQRMSAKAKKIHRYEERIKQYRTNMVFQQDERRIYHELNGKMNQDTVAPDANESKQFWSGIWDNPKVHNRDSEWLKELKNRKNQNKQGNILISEGMVREKSRKIPNWKAPGPDGVQGYWIKKLSNLHARIAFQLNDMINGGSEIPAWLTIGKTVLCQKDPIKGNAVDNYRPISCLPLMWKLLTGIIADELYKFLDENEKLPPEQKGCRKKSRGTKDQLLIDKMIIQDCKSRHTNLAMAWVDYKKAYDMVPHSWIIESLELAQVSGNVISFVKKTMSSWKTELTSAGEKLGSVNIRRGIFQGDSLSPLLFVICMMPITDVLKQTKAGYILKGGDLKINHLFFMDDLKVYGKNEKEIDGLLSSVEMISKDIGMEFGIKKCGVLVLKRGKVCKTEGIKLPSNEKVSEVTSEGYKYLGILEYDKIKEREMKDKFGKEYLRRTRLVLGSRLNGRNKLKAINTWAVSLMRYGAGILRWNNEELEQLDRKTRKLMTMHKVLNPNSDVARLYVPRKRGGRGLIGCKQCVRVEENSLGYYIRKSAEPMLKEVVNHKTIATETVIEPKQFKHNRSKELENTWKDKALHGQFVKNLKGVDEINTWKWLVKGDLKGPTEALICSAQEQSLRTNYIKYNIDKSAESPLCRMCGEKGESVSHIVSECSKLAQREYKRRHDNVARYIHWTACGAAGAERAENWYQQQPEGVVETESHKVLWDFNIQCDQAVQARRPDIVVMDKRKKEAIIIDVAIPSDSRVCEKELEKIEKYQLLRDEVARLWDLKKVLIIPVVIGALGAVGKKFDDYIQKLGLKIRIEVMQKTALLGTARILRKVLSL

SEQ ID NO: 25384 - protein, 1128 aa, Morbakka virulenta
MSVMSNRRNGNNGVNGAGGSYVEGASPGRCPAVWQRRPGRHQATARTGWSKCMNVAVMECYFASKPVDTNGKPIRGYRRRMFNLWKERGLFECTEQRLCDQARAIRKNEWLTEIELEQIKRRINNTNIIDSDEDLLESDMFDEPEVVGEMRNMDAPEIKDNPERDDNERRIIDDIVKIMNEQDVDCFTSFKKVDRRKLNDITKRVNNIITDLITVNITDTNKLIRAVSVFVARELGLQRRKKQRKGTEPWWKRRITTSINQLRKHISIIERFKKGEIRRIEKYREVDRKYNIKKKGINVVCEELKQRMSAKAKKIHRYEERIKQYRTNMVFQQDERRIYHELNGKMNQDTVAPDANESKQFWSGIWDNPKVHNRDSEWLKELKNRKNQNKQGNILISEGMVREKSRKIPNWKAPGPDGVQGYWIKKLSNLHARIAFQLNDMINGGSEIPAWLTIGKTVLCQKDPIKGNAVDNYRPISCLPLMWKLLTGIIADELYKFLDENEKLPPEQKGCRKKSRGTKDQLLIDKMIIQDCKSRHTNLAMAWVDYKKAYDMVPHSWIIESLELAQVSGNVISFVKKTMSSWKTELTSAGEKLGSVNIRRGIFQGDSLSPLLFVICMMPITDVLKQTKAGYILKGGDLKINHLLFMDDLKVYGKNEKEIDGLLSSVEMISKDIGMEFGIKKCGVLVLKRGKVCKTEGIKLPSNEKVSEVTSEGYKYLGILEYDKIKEREMKDKFGKEYLRRTRLVLGSRLNGRNKLKAINTWAVSLMRYGAGILRWNNEELEQLDRKTRKLMTMHKVLNPNSDVARLYVPRKRGGRGLIGCKQCVRVEENSLGYYIRKSAEPMLKEVVNHKTIATETVIEPKQFKHNRSKELENTWKDKALHGQFVKNLKGVDEINTWKWLVKGDLKGPTEALICSAQEQSLRTNYIKYNIDKSAESPLCRMCGEKGESVSHIVSECSKLAQREYKRRHDNVARYIHWTACGAAGAERAENWYQQQPEGVVETESHKVLWDFNIQCDQAVQARRPDIVVMDKRKKEAISIEVAIPSDSGVCEKELEKIEEYQLLRDGVARLWDLKKVLIIPVVIGALGAVEKKFDNYIQKLGLKIRIKVMQKTALLRMARILRKVLSL

SEQ ID NO: 25385 - protein, 1128 aa, Morbakka virulenta
MSVMSNRRNGNNGVNGAGGSYVEGASPGRCPAVWQRRPGRHQATARTGWSKCMNVAVMECYFASKPVDTNGKPIRGYRRRMFNLWKERGLFECTEQRLCDQARAIRKNEWLTEIELEQIKRRINNTNIIDSDEDLLESDMFDEAEVVGEMRNMDAPEIKDNPERDDNERRIIDDIVKIMNEQDVDCFTSFKKVDRRKLNDITKRVNNIITDLITVNITDTNKLIRAVSVFVARELGLQRRKKQRKGTEPWWKRRITTSINQLRKHISIIERFKKGEIRRIEKYREVDRKYNIKKKGINVVCEELKQRMSAKAKKIHRYEERIKQYRTNMVFQQDERRIYHELNGKMNQDTVAPDANESKQFWSGIWDNPKVHNRDSEWLKELKNRKNQNKQGNILISEGMVREKSRKIPNWKAPGPDGVQGYWIKKLSNLHARIAFQLNDMINGGSEIPAWLTIGKTVLCQKDPIKGNAVDNYRPISCLPLMWKLLTGIIADELYKFLDENEKLPPEQKGCRKKSRGTKDQLLIDKMIIQDCKSRHTNLAMAWVDYKKAYDMVPHSWIIESLELAQVSGNVISFVKKTMSSWKTELTSAGEKLGSVNIRRGIFQGDSLSPLLFVICMMPITDVLKQTKAGYILKGGDLKINHLFFMDDLKVYGKNEKEIDGLLSSVEMISKDIGMEFGIKKCGVLVLKRGKVCKTEGIKLPSNEKVSEVTSEGYKYLGILEYDKIKEREMKDKFGKEYLRRTRLVLGSRLNGRNKLKAINTWAVSLMRYGAGILRWNNEELEQLDRKTRKLMTMHKVLNPNSDVARLYVPRKRGGRGLIGCKQCVRVEENSLGYYIRKSAEPMLKEVVNHKTIATETVIEPKQFKHNRSKELENTWKDKALHGQFVKNLKGVDEINTWKWLVKGDLKGPTEALICSAQEQSLRTNYIKYNIDKSAESPLCRMCGEKGESVSHIVSECSKLAQREYKRRHDNVARYIHWTACGAAGAERAENWYQQQPEGVVETESHKVLWDFNIQCDQAVQARRPDIVVMDKRKKEAIIIDVAIPSDSRVCEKELEKIEKYQLLRDEVAHLWDLKKVLIIPIVIGALGAIGKTFDDYIQKLGLKIRIEVMQKTALLGTARILRKMLSL

SEQ ID NO: 25386 - protein, 1048 aa, Morbakka virulenta
MFNFWKERGLFECTEQRLCDQARAIRKNEWLTEIELEQIKRRINNTNIIDSDEDLLESDMFDEAEVVGEMRNMDAPEIKDNPERDDNERRIIDDIVKIMNEQDVDCFTSFKKVDRRKLNDITKRVNNIITDLITVNITDTNKLIRAVSVFVARELGLQRRKKQRKGTEPWWKRRITTSINQLRKHISIIERFKKGEIRRIEKYREVDRKYNIKKKGINVVCEELKQRMSAKAKKIHRYEERIKQYRTNMVFQQDERRIYHELNGKMNQDTVAPDANESKQFWSGIWDNPKVHNRDSEWLKELKNRKNQNKQGNILISEGMVREKSRKIPNWKAPGPDGVQGYWIKKLSNLHARIAFQLNDMINGGSEIPAWLTIGKTVLCQKDPIKGNAVDNYRPISCLPLMWKLLTGIIADELYKFLDENEKLPPEQKGCRKKSRGTKDQLLIDKMIIQDCKSRHTNLAMAWVDYKKAYDMVPHSWIIESLELAQVSGNVISFVKKTMSSWKTELTSAGEKLGSVNIRRGIFQGDSLSPLLFVICMMPITDVLKQTKAGYILKGGDLKINHLFFMDDLKVYGKNEKEIDGLLSSVEMISKDIGMEFGIKKCGVLVLKRGKVCKTEGIKLPSNEKVSEVTSEGYKYLGILEYDKIKEREMKDKFGKEYLRRTRLVLGSRLNGRNKLKAINTWAVSLMRYGAGILRWNNEELEQLDRKTRKLMTMHKVLNPNSDVARLYVPRKRGGRGLIGCKQCVRVEENSLGYYIRKSAEPMLKEVVNHKTIAIETVIEPKQFKHNRSKELENTWKDKALHGQFVKNLKGVDEINTWKWLVKGDLKGPTEALICSAQEQSLRTNYIKYNIDKSAESPLCRMCGEKGESVSHIVSECSKLAQREYKRRHDNVARYIHWTACGAAGAERAENWYQQQPEGVVETESHKVLWDFSIQCDQAVHARRPEIVVMDKRKKEAIIIDVAIPSDSRVCEKELEKIEKYQLSRDEVARLWYLKKVLVIPVVIGALGAVGKTFDNYIQKLRLKIRIEVMQKTALLGAARISRKALSL

SEQ ID NO: 25387 - protein, 1076 aa, Morbakka virulenta
MNVAVMECYFASKPVDTNGKPIRGYRRRMFNLWKERGLFECTEQRLCDQARAIRKNEWLTEIELEQIKRRINNTNIIDSDEDLLESDMFDEAEVVGEMRNMDAPEIKDNPERDDNERRIIDDIVKIMNEQDVDCFTSFKKVDRRKLNDITKRVNNIITDLITVNITDTNKLIRAVSVFVARELGLQRRKKQRKGTEPWWKRRITTSINQLRKHISIIERFKKGEIRRIEKYREVDRKYNIKKKGINVVCEELKQRMSAKAKKIHRYEERIKQYRTNMVFQQDERRIYHELNGKMNQDTVAPDANESKQFWSGIWDNPKVHNRDSEWLKELKNRKNQNKQGNILISEGMVREKSRKIPNWKAPGPDGVQGYWIKKLSNLHARIAFQLNDMINGGSEIPAWLTIGKTVLCQKDPIKGNAVDNYRPISCLPLMWKLLTGIIADELYKFLDENEKLPPEQKGCRKKSRGTKDQLLIDKMIIQDCKSRHTNLAMAWVDYKKAYDMVPHSWIIESLELAQVSGNVISFVKKTMSSWKTELTSAGEKLGSVNIRRGIFQGDSLSPLLFVICMMPITDVLKQTKAGYILKGGDLKINHLLFMDDLKVYGKNEKEIDGLLSSVEMISKDIGMEFGIKKCGVLVLKRGKVCKTEGIKLPSNEKVSEVTSEGYKYLGILEYDKIKEREMKDKFGKEYLRRTRLVLGSRLNGRNKLKAINTWAVSLMRYGAGILRWNNEELEQLDRKTRKLMTMHKVLNPNSDVARLYVPRKRGGRGLIGCKQCVRVEENSLGYYIRKSAEPMLKEVVNHKTIATETVIEPKQFKHNRSKELENTWKDKALHGQFVKNLKGVDEINTWKWLVKGDLKGPTEALICSAQEQSLRTNYIKYNIDKSAESPLCRMCGEKGESVSHIVSECSKLAQREYKRRHDNVARYIHWTACGAAGAERAENWYQQQPEGVVETESHKVLWDFNIQCDQAVQARRPDIVVMDKRKKEAIIIDVAIPSDSRVCEKELEKIEKYQLLRDEVARLWDLKKVLIIPVVIGALGAVGKKFDDYIQKLGLKIRIEVMQKTALLGTARILRKVLPL

SEQ ID NO: 25388 - protein, 1107 aa, Morbakka virulenta
MSVMSNRRNGNNGVNGAGGSYVEGASPGRCPAVWQRRPGRHQATARTGWSKCMNVAVMECYFASKPVDTNGKPIRGYRRRMFNLWKERGLFECTEQRLCDQARAIRKNEWLTEIELEQIKRRINNTNIIDSDEDLLESDMFDEAEVVGEMRNMDAPEIKDNPERDDNERRIIDDIVKIMNEQDVDCFTSFKKVDRRKLNDITKRVNNIITDLITVNITDTNKLIRAVSVFVARELGLQRRKKQRKGTEPWWKRRITTSINQLRKHISIIERFKKGEIRRIEKYREVDRKYNIKKKGINVVCEELKQRMSAKAKKIHRYEERIKQYRTNMVFQQDERRIYHELNGKMNQDTVAPDANESKQFWSGIWDNPKVHNRDSEWLKELKNRKNQNKQGNILISEGMVREKSRKIPNWKAPGPDGVQGYWIKKLSNLHARIAFQLNDMINGGSEIPAWLTIGKTVLCQKDPIKGNAVDNYRPISCLPLMWKLLTGIIADELYKFLDENEKLPPEQKGCRKKSRGTKDQLLIDKMIIQDCKSRHTNLAMAWVDYKKAYDMVPHSWIIESLELAQVSGNVISFVKKTMSSWKTELTSAGEKLGSVNIRRGIFQGDSLSPLLFVICMMPITDVLKQTKAGYILKGGDLKINHLFFMDDLKVYGKNEKEIDGLLSSVEMISKDIGMEFGIKKCGVLVLKRGKVCKTEGIKLPSNEKVSEVTSEGYKYLGILEYDKIKEREMKDKFGKEYLRRTRLVLGSRLNGRNKLKAINTWAVSLMRYGAGILRWNNEELEQLDRKTRKLMTMHKVLNPNSDVARLYVPRKRGGRGLIGCKQCVRVEENSLGYYIRKSAEPMLKEVVNHKTIATETVIEPKQFKHNRSKELENTWKDKALHGQFVKNLKGVDEINTWKWLVKGDLKGPTEALICSAQEQSLRTNYIKYNIDKSAESPLCRMCGEKGESVSHIVSECSKLAQREYKRRHDNVARYIHWTACGAAGAERAENWYQQQPEGVVETESHKVLWDFNIQCDQAVQARRPDIVVMDKRKKEAIIIDVAIPSDSRVCEKELEKIEEYQLLRDEVARLWDLKKVLIIPVVIGALGAVGKKFDDYIQKLGLKIRI

SEQ ID NO: 25389 - protein, 1128 aa, Morbakka virulenta
MSVMSNRRNGNNGVNGAGGSYVEGASPGRCPAVWQRRPGRHQATAKTGWSKCMNVAVMECYFASKPVDTNGKPIRGYRRRMFNLWKERGLFECTEQRLCDQARAIRKNEWLTEIELEQIKRRINNTNIIDSDEDLLESDMFDEPEVVGEMRNMDAPEIKDNPERDDNERRIIDDIVKIMNEQDVDCFTSFKKVDRRKLNDITKRVNNIITDLITVNITDTNKLIRAVSVFVARELGLQRRKKQRKGTEPWWKRRITTSINQLRKHISIIERFKKGEIRRIEKYREVDRKYNIKKKGINVVCEELKQRMSAKAKKIHRYEERIKQYRTNMVFQQDERRIYHELNGKMNQDTVAPDANESKQFWSGIWDNPKVHNRDSEWLKELKNRKNQNKQGNILISEGMVREKSRKIPNWKAPGPDGVQGYWIKKLSNLHARIAFQLNDMINGGSEIPAWLTIGKTVLCQKDPIKGNAVDNYRPISCLPLMWKLLTGIIADELYKFLDENEKLPPEQKGCRKKSRGTKDQLLIDKMIIQDCKSRHTNLAMAWVDYKKAYDMVPHSWIIESLELAQVSGNVISFVKKTMSSWKTELTSAGEKLGSVNIRRGIFQGDSLSPLLFVICMMPITDVLKQTKAGYILKGGDLKINHLFFMDDLKVYGKNEKEIDGLLSSVEMISKDIGMEFGIKKCGVLVLKRGKVCKTEGIKLPSNEKVSEVTSEGYKYLGILEYDKIKEREMKDKFGKEYLRRTRLVLGSRLNGRNKLKAINTWAVSLMRYGAGILRWNNEELEQLDRKTRKLMTMHKVLNPNSDVARLYVPRKRGGRGLIGCKQCVRVEENSLGYYIRKSAEPMLKEVVNHKTIATETVIEPKQFKHNRSKELENTWKDKALHGQFVKNLKGVDEINTWKWLVKGDLKGPTEALICSAQEQSLRTNYIKYNIDKSAESPLCRMCGEKGESVSHIVSECSKLAQREYKRRHDNVARYIHWTACGAAGAERAENWYQQQPEGVVETESHKVLWDFNIQCDQAVQARRPDIVVMDKRKKEAIIIDVAIPSDSRVCEKELEKIEKYQLLRDEVARLWDLKKVLIIPVVIGALGAVGKKFDDYIQKLGLKIRIEVMQKTALLGTARIVRKVLSL

SEQ ID NO: 25390 - protein, 1128 aa, Morbakka virulenta
MSVMSNRRNGNNGVNGAGGSYVEGASPGRCPAVWQRRPGRHQATARTGWSKCMNVAVMECYFASKPVDTNGKPIRGYRRRMFNLWKERGLFECTEQRLCDQARAIRKNEWLTEIELEQIKRRINNTNIIDSDEDLLESDMFDEAEVVGEMRNMDAPEIKDNPERDDNERRIIDDIVKIMNEQDVDCFTSFNKVDRRKLNDITKRVNNIITDLITVNVTDTNKLIRAVSVFVARELGLQRRKKQRKGTEPWWKRRITTSINQLRKHISIIERFKKGEIRRIEKYREVDRKYNIKKKGINVVCEELKQRMSAKAKKIHRYEERIEQYRTNMVFQQDERRIYHELNGKMNQDTVAPDANESKQFWSGIWDNPKVHNRDSEWLKELKNRKNQNKQGNILISEGMVREKSRKIPNWKAPGPDGVQGYWIKKLSNLHARIAFQLNDMINGGSEIPAWLTIGKTVLCQKDPIKGNAVDNYRPISCLPLMWKLLTGIIADELYKFLDENEKLPPEQKGCRKKSRGTKDQLLIDKMIIQDCKSRHTNLAMAWVDYKKAYDMVPHSWIIESLELAQVSGNVISFVKKTMSSWKTELTSAGEKLGSVNIRRGIFQGDSLSPLLFVICMMPITDVLKQTKAGYILKGGDLKINHLFFMDDLKVYGKNEKEIDGLLSSVEMISKDIGMEFGIKKCGVLVLKRGKVCKTEGIKLPSNEKVSEVTSEGYKYLGILEYDKIKEREMKDKFGKEYLRRTRLVLGSRLNGRNKLKAINTWAVSLMRYGAGILRWNNEELEQLDRKTRKLMTMHKVLNPNSDVARLYVPRKRGGRGLIGCKQCVRVEENSLGYYIRKSAEPMLKEVVNHKTIATETVIEPKQFKHNRSKELENTWKDKALHGQFVKNLKGVDEINTWKWLVKGDLKGPTEALICSAQEQSLRTNYIKYNIDKSAESPLCRMCGEKGESVSHIVSECSKLAQREYKRRHDNVARYIHWTACGAAGAERAENWYQQQPEGVVETESHKVLWDFNIQCDQAVQARRPDIVVMDKRNKEAIIIDVAIPSDSRVCEKELEKIEEYQLLRDEVARLWDLKKVLIIPVVIGALGAVGKKFDDYIQKLGLKIRIEVMQKTALLGTARILRQVLSL

SEQ ID NO: 25391 - protein, 1128 aa, Morbakka virulenta
MSVMSNRRNGNNGVNGAGGSYVEGASPGRCPAVWQRRPGRHQATARTGWSKCMNVAVMECYFASKPVDTNGKPIRGYRRRMFNLWKERGLFECTEQRLCDQARAIRKNEWLTEIELEQIKRRINNTNIIDSDEDLLESDMFDEAEVVGEMRNMDAPEIKDNSERDDNERRIIDDIVKIMNEQDVDCFTSFKKVDRRKLNDITKRVNNIITDLITVNITDTNKLIRAVSVFVARELGLQRRKKQRKGTEPWWKRRITTSINQLRKHISIIERFKKGEIRRIEKYREVDRKYNIKKKGINVVCEELKQRMSAKAKKIHRYEERIKQYRTNMVFQQDERRIYHELNGKMNQDTVAPDANESKQFWSGIWDNPKVHNRDSEWLKELKNRKNQNKQGNILISEGMVREKSRKIPNWKAPGPDGVQGYWIKKLSNLHARIAFQLNDMINGGSEIPAWLTIGKTVLCQKDPIKGNAVDNYRPISCLPLMWKLLTGIIADELYKFLDENEKLPPEQKGCRKKSRGTKDQLLIDKMIIQDCKSRHTNLAMAWVDYKKAYDMVPHSWIIESLELAQVSGNVISFVKKTMSSWKTELTSAGEKLGSVNIRRGIFQGDSLSPLLFVICMMPITDVLKQTKAGYILKGGDLKINHLFFMDDLKVYGKNEKEIDGLLSSVEMISKDIGMEFGIKKCGVLVLKRGKVCKTEGIKLPSNEKVSEVTSEGYKYLGILEYDKIKEREMKDKFGKEYLRRTRLVLGSRLNGRNKLKAINTWAVSLMRYGAGILRWNNEELEQLDRKTRKLMTMHKVLNPNSDVARLYVPRKRGGRGLIGCKQCVRVEENSLGYYIRKSAEPMLKEVVNHKTIATETVIEPKQFKHNRSKELENTWKDKALHGQFVKNLKGVDEINTWKWLVKGDLKGPTEALICSAQEQSLRTNYIKYNIDKSAESPLCRMCGEKGESVSHIVSECSKLAQREYKRRHDNVARYIHWTACGAAGAERAENWYQQQPEGVVETESHKVLWDFNIQCDQAVQARRPDIVVMDKRKKEAIIIDVAIPSDSRVCEKELEKIEKYQLLRDEVARLWDLKKVLIIPVVIGALGAVGKKFDDYIQKLGLKIRIEVMQKTALLGTARILRKVLSL

SEQ ID NO: 25392 - protein, 1128 aa, Morbakka virulenta
MSVMSNRRNGNNGVNGAGGSYVEGASPGRCPAVWQRRPGRHQATARTGWSKCMNVAVMECYFASKPVDTNGKPIRGYRRRMFNLWKERGLFECTEQRLCDQARAIRKNEWLTEIELEQIKRRINNTNIIDSDEDLLESDMFDEAEVVGEMRNMDAPEIKDNPERDDNERRIIDDIVKIMNEQDVDCFTSFKKVDRRKLNDITKRVNNIITDLITVNITDTNKLIRAVSVFVARELGLQRRKKQRKGTEPWWKRRITTSINQLRKHISIIERFKKGEIRRIEKYREVDRKYNIKKKGINVVCEELKQRMSAKAKKIHRYEERIKQYRTNMVFQQDERRIYHELNGKMNQDTVAPDANESKQFWSGIWDNPKVHNRDSEWLKELKNRKNQNKQGNILISEGMVREKSRKIPNWKAPGPDGVQGYWIKKLSNLHARIAFQLNDMINGGSEIPAWLTIGKTVLCQKDPIKGNAVDNYRPISCLPLMWKLLTGIIADELYKFLDENEKLPPEQKGCRKKSRGTKDQLLIDKMIIQDCKSRHTNLAMAWVDYKKAYDMVPHSWIIESLELAQVSGNVISFVKKTMSSWKTELTSAGEKLGSVNIRRGIFQGDSLSPLLFVICMMPITDVLKQTKAGYILKGGDLKINHLFFMDDLKVYGKNEKEIDGLLSSVEMISKDIGMEFGIKKCGVLVLKRGKVCKTEGIKLPSNEKVSEVTSEGYKYLGILEYDKIKEREMKDKFGKEYLRRTRLVLGSRLNGRNKLKAINTWAVSLMRYGAGILRWNNEELEQLDRKTRKLMTMHKVLNPNSDVARLYVPRKRGGRGLIGCKQCVRVEENSLGYYIRKSAEPMLKEVVNHKTIATETVIEPKQFKHNRSKELENTWKDKALHGQFVKNLKGVDEINTWKWLVKGDLKGPTEALICSAQEQSLRTNYIKYNIDKSAESPLCRMCGEKGESVSHIVSECSKLAQREYKRRHDNVARYIHWTACGAAGAERAENWYQQQPEGVVETESHKVLWDFNIQCDQAVQARRPDIVVMDKRKKEAIIIDVAIPSDSRVCEKELEKIEKYQLLRDEVARLWDLKKVLIIPVVIGALGAVGKKFDDYIQKLGLKIRIEVMQKTVLLGTARILRKVLSL

SEQ ID NO: 25393 - protein, 821 aa, Morbakka virulenta
MSAKAKKIHRYEERIKQYRTNMVFQQDERRIYHELNGKMNQDTVAPDANESKQFWSGIWDNPKVHNRDSEWLKELKNRKNQNKQGNILISEGMVREKSRKIPNWKAPGPDGVQGYWIKKLSNLHARIAFQLNDMINGGSEIPAWLTIGKTVLCQKDPIKGNAVDNYRPISCLPLMWKLLTGIIADELYKFLDENEKLPPEQKGCRKKSRGTKDQLLIDKMIIQDCKSRHTNLAMAWVDYKKAYDMVPHSWIIESLELAQVSGNVISFVKKTMSSWKTELTSAGEKLGSVNIRRGIFQGDSLSPLLFVICMMPITDVLKQTKAGYILKGGDLKINHLFFMDDLKVYGKNEKEIDGLLSSVEMISKDIGMEFGIKKCGVLVLKRGKVCKTEGIKLPSNEKVSEVTSEGYKYLGILEYDKIKEREMKDKFGKEYLRRTRLVLGSRLNGRNKLKAINTWAVSLMRYGAGILRWNNEELEQLDRKTRKLMTMHKVLNPNSDVARLYVPRKRGGRGLIGCKQCVRVEENSLGYYIRKSAEPMLKEVVNHKTIATETVIEPKQFKHNRSKELENTWKDKALHGQFVKNLKGVDEINTWKWLVKGDLKGPTEALICSAQEQSLRTNYIKYNIDKSAESPLCRMCGEKGESVSHIVSECSKLAQREYKRRHDNVARYIHWTACGAAGAERAENWYQQQPEGVVETESHKVLWDFNIQCDQAVQARRPDIVVMDKRKKEAIIIDVAIPSDSRVCEKELEKIEKYQLLRDEVARLWDLKKVLIIPVVIGALGAVGKKFDDYIQKLGLKIRIEVMQKTALLGTARILRKVLSL

SEQ ID NO: 25394 - protein, 1128 aa, Morbakka virulenta
MSVMSNRRNGNNGVNGAGGSYVEGASPGRCPAVWQRRPGRHQATARTGWSKCMNVAVMECYFASKPVDTNGKPIRGYRRRMFNLWKERGLFECTEQRLCDQARAIRKNEWLTEIELEQIKRRINNTNIIDSDEDLLESDMFDEAEVVGEMRNMDAPEIKDNPERDDNERRIIDDIVKIMNEQDVDCFTSFKKVDRRKLNDITKRVNNIITDLITVNITDTNKLIRAVSVFVARELGLQRRKKQRKGTEPWWKRRITTSINQLRKHISIIERFKKGEIRRIEKYREVDRKYNIKKKGINVVCEELKQRMSAKAKKIHRYEERIKQYRTNMVFQQDERRIYHELNGKMNQDTVAPDANESKQFWSGIWDNPKVHNRDSEWLKELKNRKNQNKQGNILISEGMVREKSRKIPNWKAPGPDGVQGYWIKKLSNLHARIAFQLNDMINGGSEIPAWLTIGKTVLCQKDPIKGNAVDNYRPISCLPLMWKLLTGIIADELYKFLDENEKLPPEQKGCRKKSRGTKDQLLIDKMIIQDCKSRHTNLAMAWVDYKKAYDMVPHSWIIESLELAQVSGNVISFVKKTMSSWKTELTSAGEKLGSVNIRRGIFQGDSLSPLLFVICMMPITDVLKQTKAGYILKGGDLKINHLLFMDDLKVYGKNEKEIDGLLSSVEMISKDIGMEFGIKKCGVLVLKRGKVCKTEGIKLPSNEKVSEVTSEGYKYLGILEYDKIKEREMKDKFGKEYLRRTRLVLGSRLNGRNKLKAINTWAVSLMRYGAGILRWNNEELEQLDRKTRKLMTMHKVLNPNSDVARLYVPRKRGGRGLIGCKQCVRVEENSLGYYIRKSAEPMLKEVVNHKTIATETVIEPKQFKHNRSKELENTWKDKALHGQFVKNLKGVDEINTWKWLVKGDLKGPTEALICSAQEQSLRTNYIKYNIDKSAESPLCRMCGEKGESVSHIVSECSKLAQREYKRRHDNVARYIHWTACGAAGAERAENWYQQQPEGVVETESHKVLWDFNIQCDQAVQARRPDIVVMDKRKKEAIIIDVAIPSDSRVCEKELEKIEKYQLLRDEVARLWDLKKVLIIPVVIGALGAVGKKFDDYIQKLGLKIRIEVMQKPALLGTARILRKVLSL

SEQ ID NO: 25395 - protein, 1076 aa, Morbakka virulenta
MNVAVMECYFASKPVDTNGKPIRGYRRRMFNLWKERGLFECTEQRLCDQARAIRKNEWLTEIELEQIKRRINNTNIIDSDEDLLESDMFDEAEVVGEMRNMDAPEIKDNPERDDNERRIIDDIVKIMNEQDVDCFTSFKKVDRRKLNDITKRVNNIITDLITVNITDTNKLIRAVSVFVARELGLQRRKKQRKGTEPWWKRRITTSINQLRKHISIIERFKKGEIRRIEKYREVDRKYNIKKKGINVVCEELKQRMSAKAKKIHRYEERIKQYRTNMVFQQDERRIYHELNGKMNQDTVAPDANESKQFWSGIWDNPKVHNRDSEWLKELKNRKNQNKQGNILISEGMVREKSRKIPNWKAPGPDGVQGYWIKKLSNLHARIAFQLNDMINGGSEIPAWLTIGKTVLCQKDPIKGNAVDNYRPISCLPLMWKLLTGIIADELYKFLDENEKLPPEQKGCRKKSRGTKDQLLIDKMIIQDCKSRHTNLAMAWVDYKKAYDMVPHSWIIESLELAQVSGNVISFVKKTMSSWKTELTSAGEKLGSVNIRRGIFQGDSLSPLLFVICMMPITDVLKQTKAGYILKGGDLKINHLFFMDDLKVYGKNEKEIDGLLSSVEMISKDIGMEFGIKKCGVLVLKRGKVCKTEGIKLPSNEKVSEVTSEGYKYLGILEYDKIKEREMKDKFGKEYLRRTRLVLGSRLNGRNKLKAINTWAVSLMRYGAGILRWNNEELEQLDRKTRKLMTMHKVLNPNSDVARLYVPRKRGGRGLIGCEQCVRVEENSLGYYIRKSAEPMLKEVVNHKTIATETVIEPKQFKHNRSKELENTWKDKALHGQFVKNLKGVDEINTWKWLVKGDLKGPTEALICSAQEQSLRTNYIKYNIDKSAESPLCRMCGEKGESVSHIVSECSKLAQREYKRRHDNVARYIHWTACGAAGAERAENWYQQQPEGVVETESHKVLWDFNIQCDQAVQARRPDIVVMDKRKKEAIIIDVAIPSDSRVCEKELEKIEKYQLLRDEVARLWDLKKVLIIPVVIGALGAVGKKFDDYIQKLGLKIRIEGMQKTALLGTARMLRKVLSL

SEQ ID NO: 25396 - protein, 1128 aa, Morbakka virulenta
MSVMSNRRNGNNGVNGAGGSYVEGASPGRCPAVWQRRPGRHQATARTGWSKCMNVAVMECYFASKPVDTNGKPIRGYRRRMFNLWKERGLFECTEQRLCDQARAIRKNEWLTEIELEQIKRRINNTNIIDSDEDLLESDMFDEAEVVGEMRNMDAPEIKDNPERDDNERRIIDDIVKIMNEQDVDCFTSFKKVDRRKLNDITKRVNNIITDLITVNITDTNKLIRAVSVFVARELGLQRRKKQRKGTEPWWKRRITTSINQLRKHISIIERFKKGEIRRIEKYREVDRKYNIKKKGINVVCEELKQRMSAKAKKIHRYEERIKQYRTNMVFQQDERRIYHELNGKMNQDTVAPDANESKQFWSGIWDNPKVHNRDSEWLKELKNRKNQNKQGNILISEGMVREKSRKIPNWKAPGPDGVQGYWIKKLSNLHARIAFQLNDMINGGSEIPAWLTIGKTVLCQKDPIKGNAVDNYRPISCLPLMWKLLTGIIADELYKFLDENEKLPPEQKGCRKKSRGTKDQLLIDKMIIQDCKSRHTNLAMAWVDYKKAYDMVPHSWIIESLELAQVSGNVISFVKKTMSSWKTELTSAGEKLGSVNIRRGIFQGDSLSPLLFVICMMPITDVLKQTKAGYILKGGDLKINHLLFMDDLKVYGKNEKEIDGLLSSVEMISKDIGMEFGIKKCGVLVLKRGKVCKTEGIKLPSNEKVSEVTSEGYKYLGILEYDKIKEREMKDKFGKEYLRRTRLVLGSRLNGRNKLKAINTWAVSLMRYGAGILRWNNEELEQLDRKTRKLMTMHKVLNPNSDVARLYVPRKRGGRGLIGCKQCVRVEENSLGYYIRKSAEPMLKEVVNHKTIATETVIEPKQFKHNRSKELENTWKDKALHGQFVKNLKGVDEINTWKWLVKGDLKGPTEALICSAQEQSLRTNYIKYNIDKSAESPLCRMCGEKGESVSHIVSECSKLAQREYKRRHDNVARYIHWTACGAAGAERAENWYQQQPEGVVETESHKVLWDFNIQCDQAVQARRPDIVVMDKRKKEAIIIDVAIPSDSRVCEKELEKIEKYQLLRDEVARLWDLKKVLIIPVVIGALGAVGKKFDDYIQKLGLKIRIEVMQKTALLGTARILRKVLSL

SEQ ID NO: 25397 - protein, 1091 aa, Morbakka virulenta
MSVMSNRRNGSNGVNGAGGSYVEGASPGSCPAVWQRRSGRHQATARSRWSKCMNVAVIECYFASKPVDSNGKPIRGYRRRMFNLWKERGLFECTEQRLCDQARAIRKNEWLTEIELEQIKRRINNTNIIDSDEDLLESDMFDEAEVVGEMRNMDAPEIKDNPERDDNERRIIDDIVKIMNEQDVDCFTSFKKVDRRKLNDITKRVNNIITDLITVNITDTNKLIRAVSVFVARELGLQRRKKQRKGTEPWWKRRITTSINQLRKHISIIERFKKGEIRRIEKYREVDRKYNIKKKGINVVCEELKQRMSAKAKKIHRYEERIKQYRTNMVFQQDERRIYHELNGKMNQDTVAPDANESKQFWSGIWDNPKVHNRDSEWLKELKNRKNQNKQGNILISEGMVREKSRKIPNWKAPGPDGVQGYWIKKLSNLHARIAFQLNDMINGGSEIPAWLTIGKTVLCQKDPIKGNAVDNYRPISCLPLMWKLLTGIIADELYKFLDENEKLPPEQKGCRKKSRGTKDQLLIDKMIIQDCKSRHTNLAMAWVDYKKAYDMVPHSWIIESLELAQVSGNVISFVKKTMSSWKTELTSAGEKLGSVNIRRGIFQGDSLSPLLFVICMMPITDVLKQTKAGYILKGGDLKINHLFFMDDLKVYGKNEKEIDGLLSSVEMISKDIGMEFGIKKCGVLVLKRGKVCKTEGIKLPSNEKVSEVTSEGYKYLGILEYDKIKEREMKDKFGKEYLRRTRLVLGSRLNGRNKLKAINTWAVSLMRYGAGILRWNNEELEQLDRKTRKLMTMHKVLNPNSDVARLYVPRKRGGRGLIGCKQCVRVEENSLGYYIRKSAEPMLKEVVNHKTIATETVIEPKQFKHNRSKELENTWKDKALHGQFVKNLKGVDEINTWKWLVKGDLKGPTEALICSAQEQSLRTNYIKYNIDKSAESPLCRMCGEKGESVSHIVSECSKLAQREYKRRHDNVARYIHWTACGAAGAERAENWYQQQPEGVVETESHKVLWDFNIQCDQAVQARRLGIVVMDKRKKEAIIIDVAKPSVFRVCEKELEKIEKYQLLRDEVARLWDLKKVLIIPVVIGALGAIG

SEQ ID NO: 25398 - protein, 1051 aa, Morbakka virulenta
MNVAVMECYFASKPVDTNGKPIRGYRRRMFNLWKERGLFECTEQRLCDQARAIRKNEWLTEIELEQIKRRINNTNIIDSDEDLLESDMFDEAEVVGEMRNMDAPEIKDNPERDDNERRIIDDIVKIMNEQDVDCFTSFKKVDRRKLNDITKRVNNIITDLITVNITDTNKLIRAVSVFVARELGLQRRKKQRKGTEPWWKRRITTSINQLRKHISIIERFKKGEIRRIEKYREVDRKYNIKKKGINVVCEELKQRMSAKAKKIHRYEERIKQYRTNMVFQQDERRIYHELNGKMNQDTVAPDANESKQFWSGIWDNPKVHNRDSEWLKELKNRKNQNKQGNILISEGMVREKSRKIPNWKAPGPDGVQGYWIKKLSNLHARIAFQLNDMINGGSEIPAWLTIGKTVLCQKDPIKGNAVDNYRPISCLPLMWKLLTGIIADELYKFLDENEKLPPEQKGCRKKSRGTKDQLLIDKMIIQDCKSRHTNLAMAWVDYKKAYDMVPHSWIIESLELAQVSGNVISFVKKTMSSWKTELTSAGEKLGSVNIRRGIFQGDSLSPLLFVICMMPITDVLKQTKAGYILKGGDLKINHLLFMDDLKVYGKNEKEIDGLLSSVEMISKDIGMEFGIKKCGVLVLKRGKVCKTEGIKLPSNEKVSEVTSEGYKYLGILEYDKIKEREMKDKFGKEYLRRTRLVLGSRLNGRNKLKAINTWAVSLMRYGAGILRWNNEELEQLDRKTRKLMTMHKVLNPNSDVARLYVPRKRGGRGLIGCKQCVRVEENSLGYYIRKSAEPMLKEVVNHKTIATETVIEPKQFKHNRSKELENTWKDKALHGQFVKNLKGVDEINTWKWLVKGDLKGPTEALICSAQEQSLRTNYIKYNIDKSAESPLCRMCGEKGESVSHIVSECSKLAQREYKRRHDNVARYIHWTACGAAGAERAENWYQQQPEGVVETESHKVLWDFNIQCDQAVQARRPDIVVMDKRKKEAIIIDVAIPSDSRVCEKELEKIEKYQLLRDEVARLWDLKKVLIIPVVIGALGAVGKKFDDYIQKLGL

SEQ ID NO: 25399 - protein, 1128 aa, Morbakka virulenta
MSVMSNRRNGNNGVNGAGGSYVEGASPGRCPAVWQRRPGRHQATARTGWSKCMNVAVMECYFASKPVDTNGKPIRGYRRRMFNLWKERGLFECTEQRLCDQARAIRKNEWLTEIELEQIKRRINNTNIIDSDEDLLESDMFDEAEVVGEMRNMDAPEIKDNPERDDNERRIIDDIVKIMNEQDVDCFTSFKKVDRRKLNDITKRVNNIITDLITVNITDTNKLIRAVSVFVARELGLQRRKKQRKGTEPWWKRRITTSINQLRKHISIIERFKKGEIRRIEKYREVDRKYNIKKKGINVVCEELKQRMSAKAKKIHRYEERIKQYRTNMVFQQDERRIYHELNGKMNQDTVAPDANESKQFWSGIWDNPKVHNRDSEWLKELKNRKNQNKQGNILISEGMVREKSRKIPNWKAPGPDGVQGYWIKKLSNLHARIAFQLNDMINGGSEIPAWLTIGKTVLCQKDPIKGNAVDNYRPISCLPLMWKLLTGIIADELYKFLDENEKLPPEQKGCRKKSRGTKDQLLIDKMIIQDCKSRHTNLAMAWVDYKKAYDMVPHSWIIESLELAQVSGNVISFVKKTMSSWKTELTSAGEKLGSVNIRRGIFQGDSLSPLLFVICMMPITDVLKQTKAGYILKGGDLKINHLLFMDDLKVYGKNEKEIDGLLSSVEMISKDIGMEFGIKKCGVLVLKRGKVCKTEGIKLPSNEKVSEVTSEGYKYLGILEYDKIKEREMKDKFGKEYLRRTRLVLGSRLNGRNKLKAINTWAVSLMRYGAGILRWNNEELEQLDRKTRKLMTMHKVLNPNSDVARLYVPRKRGGRGLIGCKQCVRVEENSLGYYIRKSAEPMLKEVVNHKTIATETVIEPKQFKHNRSKELENTWKDKALHGQFVKNLKGVDEINTWKWLVKGDLKGPTEALICSAQEQSLRTNYIKYNIDKSAESPLCRMCGEKGESVSHIVSECSKLAQREYKRRHGNVARYIHWTACGAAGAERAENWYQQQPEGVVETESHKVLWDFNIQCDQAVQARRPDIVVMDKRKKEAIIIDVAIPSDSRVCEKELEKIEKYQLLRDEVARLWDLKKVLIIPVVIGALGAVGKKFDDYIQKLGLKIRIEVMQKTALLGTARILRKVLSL

SEQ ID NO: 25400 - protein, 1125 aa, Bradysia odoriphaga
MDQGLPSNVSGAQSLQLQEYLQSDTSTDDDPKEIGYVLHRPSDVSFTCKLCASQFETYNELRAHRLLHEKLRQKILDKSNVRRRNEHQIEISSTSRSASDGRSPAIASGVSKCELNPAKPIEPSAEDIPQQESNLSDLQCQICGFTARRVNGFKLHMEVHRSERDSVSANNELEDEPISQHSQPMSGVLNDMNDVNLLPCHLCPVSSRKRYKGNRGLNLHVKRKHQSPPVTTIDSSQDISTTLAKLKATVRVLKRIPKGARFQAAVKITTLINDCLRDPKNLDNWRLLFTFPYVGLRLPEKKNSKGTLTSIVKRNLDSQLQEEVTISTHSNETSLSRRVESKISDGDIKGAVRLLISEETIAPLDEDTYLKFLDKHPPPSRSLEFPDEPNDSTPSLHVESDAVKNAIFSFPAGSSSGVDGYRPQHLKDLLSSANGDASVNLLVSITNLSNFMLAGLVPDAILPILYGANLCALNKKCGGIRPIAVGNCFRRITSKLACSSVYGSLSSEFQPRQSGFATKSGCEMIVHSVRTFIEKNACNDKLLLMIDFANAFNSIDRDTMLAQVKLKTPFLYRFCWQAYHSTTHLFFGDKMIASQTGCQQGDPAGPMLFCLTINPIISTLLSELVLFYLDDGTIAGNAESVLRDFESLIVKCRAIGLHINPSKCQLFSTARIDQGIVDRFNVLSPGINVTSDLTLLGAPITLGAGDQCFANKLSELRLMFSRLRSLRSSHVSFYLLRHCFAIPKLTYLLRTCPNWLFEHHLTAIDLEIKSCLENVINNSLNDNQWLLASLPIRFGGLGIRRTTDIGVSAFLSSVNSVSSLLGSMFNFDREIVASIPFNNDGLEMWNSINNNTLPQSVCHQESWDSINSLRLWNSINISSDVDKARRLAMTRPESHFWLYALPSRSIGTLLENNHFRICVGLRLGCRLCVQHRCVCGDIVLENGLHGLSCLKAAGRHPRHREFNNIIWRTLNSVHHPSQLEPPGLFRTDNKRVDGITLVPWTNGQCLTWDATCSDTFAPSYLHQSSRECGIIAENSARSKNRLYAPVTEQNFVFVPVAVETMGPWCPNGSSFLHELGRLLCEKTGDPRSKSYLFQKISLCVQRGNAISIMGTLPHGKKLDEIYEFL

SEQ ID NO: 25401 - protein, 1229 aa, Bradysia odoriphaga
MDTEDPESDDSINICPLCGRAFQSVAGLRQHWSKSHTAAEINELIANKTRATHTQPNTQSTGTATWNRIQVMTEGFPSHQFNIVENDGLGNCLFHSLLDFLHSHEPIFKDVPPNVDELRKVAVEYVVKSLSGPNRERYQESLVINLQDEFPNWSIDMHVKSLESSYSDYMSRCGTYGTTTELCAVAEVFGFRFNIVRRVGNHSFTAYDFGSSAHTNVSKPIVHLYFTGSTSRGHFRLLVPTHDSVPSLIPPGNYELSEDFTSSKVTSITLCRPTALHVTPTPDPVPPDIETEIKFKCEFCGRFFDTRRGLNVHRNIHADQQGTNMDSGNGPTNDTSFEDFVILLARCKSKVRVLKRVPRGARITAANKLAQCVEDCLANPLLSTKWKNLLTFAYTALRVPDRTKGKSLSTLVKNNMDNVKLVIPDRPNKTRRVKPSLSQRVECKIAEGNVKGAVKLLASSDTLAPQSLETFGQLQTKHPPPSREMKYPDPPDEKAEVLVVSEKEVFFSIKSFPNGSGSGIDGLLPQHLKDLTLPSTGEAGLRLLKAITNLTNYMLSGKVQSRFIEIMYGASLCALEKKLGGIRPIAVGNSFRRITSKLASASVRPEMSSKFAPRQVGFGIQGGCEAAAHATRTFIKKNSHRKVVVVKIDFRNAFNEIDRDIFLNEMKTHCPTIYPYLRQCYAAPTLLFYGDFILLSQNGAQQGDPCGPLVFSSAIQAVVDALISEFIVFYLDDGTIAGEYDSVLKDFNLVIVECAKIGLHINPSKCELFFCSGVDQSIVEQFNNLSPGICVVNEFTLLGAPISDNAFDTIFRNKLSEMKLLFKRLLELENYHIAFYILKNCFAIPKLVFLLRTTPTWNNSDLIAEVDSEIRSALEHLSNATLDDDTWIMASLPVNSGGIGVRRVQDTALPAFLSSVNASAQLVSIMLHQSTLQAEEIADYQDGLNAWNGLHPGSVQPEIPSLQRQWNRIAIARLIENLRIESDEDKARFLAVQKPESGAWLQALPSSSIGTLLENNSFRIAVGLRLGIDICLPHICRCGQQVDKKGRHGLKCRQKAGRYATHAELNNIIKRSLVSADVPARLEPVGLCRSDGKRVDGITLIPWSRGSTLIWDATCTDTFAPSNLRFSTKKAGKAVEDKANRKVTKYSSLINQGYLFVPFAVETMGPWCAEAVRFFDELSMKVAMKTHEPRSGTFLRQRLSIAIQRGNAAAVMGTFRSSDKMDEIFYILT

SEQ ID NO: 25402 - protein, 1238 aa, Bradysia odoriphaga
MDSDDAEPDEPTNFCPICGRAFPTVAGLRQHWSKSHTVEEIDDLIASRTQQTLSQSDSLPAPAPSTSLNRIQVVNETSTPQQFYIVENDGSGDCLFHALLDFLRRHETNFKNIPRSVDELRRDAVKHIVTSSDGIYPNFERFMDNLLENLQSQINTWSTGDIPVEEMKLSYTAYMSTPGIYGTTSELCAIAEMFGFCFNILRRHDSHKFTCYDYGSITKPDASKPVAHLFFTGDISSGHFRLLIPVNKSAMTVIAPGNYELLSDFTSSKLLSISLARPSTLNVSQRPGSSSSVPNSGDENIEFKCEFCSRLFDTRRGLNVHRNHHLNEAGKSAKPDSTDTNDDSSFEDFLILLARCKSKVRVLKRVPRGARIAAANKLAHCVEECLANPLLSKSWKNLLTFSYTALRVPDKTKNSSLSTLVKKNIEKAQLVIPDRPNRSKRIPPSLSKRVECKIAEGNVKGAVKLLASSDTLAPQTLETLSQLQAKHPPPSRELHFPDPPDKNATTLVVSEKDVFYSIKSFPNGSGSGIDGLLPQHIKDLTLPSTGEAGLRLLKSITSLTNYMLSGKVQSRFIEIMYGASLCALEKKLGGIRPIAVGNTFRRITSKLSSASVRPEMSTKFAPRQVGFGIRGGCEASAHATRTFIKKNSHRSVVVLKIDFRNAFNELDRDVFLNEMKLHCPGIYPYLRQCYAAPTFLFYGDFILLSQNGAQQGDPCGPLVFSSAIQTVVDSLISEFIVFYLDDGTIAGDYDSVLRDFNLVITECAKMGLHINPAKCELFFCSGTDQSVIDQFNVLSPGICVVNDFTLLGAPISDDAFDRIFKEKLTELKLLFKRLLELDNYHIAFYILKNCFAIPKLVFLLRTTPTWNHTDLIDELDNEIKSTLEHLSNAVLNDDTWIKASLPINSGGVGVRRVRDTALPAFLSSVNACSQLASIMLHQPSLQVEEIAGYQDGLNAWSSLHPGSDPPEIPSLQRQWNKITTTRLLENVNFETDVDKARFLAIQKPEAGAWLQALPSRSIGTLLENNAFRIAIGLRLGIDICSPHVCWCGALVDTKGYHGLKCRKSAGRHARHAELNVIIKRALISADIPARLEPLGLARDDGKRVDGMSLIPWSRGSTLIWDATCTDTLAPSNLRFSLKKAGKAAENKANGKTSKYRSLINQNYFFVPFAVETMGPWCDEAMQFFNILAKKIATKTQEPRARSFLQQRLSMAIQRGNVAAVMGTFRSCDKMEEIFYILT

SEQ ID NO: 25403 - protein, 1213 aa, Bradysia odoriphaga
MSSRVTRSKKQSRVDQSPTQPQQMTNICPICERGFKTSAGLSQHVSKSHSAKEIDDAINSRTQSFLRAGPSSGTTQSSVNPVADWKRNKLQIIQDDLRASTGRSYHLFDIIENDSSGNCLFSAVFEYLKNNTSGQTVPRNAYDLRLLAVEHILNQSGSAIESNFDRFQIHLVENLQRKIPSFANEDTSVETLRTDYANYMSTPYTYGTIAELCAMAEIFNFAFYVVRRIDHSSFTCYDYGSLDRSTVDQPIPTMHLFFTGDICEGHFRLLSPAASPPNSTIPTGALKLIEDCSSSVTVSIAPTNFSSFSQDPEEPTTNAIPETDFDEFIILLARCKSNIRVLKRVPRAARILAANGLSQCIEECLANPKLSTNWKNLLLFAYTSLRVPEKVNNVSLATLVKKNINKPELVFTKRVKKKPITLSKRVECKVSEGDIKGAVRILSSSDTLAAQNESTFKHLQAKHPPPSRELNLPDPPDDTIEPLVVSEKEVFHAIRSFPNGSSAGVDGLLPQHLKDLTLPSTGEAGLRLLKAITALSNYMLSGKVQSEFIQIMYGASLCALDKKCGGVRPIAVGNTFRRITSKLASGSVRSEMSSNFAPRQVGYGVQGGCEAAAHATRTFIKKNSHRKVVIVKIDFRNAFNELDRDIFLNELRLKCPGIFPYLWQCYSSPSLLFYGDFILRSQNGAQQGDPCGPLIFSSGIQFIIEALVSEFVIFYLDDGTIGGEYDSVMSDFKTVIDKCAKIGLQINPTKCELFFCSEVDHGIVERFEELSPGICVVNNFTLLGTSITDNAFDKIFQEKRCELKLLFERLRELDNYHVAFYILKNCFAIPKLVYLLRTTPTWNHLNILDEIDEQIKQTLETLTNSHLDDITWNLASLPINVGGIGVRKVRDIALPAFLSSINAVLPLVSIMLNQSTLTTVEIADFDESMNAWNRLHPEPILPEIPSQQKQWDSIVVRQSLNIFRFIQDDDKARFLAIQRSESGAWLHALPSKSIGTLLDNNAFRIIMGLRLGLDICAPHTCICGSQVDKKGHHGLKCKRSAGRHMRHTELNRIIKRALLSAGIPARLEPVGLARDDGKRVDGMSLVPWSKGCTLIWDATCTDTFAASNIRFSSKQAGKAADVKATMKAKKYESLINQGHWFVPFAVETMGAWSQEAEAFFNELGKRITLETLEPRSKSFLKQKLSLAIQRGNAAAVMGTFKEEEKMEEIFYLV

SEQ ID NO: 25404 - protein, 1179 aa, Bradysia odoriphaga
MFEQSQTPAQPTDSRLGLQVIYEDAPPNIFDVVENAGSGDCLFHTLFGFIHQHSSDYTNLPRDIDDLRIRAVQHILKSSNCGSQSNFDRYMDNLRENLQSEIVNWSAADVPVEALKKSYSDYMSTTGNYGTTSELCAVAELFGFGFNIIRRDDDIDPNKFSCYDYGSVSNVGHSLPTAHLLFTGNISRGHFRLLTPVNEPKSIPAGNYELINDYTSSKLLSIAMARPTVINTAQQRMQRPVNSSSGEDFKCESCGRIFNTRRGLNVHRNIHLNEYDNNDNTDCPPSTDNDTTFEDFVILLARCKSKVRVLRRVPRGARVQAAKKLSQCIEECLANPLLSKSWKNLLTFAYSALRVPNRIKNTSLSNLVKRNIEKAELVIPERPGRNRTPLSLSRRTECKISEGNVKGAVKLLASSDTLATQSMETFAQLQLKHPPPSRKMILPDPPDNNVEALVVSEKDVFFSIKSFPHGSGSGVDGILLQHLKDLTLPSTGEAGLRLLKALTGLSNYMLSGKVQSRFIEIMYGASLCALEKKLGGIRPIAVGNTFRRITSKLWSGSVRVKMSSRFKPRQVGFGVQSGCEAAAHATRTFIKKNSHRNVVIVKIEFRNAFNEVDRDVFLKEMKNHCPAIFPYLWQCYANPTLLFYGDYVLLSQNGAQQGDPCGPLVFSSAIQAVVDALVSEFVVFYLDDGTVAGEHDIVLTDFETIINECSKIGLHINPTKCELYFCSTVDHNIVERLNELSPGICVVNEFTLLGAPISDNAFSGIFNKKLDEMKLLFERLLELENSHIEFYILKNCFAIPKMVFLLRTTPTWNNSELISEFDDAIKSTVESLTNTTLDLDTWLMASLPINSGGIGTRRVQDTALPAFLSSVNACSQLVSIMLQQSKLQVEDIADYQDGLKAWNSSYPGSAHPIESSNQRDWNKVSVEYLVENKTPTSIDDKARFLALQRPESGAWLHALPSRHFGTLVENNAFRIAVGLRLGTDVCSPHICRCDAKVDSKGHHALKCRKKAGRLATHAELNSIIKRALDSADVPAKLEPEGLVREDGKRVDGMSLIPWTRGSTLIWDATCTDTLAPSNLRFSTRKAGEAAEDRAKRKTAKYRSLINQNYYFVPFAVETLGPWCDEAIQFFNVLSNKIAIKTHEPRSSKRSRSFLQQRISMAIQRGNAAAVMEASGNVIN

SEQ ID NO: 25405 - protein, 1238 aa, Bradysia odoriphaga
MDPDETDSDDTANICPICNRGFSTMGGLRQHWSRSHTPEEISKLIADKTQKMFEQSQTPAQPTDSRLGLQVIYEDAPPNIFDVVENAGSGDCLFHTLFGFIHQHSSDYTNLPRDIDDLRIRAVQHILKSSNCGSQSNFDRYMDNLRENLQSEIVNWSAADVPVEALKKSYSDYMSTTGNYGTTSELCAVAELFGFGFNIIRRDDDIDPNKFSCYDYGSVSNVGHSLPTAHLLFTGNISRGHFRLLTPVNEPKSIPAGNYELINDYTSSKLLSIAMARPTVINTAQQRMQRPVNSSSGEDFKCESCGRIFNTRRGLNVHRNIHLNEYDNNDNTDCPPSTDNDTTFEDFVILLARCKSKVRVLRRVPRGARVQAAKKLSQCIEECLANPLLSKSWKNLLTFAYSALRVPNRIKNTSLSNLVKRNIEKAELVIPERPGRNRTPLSLSRRVECKISEGNVKGAVKLLASSDTLATQSMETFAQLQLKHPPPSRKMILPDPPDNNVEALVVSEKDVFFSIKSFPHGSGSGVDGILLQHLKDLTLPSTGEAGLRLLKALTGLSNYMLSGKVQSRFIEIMYGASLCALEKKLGGIRPIAVGNTFRRITSKLWSGSVRVKMSSRFKPRQVGFGVQSGCEAAAHATRTFIKKNSHRNVVIVKIEFRNAFNEVDRDVFLKEMKNHCPAIFPYLWQCYANPTLLFYGDYVLLSQNGAQQGDPCGPLVFSSAIQAVVDALVSEFVVFYLDDGTVAGEHDIVLTDFETIINECSKIGLHINPTKCELYFCSTVDHNIVERLNELSPGICVVNEFTLLGAPISDNAFSGIFNKKLDEMKLLFERLLELENSHIEFYILKNCFAIPKMVFLLRTTPTWNNSELISEFDDAIKSTVESLTNTTLDLDTWLMASLPINSGGIGTRRVQDTALPAFLSSVNACSQLVSIMLQQSKLQVEDIADYQDGLKAWNSSYPGSAHPIESSNQRDWNKVSVEYLVENKTPTSIDDKARFLALQRPESGAWLHALPSRHFGTLVENNAFRIAVGLRLGTDVCSPHICRCDAKVDRKGHHALKCRKKAGRLATHAELNSIIKRALDSADVPAKLEPEGLVREDGKRVDGMSLIPWTRGSTLIWDATCTDTLAPSNLRFSTRKAGEAAEDRAKRKTAKYRSLINQNYYFVPFAVETLGPWCDEAIQFFNVLSNKIAIKTHEPRSSKRSRSFLQQRISMAIQRGNAAAVMGSFRECDKLDEVFYIL

SEQ ID NO: 25406 - protein, 1017 aa, Bradysia odoriphaga
MVQFSMTELCAMAEIFNFGFFVIRKHDHTSYSCYDYGSLGGVSQHKPLAVVHLLFTGNLGEGHFRYLRRKENTQNEVEPGRYKLVEAYTSSKFTSIAPLDFTPADNDDIDAEAGRSEEDCATVYDSSFEDFVILLARCRSNIRVLKRVPRGARILAANKLVHCLEECLASPDLAAKWKNLLTFAYSSLRVPERVNNASLSTSVKRNLTNPTLKFTKPTKKKQMISLSKRVECKVAEGNIKGAVKILSSTDTLAPQNESTLSQLKTKHPPPSREMAFPVPPDKTSDPLVVTERETFFSIKSFPNGSGSGVDGLLPQHLKDLTLPSTGEAGIRLLKSITAFSNFMLSGKIQSDFIKIMYGASLCALNKLDGGIRPIAVGNTFRRLTSKLACASVRPNMAAKFAPRQVGFGVDGGCEAAAHATRTFIKKNTNRKVVIVKIDFRNAFNEVDRDIFLNEMKMNCPTIYPYLWQCYSAPSLLFYGDYIILSQNGAQQGDPCGPLLFSSAIQFVIDSLVSEFVVFYLDDGTIGGDYESVHRDFTTIKEECAKIGLQINPSKCELFFCSEVDRDVISQFDRISPGICVVNEFTLLGTSITDNAFNKVFTKKLSELKLLFERLRQLDNFHLAFYILKNCFAIPKLVFLLRTTPIWSHMNMIDQIDVEIKSTLETLTNSTLDGDTWAWASLPTRAGGTGIRKVRDTALPAFLSSINATFPLVSTMLHSPTLNIEEVAYYGDSLQAWNDAQPDGRIPENPKIQKQWDSIVVDRLVNSLPIEGDEFRSRILALRRPESSAWLHALPSKSLGTLLDNNAFRTIMGLRLGLDICVPHVCRCGLQVDKKGHHGLRCKKKTGRFALHADLNSIVKRGLGLAEVPSKLEPPGLYRDDGKRVDGMTLIPWSKGNILIWDATCTDTFAASNIRFSTVDAGKAADEKAKRKVRKYSALINQNYIFVPFAVETMGPWSQVAIKFFNELSKRISIQTHEPRSRSFLMQRLSMAIQRGNASAIMGTFNDNEKMEEIFYLL

SEQ ID NO: 25407 - protein, 1199 aa, Bradysia odoriphaga
MDTPEEEEKTFVCPICERGFEKMAGLRQHWTKSHSADEISDTIAGSTQYSNQALASDGTTQPDAITWSKFQIIRCNSETGISYHQYDIIDKDNTGDCLFASVLEFLKDWKNTFPNVPENVFDLRTMTVNHIMKPDAGGHQSDFDRFRMHLLENLGNEIPGLAFDDQATENMKRKYADYMSTPRKYGTMTELCAMAEIFNFGFFVIRKHDHTSYSCYDYGSLGGVSQHKPLAVVHLLFTGNLGEGHFRYLRRKENTQNEVEPGRYKLVEAYTSSKFTSIAPLDFTPADNDEIDAEAGRSEEDCATVYDSSFEDFVILLARCRSNIRVLKRVPRGARILAANKLAHCLEECLASPDLAAKWKNLLTFAYSSLRVPERVNNASLSTLVKRNLTNPTLKFTKPTKKKQMISLSKRVECKVAEGNIKGAVKILSSTDTLAPQNESTLSQLKTKHPPPSREMAFPVPPDKTSDPLVVTERETFFSIKSFPNGSGSGVDGLLPQHLKDLTLPSTGEAGIRLLKSITAFSNFMLSGKIQSDFIKIMYGASLCALNKLDGGIRPIAVGNTFRRLTSKLACASVRPNMAAKFAPRQVGFGVNGGCEAAAHATRTFIKKNTNRKVVIVKIDFRNAFNEVDRDIFLNEMKMNCPTIYPYLWQCYSAPSLLFYGDYIILSQNGAQQGDPCGPLLFSSAIQFVIDSLVSEFVVFYLDDGTIGGDYESVHRDFTTIKEECAKIGLQINPSKCELFFCSEVDRDVISQFDRISPGICVVNEFTLLGTSITDNAFNKVFTKKLSELKLLFERLRQLDNFHLAFYILKNCFAIPKLVFLLRTTPIWSHMNMIDQIDVEIKSTLETLTNSTLDGDTWAWASLPTRAGGTGIRKVRDTALPAFLSSINATFPLVSTMLHSPTLNIEEVAYYGDSLQAWNDAQPDGRIPENPKIQKQWDSIVVDRLVNSLPIEGDEFRSRILALLRPESSAWLHALPSKSLGTLLDNNAFRTIVGLRLGLDICVPHVCRCGLQVDKKGHHGLRCKKKTGRFALHADLNSIVKRGLGLAEVPSKLEPPGLYRDDGKRVDGMTLIPWSKGNILIWDATCTDTFAASNIRFSTVDAGKAADEKAKRKVRKYSALINQNYIFVPFAVETMGPWSQVAIKFFNELSKRISIQTYEPRSRSFLMQRLSMAIQRGNASAIMGTFNDNEKMEEIFYLL

SEQ ID NO: 25408 - protein, 840 aa, Pachyseris speciosa
MFEDIGEAEGFWRTLWEEQGSGDENAGWLKEIEEGIRQRVPPASQEEWDLETAVIAKVISKKRNWSAPGPDRVVNFWWKRAYAVHEDVKIIFKGISESLQAYPEWFAHGKSSLIPKPGEFSSENQRPITCLNTGYKWFTSCVLGSMDYHLDYYDLMEMQQRGAKAKCSGTTDNLMIDRMVTLDCHRHKRNLSVAWIDVRKAFDSVDHGWLKKILRINRFPTWICRVVDNLSDSWNTRIAVKTMKGHEVSPPINFNRGLPQGDALCPRLFTLCLNPVAWKLSSTEGYRLSKPVVGNNITNLLYVDDLKVFASSQAKLNRVLKMTEEAMGDIGLLWNPKKCNVLHVRRGVIDKTSQGFKAGQTAIDCLKDKQYCFLGAPEQLLQDQKLALETAARTYLQRLSVIWSSPLSDMNRVTASNQLALPVLTYLMWSQHWNLTDLRNIDREARKVISENGGKHPLGSTALLYLPRHQGGRGLRSVETEYKHTKIKSAIKLYQNKDPTMSLVRAFEERAADKGNQSLIKEASTFAEEMGISLELSHPNPRCLKEDGTEVPNIKNHLKQSSRQQLEDKIRGEKWQGKYLTNRWNDDDLNVQGCFGWLKEWPSAPTHTIAGMMELYEQMLPTRAYTTYKTRTNPSDDTLCRLCGKAVESLEHVLAGCLALAQSKYLARHNAALKVLFFEMLRDLQLCEGVPPWYSPVAPKPLYESPDAQAFWDIPMFAEHNHVRSNRVDVRVIDHKQKKIYAIEMSCPWIDNRKKKEVEKTTKYAPLRWELKQQFPTYTVKQFNIIIDVLGGWSQEVDLAMRELFGTRGGDVLLRMQKAVISHSLKIARTFKVLTRRVGQ

SEQ ID NO: 25409 - protein, 1163 aa, Pachyseris speciosa
MEHLELTSQNLRDQAAALDKSIGSVAENIASRVGRRRRSAGGREGNEAEEEGNLERDNSQYANEQKIGANFHTENSENQTMRHEEFINTLTQGERELFEKSVQLYTLVNMREGDYSNREIDTRIKQKPTQSDLKSINRVLKGLLEQKKTISLNNDPFAHFWLVNCVLYSVVAAFLLLKGWKKDPKDKSDKQRVYNGAKWKKNYLDEMGEIRKNISIASAEVNRVKENRKLTKRGRKNRALLQEECKSLSVTQLITYIEKQKFRLRKLKAAFGRKKRQEEAKSLNDQFRTDPGRVYARINQIVAEDPDNAHPKYKVASPTVEQSGGGKNMFEDIGEAEGFWRTLWEEQGSGDENAGWLKEIEEGIRQRVPPASQEEWDLETAVIAKVISKKRNWSTPGPDRVVNFWWKRAYAVHEDVKINFKGISESLQAYPEWFAQGKSSLIPKPGEFSSENQRPITCLNTGYKWFTSCVLGSMDYHLDYYDLMEMQQRGAKAKCSGTTDNLMIDRMVTLDCHRHKRNLSVAWIDVRKAFDSVDHGWLKKILRINRFPTWICRVVDNLSDSWNTRIAVKTMKGHEVSPPINFNRGLPQGDALCPRLFTLCLNPVAWKLSSTEGYRLSKPVVGNNITNLLYVDDLKVFASSQAKLNRVLKMTEEAMGDIGLLWNPKKCNALHVRRGVIDKTSQGFKAGQTAIDCLKDKQYCFLGAPEQLLQDQKLALETAARTYLQRLSVIWSSPLSDMNRVTASNQLALPVLTYLMWSQHWNLTDLRNIDREARKVISENGGKHPLGSTALLYLPRHQGGRGLRSVETEYKHTKIKSAIKLYQNKDPTMSLVRAFEERAADKGNQSLIKEASTFAEEMGISLELSHPNPRCLKEDGTEVPNIKNHLKQISRQQLEDKIRGEKWQGKYLTNRWNDDDLNVQGCFGWLKEWASAPTHTIAGMMELYEQMLPTRAYTTYKTRTNPSDNTLCRLCGKAVESLEHVLAGCLALAQSKYLARHNAALKVLFFEMLRDLQLCEGVPPWYSPVAPKPLYESPDAQAFWDIPMFAEHNHVRSNRVDVRVIDHKQKKIYAIEMSCPWIDNRKKKEVEKTTKYAPLRWELKQQFPTYTVKQFNIIIDVLGGWSQEVDLAMRELFGTQGGDVLLRMQKAVISHSLKIARTFKVLT

SEQ ID NO: 25410 - protein, 1126 aa, Acropora yongei
MGRLRKGLKIHWTEEMNNLVLQCREKALKLSNSEDPPRYENGRKIGYMRLMKDFWEESGMEHLELTSQNLRDQAAALDKSIGSVAGNIASHVGRGRRSAGGRKRNEAEEEGNLERDNTQHANEQQRIGANLHTENSENQTMPHEEFINTLTQGERELFEKSEQLYTLVNTREGDYSNRETDTRIKQKPTQRDLKSINRVLKGLLEEECKSLSVTKLITYIEKQKFRLRKLKVAFGREKRQEQVKSLNDQFRTDPAWVYARINQIVAEDPDNAHPKYKAASPAVEQSGGGKNMFEDIGEAESFWRSLWEEQGSGDEKAEWLKEIEEAIRQRVPPASQEEWDPETVAIAKVISKKRNWSAPGPDRVVNFWWKRACAVHEDVKISFKGISESLKAYPEWFAQGKSSLIPKPGEFSSENQRPITCLNTGYKWFTSCVLDPMDYHLDYYDLMEMQQRGAKAKCSGTTDNLMIDRMVTLDCHRHKRNLSVAWIDVRKAFDSVNHGWLKKILRINRFPTWICRVVDNLSDSWNTRIAVKTMKGYEVSPPINFNRGLPQGDVLCPRLFTLCLNPVAWKLSSTEGYRLSKPVVGNNITNLLYVDDLKVFASSQAKLNRVLKMTEEAMGDIGLLWNPKKCNVLHARRGVIDKTSQGFKAGQTVIDCLKDKQYRFLGAPEQLLQDQKLALETAAKTYLQRLSVIWSSPLSDMNRVTASNQLALPVLTYLMWSQHWNLTDLRNIDRETRKVISENGGKHPLGSTALLYLPRHQGGRGLRSVETEYKHTKIKSAIKLYQNKDPTMSLVRAFEERAVDKGNQSLIKEASTFAEEMGISLELSHPNPRCLKEDGTEVPNIKNHLKQSSRLQFEDKIRGEKWQGKYLTSRWNDDDLNVQGCFGWLKEWPSAPTHTIAGMMELYEQMLPTRVYTTYKTRTNPSDDTLCRLCGEAVESLEHVLAGCLALAQSKYLARHDAALKVLFFEMLRDLQLCEGVPLWYSPVAPKPLYESPDAQAFWDIPMFAEHNHVRSNRVDVRVIDHKQKRIYAIEMSCPWIDNRKKKEVEKTAKYAPLRWELKQQFPTYTVKQFNIIIDVLGGWSREVDLAMRELFGTRGGDVLFRMQKAVISHSLNIARTFKVLT

SEQ ID NO: 25411 - protein, 1208 aa, Pachyseris speciosa
MGRQRKGPKIHWTEEMNNLVLQCREKALKLSNSEDPPRHENGRKIGYMRLMKDFWEELGMEHLELTSQNLRDQAAALDKSIGSVAENIASRVGRRRRSAGGREGNEAEEEGNLERDNSQYANEQKIGANFHTENSENQTMRHEEFINTLTQGERELFEKSVQLYTLVNTREGDYSNREIDTRIKQKPTQSDLKSINRVLKGLLEQKKTISLNNDPFAHFWLVNCVLYSVVAAFLLLKGWKKDPKDKLDKQRVYNGEKWKKNYLDEMGEIRKNISIASAEVNRVKENRKLTKRGRKNRALLQEECKSLSVTQLITYIEKQKFWLRKLKAAFGRKKRQEEAKSLNDQFRTDPGRVYARINQIVAEDPDNAHPKYKAASPTVEQSGGGKNMFEDIGEAEGFWRTLWEEQGSGDENAGWLKEIEEGIRQRVPPASQEEWDLETAVIAKVISKKRNWSAPGPDRVVNFWWKRAYAVHEDVKIIFKGISESLQAYPEWFAQGKSSLIPKPGEFSSENQRPITCLNTGYKWFTSCVLGSMDYHLDYYDLMEMQQRGAKAKCSGTTDNLMIDRMVTLDCHRHKRNLSVAWIDVRKAFDSVDHGWLKKILRINRFPTWICRVVDNLSDSWNTRIAVKTMKGHEVSPPINFNRGLPQGDALCPRLFTLCLNPVAWKLSSTEGYRLSKPVVGNNITNLLYVDDLKVFASSQAKLNRVLKMTEEAMGDIGLLWNPKKCNVLHVRRGVIDKTSQGFKAGQTAIDCLKDKQYCFLGAPEQLLQDQKLALETAARSYLQRLSVIWSSPLSDMNRVTASNQLALPVLTYLMWSQHWNLTDLRNIDREARKVISENGGKHPLGSTALLYLPRHQGGRGLRSVETEYKHTKIKSAIKLYQNKDPTMSLVRAFEERAADKGNQSLIKEASTFAEEMGISLELSHPNPRCLKEDGTEVPNIKNHLKQSSRQQLEDKIRGEKWQGKYLTNRLKEWPRAPTHTIAGMMELYEQMLPTRAYTTYKTRTNPSDDTLCRLCGKAVESLEHVLAGCLALAQSKYLARHNAALKVLFFEMLRDLQLCEGVPPWYSPVAPKPLYESPDAQAFWDIPMFAEHNHVRSNRVDVRVIDHKQKKIYAIEMSCPWIDNRKKKEVEKTTKYAPLRWELKQQFPTYTVKQFNIIIDVLGGWSQEVDLAMRELFGTRGGDVLLRMQKAVISHSLKIARTFKVLT

SEQ ID NO: 25412 - protein, 1157 aa, Pachyseris speciosa
MGRQRKGPKIHWTEEMNNLVLQCREKALKLSNSEDPPRHENGRKIGYMRLMKDFWEELGMEHLELTSQNLRDQAAALDKSIGSVAENIASRVGRRRRSAGGREGNEAEEEGNLERDNSQYANEQKIGANFHTENSENQTMRHEEFINTLTQGERELFEKSVQLYTLVNTREGDYSNREIDTRIKQKPTQSDLKSINRVLKGLLEQKKTISLNNDPFAHFWLVNCVLYSVVAAFLLLKGWKKDPKDKLDKQRVYNGEKWKKNYLDEMGEIRKNISIASAEVNRVKENRKLTKRGRKNRALLQEECKSLSVTQLITYIEKQKFRLRKLKAAFGRKKRQEEAKSLNDQFRTDPGRVYARINQIVAEDPDNAHPKYKAASPTVEQSGGGKNMFEDIGEAEGFWRTLWEEQGSGDENAGWLKEIEEGIRQRVPPASQEEWDLETAVIAKVISKKRNWSAPGPDRVVNFWWKRAYAVHEDVKIIFKGISESLQAYPEWFAQGKSSLIPKPGEFSSENQRPITCLNTGYKWFTSCVLGSMDYHLDYYDLMEMQQRGAKAKCSGTTDNLMIDRMVTLDCHRHKRNLSVAWIDVRKAFDSVDHGWLKKILRINRFPTWICRVVDKLSDSWNTRIAVKTMKGHEVSPPINFNRGLPQGDALCPRLFTLCLNPVAWKLSSTEGYRLSKPVVGNNITNLLYVDDLKVFASSQAKLNRVLKMTEEAMGDIGLLWNPKKCNVLHVRRGVIDKTSQGFKAGQTAIDCLKDKQYCFLGAPEQLLQDQKLALETAARTYLQRLSVIWSSPLSDMNRVTASNQLALPVLTYLMWSQHWNLTDLRNIDREARKVISENGGKHPLGSTALLYLPRHQGGRGLRSVETEYKHTKIKSAIKLYQNKDPTMSLVRAFEERAADKGNQSLIKEASTFAEEMGISLELSHPNPRCLKEDGTEVPNIKNHLKQSSRQQLEDKIRGEKWQGKYLTNRWNDDDLNVQGCFGWLKEWPSAPTHTIAGMMELYEQMLPTRAYTTYKTRTNPSDDTLCRLCGKAVESLEHVLAGCLALAQSKYLDRHNAALKVLFFEMLRDLQLCEGVPPWYSPVAPKPLYESPDAQAFWDIPMFAEHNHVRSNRVDVRVIDHKQKKIYAIEMSCPWIDNRKKKEVEKTTKYAPFGGN

SEQ ID NO: 25413 - protein, 1222 aa, Montipora cactus
MGRQRKGPKIHWTEEMNNLVLQCREKALKLSNSEDPPRYENGRKIGYMRLMKDFWEELGMEHLELTSQNLRDQAAALDKSIGSVAGNIASRVGRRRRSAGGREGNEAEEEGNLERDNSQYANEQKIGANFHTENSENQTMRHEEFINTLTQGERELFEKSVQLYTLVNTREGDYSNREIDTRIKQKPTESDLKSINRVLKGLLEQKKTISLNNDPFAHFWLVNCVLYSVVAAFLLLKGWKKDPKDKLDKQRAYNGEKWKKNYLDEMGEIRKNISIASAEVNRVKENRKLSKRGRKNRALLQEECKSLSVTQLITYIEKQKFRLRKLKAAFGRKKRQEEAKSLNDQFRTDPGRVYARINQIVAEDPDNAHPKYKAASPTVEQSGGGKNMFEDIGEAEGFWRTLWEEQGSGDENAGWLKEIEEGIRQRVPPASQEEWDLETAVIAKVISKKRNWSAPGPDRVVNFWWKRAYAVHEDVKINFKGISESLQAYPEWFAQGKSSLIPKPGEFSSENQRPITCLNTGYKWFTSCVLGSMDYHLDYYDLMEMQQRGAKAKCSGTTDNLMIDRMVTLDCHRHKRNLSVAWIDVRKAFDSVDHGWLKKILRINRFPTWICRAVDNLSDSWNTRIAVKTMKGHEVSPPINFNRGLPQGDALCPRLFTLCLNPVAWKLSSTEGYRLSKPVVGNNTTNLLYVDDLKVFASSQAKLNRVLKMTEEAMGDIGLLWNPKKCNVLHVRRGVIDKTSQGFKAGQTAIDCLKDKQYCFLGAPEQLLQDQKLALETAARTYLQRLSVIWSSPLSDMNRVTASNQLALPVLTYLMWSQHWNLTDLRNIDREARKVISENGGKHPLGSTALLYLPRHQGGRGLRSVETEYKHTKIKSAIKLYQNKDPTMSLVRAFEERAADKGNQSLIKEASTFAEEMGISLELSHPNPRCLKEDGTEVPNIKNHLKQSSRQQLEDKIRGEKWQGKYLTNRWNDDDLNVQGCFGWLKEWPSAPTHTIAGMMELYEQMLPTRAYTTYKTRTNPSDDTLCRLCGKAVESLEHVLAGCLALAQSKYLARHNAALKVLFFEMLRDLQLCEGVPPWNSPVAPKPLYESPDAQAFWDIPMFAEHNHVRSNRVDVRVIDHKQKKIYAIEMSCPWIDNRKKKEVEKTTKYAPLRWELKQQSPTYTVKQFNIIIDVLGGWSQEVDLAMRELFGTRGGDVLLRMQKAVISHSLKIARTFKVLT

SEQ ID NO: 25414 - protein, 835 aa, Acropora tenuis
MFEDIGEAESFWRSLWEEQGSGDENAEWLKEIEEAIRQRVPPASQEEWDLETVVIAKVISKKRNWSAPGPDRVVNFWWKRARAVHEDVKISFKGISESLQAYPEWFAQGKSSLIPKPGEFSSENQRPITCLNTGYKWFTSCVLDPMDYHLDYYDLMEMQQRGAKAKCSGTTDNLMIDRMVTLDCHRHKRNLSVAWIDVRKAFDSVNHGWLKKILRINRFPTWICRVVDNLSDSWNTRIAVKTMKGYEVSPPINFNRGLPQGDALCPRLFTLCLNPVAWKLSSTEGYRLSKPVVGNNITNLLYVDDLKVFASSQAKLNRVLKMTEEAMGDIGLLWNPKKCNVLHARRGVIDKTSQGFKAGQTVIDCLKDKQYRFLGAPEQLLQDQKLALETAAKTYLQRLSVIWSSPLSDMNRVTASNQLALPVLTYLMWSQHWNLTDLRNIDREARKVISENGGKHPLGSTALLYLPRHQGGRGLRSVETEYKHTKIKSAIKLYQNKDPTMSLVRAFEERAVDKGNQSLIKEASTFAEEMGISLELSHPNPRCLKEDGTEVPNIKNHLKQSSRQQFEDKIRGEKWQGKYLTNRWNDDDLNVQGCFGWLKEWPSAPTHTIAGMMELYEQMLPTRVYTTYKTRTNPSDDTLCRLCGEAVESLEHVLAGCLALAQSKYLARHNAALKVLFFEMLRDLQLCEGVPPWYSPVAPKPLYESPDAQAFWDIPMFAEHNHVRSNRVDVRVIDHKQKRIYAIEMSCPWIDNRKKKEVEKTTKYAPLRWELKQQFPTYTVKQFNIIIDVLGGWSREVDLAMRELFGTRGGDVLLRMQKAVISHSLNIARTFKVLT

SEQ ID NO: 25415 - protein, 835 aa, Pachyseris speciosa
MFEDIGEAEGFWRTLWEEQGSGDENAGWLKEIEEGIRQRVPPASQEEWDLETAVIAKVISKKRNWSAPGPDRVVNFWWRRAYAVHEDVKIIFKGISESLQAYPEWFAQGKSRLIPKPGEFSSENQRPITCLNTGYKWFTSCVLGSMDYHLDYYDLMEMQQRGAKAKCSGTTDNLMIDRMVTLDCHRHKRNLSVAWIDVRKAFDSVDHGWLKKILRINRFPTWICRVVDNLSDSWNTRIAVKTMKGHEVSPPINFNRGLPQGDALCPRLFTLCLNPVAWKLSSTEGYRLSKPVVGNNITNLLYVDDLKVFASSQAKLNRVLKMTEEAMGDIGLLWNPKKCNVLHVRRGVIDKTSQGFKAGQTAIDCLKDKQYCFLGAPEQLLQDQKLALETAARTYLQRLSVIWSSPLSDMNRVTASNQLALPVLTYLMWSQHWNLTDLRNIDREARKVISENGGKHPLGSTALLYLPRHQGGRGLRSVETEYKHTKIKSAIKLYQNKDPTMSLVRAFEERAADKGNQSLIKEASTFAEEMGISLELSHPNPRCLKEDGTEVPNIKNHLKQSSRQQLEDKIRGEKWQGKYLTNRWNDDDLNVQGCFGWLKEWPSAPTHTIAGMMELYEQMLPTRAYTTYKTRTNPSDDTLCRLCGKAVESLEHVLAGCLALAQSKYLARHNAALKVLFFEMLRDLQLCEGVPPWYSPVAPKPLYESPDAQAFWDIPMFAEHNHVRSNRVDVRVIDHKQKKIYAIEMSCPWIDNRKKKEVEKTTKYAPLRWELKQQFPTYTVKQFNIIIDVLGGWSQEVDLAMRELFGTRGGDVLLRMQKAVISHSLKIARTFKVLT

SEQ ID NO: 25416 - protein, 980 aa, Acropora microphthalma
MCKDKRKQRSRRAFSLESKRLYVNNNNNNNNNNNNNNNNNNNKNRKLTKRGRKNRALLQEECKSLSVTQLITYIEKQKFRLRKSKAAFGRKKRQEEVKSLNDQFRTDPGWVYARINQIVSEDPDNAHPKYKAASPAVEQSGGGKNMFEDIGEAEAFWRSLWEEQGSGDENAEWLKEIEEVIRQRVPPASQEAWDLETVAVAKVISKKRNWSAPGPDRVVNFWWKRACAVHEDVKISFKGISESLQAYPEWFAQGKSSLIPKPGEFSSENQRPITCLNTGYKWFTSCVLDPMDYHLDYYDLMEMQQRGAKAKCSGTTDNLMIDRMVTLDCHRHKRNLSVAWIDVRKAFDSVDHGWLKKILRINRFPTWICRVVDNLSDSWNTRIAVKTTKGYEVSSPINFNRGLPQGDALCPRLFTLSLNPVAWKLSSTEGYRLSKPVVGNNITHLLYVDDLKVFASSQAKLNRVLKMTEEAMGDIGLLWNLKKCNVLHARRGVIDETSQGFKAGRTVIDCLKDKQYRFLGAPEQLLQDQKLALETAAKTYLQRLSVIWSSPLSDMNRVTASNQLALPVLTYLMWSQHWNLTDLRNIDREARKVISENGGKHPLGSTALLYLPRHQGGRGLRSVETEYKHTKIKSAIKLYQNKDPTMSLVRASEERAVDKGNQSLIKEASTFAEEMGISLELSHPNPRCLKEDGTEVPNIKNHLKQSSRQQLEDKIRGEKWQGKYLTNRWNDDDLNVQGCFGWLKEWPSAPTHTIAGMMELYEQMLPTRVYTTYKTRTNPSDDTLCRLCGEAVESLEHVLAGCLALAQSKYLARHNAALKVLFFEMLRDLQLCEGVPPWYSPVAPKPLYESPDAQAFWDIPMFAEHNHVRSNRVDVRVIDHKQKRIYAIEMSCPWIDNRKKKEVEKTTKYAPLRWELKQQFPTYTVKQFNIIIDVLGGWSREVDLAMRELFGTSGGDVLLRMQKAVISHSLNIARTFKVLT

SEQ ID NO: 25417 - protein, 1222 aa, Pachyseris speciosa
MGRQRKGPKIHWTEEMNNLVLQCREKALKLSNSEDPPRYENGRKIGYMRLMKDFWEELGMEHLELTSQNLRDQAAALDKSIGSVAENIASRVGRRRRSAGGREGNEAEEEGNLERDNSQYANEQKIGANFHTENSENQTMRHEEFINTLTQGERELFEKSVQLYTLVNTREGDYSNREIDTRIKQKPTQSDLKSINRVLKGLLEQKKTISLNNDPFAHFWLVNCVLYSVVAAFLLLKGWKKDPKDKLDKQRVYNGEKWKKNYLDEMGEIRKNISIASAEVNRVKENRKLTKRGRKNRALLQEECKSLSVTQLITYIEKQKFRLRKLKAAFGRKKRQEEAKSLNDQFRTDPGRVYARINQIVAEDPDNAHPKYKAASPTVEQSGGGKNMFEDIGEAEGFWRTLWEEQGSGDENAGWLKEIEEAIRQRVPPASQEEWDLETAVIAKVISKKRNWSAPGPDRVVNFWWKRAYAVHEDVKINFKGISESLQAYPEWFAQGKSSLIPKPGEFSSENQRPITCLNTGYKWFTSCVLGSMDYHLDYYDLMEMQQRGAKAKCSGTTDNLMIDRMVTLDCHRHKRNLSVAWIDVRKAFDSVDHGWLKKILRINRFPTWICRVVDNLSDSWNTRIAVKTMKGHEVSPPIKFNRGLPQWDALCPRLFTLCLNLVAWKLSSTEGYRLSKPVVGNNITNLLYVDDLKVFASSQAKLNRVLKMTEEAMGDIGLLWNPKKCNVLHVRRGVIDKTSQGFKAGQTAIDCLKDKQYCFLGAPEQLLQDQKLALETAARTYLQRLSVIWSSPLSDMNRVTASNQLALPVLTYLMWSQHWNLTDLRNIDREARKVISENGGKHPLGSTALLYLPRHQGGRGLRSVETEYKHTKIKSAIKLYQNKDPTMSLVRAFEERAADKGNQSLIKEASTFAEEMGISLELSHPNPRCLKEDGTEVPNIKNHLKQSSRQQLEDKIRGEKWQGKYLTNRWNDDDLNVQGCFGWLKEWPSAPTHTIAGMMELSEQMLPTRAYTTYKTRTNPSDDTLSRLCGKAVESLEHVLAGCLALAQSKYLARHNAALKVLFFEMLRDLQLCEGVPPWYSPVAPKPLYESPDAQAFWDIPMFAEHNHVRSNRVDVRVIDHKQKKIYAIEMSCPWIDNRKKKEVEKTTKYAPLRWELKQQFPTYTVKQFNIIIDVLGGWSQEVDLAMRELFGTRGGDVLLRMQKVVISHSLKIARTFKVLT

SEQ ID NO: 25418 - protein, 1222 aa, Montipora cactus
MGRQRKGPKIHWTGEMNNLVLQCREKALKLSNSEDPPRYENGRKIGYMRLMKDFWEELGMEHLELTSQNLRDQAAALDKSIGSVAGNIASRVGRRRRSAGGREGNEAEEEGNLGRDNSQYANEQKIGANFHTENSENQTMRHEEFINTLTQGERELFEKSVQLYTLVNTREGDYSNREIDTRIKQKPTQSDLKSINRVLKGLLEQKKTISLNNDPFVHFWLVNCVLYSVVAAFLLLKGWKKDPKDKLDKQRVYNGEKWKKNYLDEMGEIRKNISIASAEVNRVKENRKLTKRGRKNRALLQEECKSLSVTQLITYIEKQKFRLRKLKAAFGRKKRQEEAKSLNDQFRADPGRVYARINQIVAEDPDNAHPKYKAASPTVEQSGGGKNMFEDIGEAEGFWRTLWEEQGSGDENAGWLKEIEEGIRQRVPPASQEEWDLETAVIAKVISKKRNWSAPGPDRVVNFWWKRAYAVHEDVKINFKGISESLQAYPEWFAQGKSSLIPKPGEFSSENQRPITCLNTGYKWFTSCVLGSMDYHLDYYDLMEMQQRGAKAKCSGTTDNLMIDRMVTLDCHRHKRNLSVAWIDVRKAFDSVDHGWLKKILRINRFPTWICRVVDNLSDSWNTRIAVKTMKGHEVSPPINFNRGLPQGDALCPRLFTLCLNPVAWKLSSTEGYRLSKPVIGNNIANLLYVDDLKIFASSQAKLNRVLKMTEEAMGDIGLLWNPKKCNVLHVRRSVIDKTSQGFKAGQTAIDCLKDKQYCFLGAPEQLLQDQKLALETAARTYLQRLSVIWSSPLSDMNRVTASNQLALPVLTYLMWSQHWNLTDLRNIDREARKVISENGGKHPLGSTALLYLPRHQGGRGLRSVETEYKHTKIKSAIKLYQNKDPTMSLVRAFEERAADKGNQSLIKEASTFAKEMGISLELSHPNPRCLKEDGTEVPNIKNHLKQSSRQQLEDKIRGEKWQGKYLTNRWNDDDLNVQGCFGWLKEWPSAPTHTIAGMMELYEQMLPTRAYTTYKTRTNRSDDTLCRLCGKAVESLQHVLAGCSALAQSKYLARHNAALKVLFFEMLRDLQLCEGVPPWYSPVAPKPLYESPDAQAFWDIPMFAEHNHVRSNRVDVRVIDHKQKKIYAIEMSCPWIDNRKKKEVEKTTKYAPLRWELKQQFPTYTVKQFNIIIDVLGGWSQEVDLAMRELFGSRGGDVLLRMQKAVISHSLNIARTFKVLT

SEQ ID NO: 25419 - protein, 1219 aa, Astreopora myriophthalma
MGRQRKGPKIHWTEEMNNLVLQCREKAMKLSNSGDPPRYETGRKIGYMRLMKDFWEELGMEHLQLTSQNLRDQAAALDKSIGNVAGNIASRVGRRRRSAGGREGNEAEEERNLERDNSHYANEQQRIGANLHTENSENQTMPREEFINTLTQGERELFEKSVQRYTLVNTREGDYSNREIDTRIKQKPTQIDLESINRVLKGLLEQKKTISLNNDPFAHLWLINCVLYSVVVAFLFLKGWKKDPRDKLDKQRVYNGEKWKKNYLDEMGETRKNISIASAEVNRVKANRKLTKRGRKNRALLQEECKSLSVTQLITYIEKQKFRLRKLKAAFGRKKRQEEVKSLNDQFRTDPGRVYARINQIVAENPNNAHPKYKAASPTAEQSDGGKNMFEDIGEAGGFWRTLWEEQGSGDENAGWLKEIEEGIRQRVRPASQEEWDLETPVIAKVISKKRNWSAPGPDRVVNFWWKRACAVHEDVKISFKGISESSQAYPEWFAQGKSSLIPKPGEFSSENQRPNTCLNTVYKWFTSCVLGPMDDHLDYYDLMEMQQRGAKAKCSGTTDNLMIDRMVTLDCHRHKRNLSVAWIDVRKAFDSVDHGWLKKILRIHRFPTWICRVVDNLSDSWNTRIAVKTMKGYEVSPPINFNRGLPQGDALCPRLFTLCLNPVAWKLSSTEGYRLSKPVVGNNITNLLYVDDLKVFASSQVKLNRVLKMTEEAMGDIGLLWNPKKCNVLHVRRGVIDKASQGFKAGQTAIDCLKDKQYCFLGAPEQLLQDQKLALETAARTYLQRLSVIWSSPLTDMNRVTASNQLVLPVLTYLMWSQHWNLTDLRNIDREARKVISENGGKHQLGSTALLYLPRHQGGRGLRSVETEYKHTKIKSAIKLYQNKDPTMSLVRAFEERADDKGNQSLIKEASTFAEEMGISLELSHPNPRCLKEDGTEVPNIKNHLKQSSRQQLEDKIRGEKWQGKYLTNRWNDDDLNVQGCFGWLKEWPSAPTHTIAGMMELYEQMLPTKAYTTYKTRTNPSDDSLCRLCGKAVESLEHVLAGCSALAQSKYLARHNAALKVLFFEMLRDLQLCEGVPPWYSPVAPKPLYESPDAQAFWDIPMFAEHNYVRSNRVDVRVIDHKQKRIYAIEMSCPWIDNRKKKEEEKTTKYAPLRWELKQQFPTYTVKQFNIIIDVLGGWSQEVDLAMRELFGTRGGDVLLRFSEGGHLSLSKHCAHF

SEQ ID NO: 25420 - protein, 957 aa, Acropora nasuta
MGEIRKKISIASAEVNRVKENRKLTKRGRKNRALLQEECKSLSVTQLITYIEKQKFRLRKSKAAFGRKKRQEEVKSLNDQFRTDPGWVYARINQIVSEDPDNAHPKYKAASPAVEQSGGGKNMFEDIGEAEAFWRSLWEEQGSGDENAEWLKEIEEVIRQRVPPASQEAWDLETVAVAKVISKKRNWSAPGPDRVVNFWWKRACAVHEDVKISFKGISESLQAYPEWFAQGKSSLIPKPGDFSSENQRPITCLNTGYKWFTSCVLDPMDYHLDYYDLMEMQQRGAKAKCSGTTDNLMIDRMVTLDCHRHKRNLSVAWIDVRKAFDSVDHGWLKKILRINRFPTWICRVVDNLSDSWNTRIAVKTTKGYEVSSPINFNRGLPQGDALCPRLFTLSLNPVAWKLSSTEGYRLSKPVVGNNITHLLYVDDLKVFASSQAKLNRVLKMTEEAMGDIGLLWNLKKCNVLHARRGVIDETSQGFKAGRTVIDCLKDKQYRFLGAPEQLLQDQKLALETAAKTYLQRLSVIWSSPLSDMNRVTASNQLALPVLTYLMWSQHWNLTDLRNIDREARKVISENGGKHPLGSTALLYLPRHQGGRGLRSVETEYKHTKIKSAIKLYQNKDPTMSLVRASEERAVDKGNQSLIKEASTFAEEMGISLELSHPNPRCLKEDGTEVPNIKNHLKQSSRQQLEDKIRGEKWQGKYLTNRWNDDDLNVQGCFGWLKEWPSAPTHTIAGMMELYEQMLPTRVYTTYKTRTNPSDDTLCRLCGEAVESLEHVLAGCLALAQSKYLARHNAALKVLFFEMLRDLQLCEGVPPWYSPVAPKPLYESPDAQAFWDIPMFAEHNHVRSNRVDVRVIDHKQKRIYAIEMSCPWIDNRKKKEVEKTTKYAPLRWELKQQFPTYTVKQFNIIIDVLGGWSREVDLAMRELFGTRGGDVLLRMQKAVISHSLNIARTFKVLT

SEQ ID NO: 25421 - protein, 1222 aa, Pachyseris speciosa
MGRQRKGPKIHWTEEMNNLVLQCREKALKLSNSEDPPRYENGRKIGYMRLMKDFWEELGMEHLELTSQNLRDQAAALDKSIGSVAENIASRVGRRRRSAGGREGNEAEEEGNLERDNSQYANEQKIGANFHTENSENQTMRHEEFINTLTQGERELFEKSVQLYTLVNTREGDYSNREIDTRIKQKPTQSDLKSINRVLKGLLEQKKTISLNNDPFAHFWLVNCVLYSVVAAFLLLKGWKKDPKDKLDKQRVYNGEKWKKNYLDEMGEIRKNISIASAEVNRVKENRKLTKRGRKNRALLQEECKSLSVTQLITYIEKQKFWLRKLKAAFGRKKRQEEAKSLNDQFRTDPGRVYARINQIVAEDPDNAHPKYKAASPTVEQSGGGKNMFEDIGEAEGFWRTLWEEQGSGDENAGWLKEIEEGIRQRVPAASQEEWDLETAVIAKVISKKRNWSAPGPDRVVNFWWKRAYAVHEDVKINFKGISESLQAYPEWFAQGKSSLIPKPGEFSSENQRPITCLNTGYKWFTSCVLGSMDYHLDYYDLMEMQQRGAKAKCSGTTDNLMIDRMVTLDCHRHKRNLSVAWIDVRKAFDSVDHGWLKKILRINRFPTWICRVVDNLSDSWNTRIAVKTMKGHEVSPPINFNRGLPQGDALCPRLFTLCLNPVAWKLSSTEGYRLSKPVVGNNITNLLYVDDLKVFASSQAKLNRVLKMTEEAMGDIGLSWNPKKCNVLHVRRGVIDKTSQGFKAGQTAIDCLKDKQYCFLGAPEQLLQDQKLALETAARTYLQRLSVIWSSPLSDMNRVTASNQLALPVLTYLMWSQHWNLTDLRNIDREARKVISENGGKHPLGSTALLYLPRHQGGRGLRSVETEYKHTKIKSAIKLYQNKDPTMSLVRAFEERAADKGNQSLIKEASTFAEEMGISLELSHPNPRCLKEDGTEVPNIKNHLKQSSRQQLEDKIRGEKWQGKYLTNRWNDDDLNVQGCFGWLKEWPSAPTHTIAGMMELYEQMLPTRAYTTYKTRTNPSDDTLCRLCGKAVESLEHVLAGCLALAQSKYLARHNAALKVLFFEMLRDLQLCEGVPPWYSPVAPKPLYESPDAQAFWDIPMFAEHNHVRSNRVDVRVIDHNQKKIYAIEMSCPWIDNRKKKEVEKTTKYAPLRWELKQQFPTYTVKQFNIIIDVLGGWSQEVDLAMRELFGTRGGDVLLRMQKAVISHSLKIARTFKVLT

SEQ ID NO: 25422 - protein, 952 aa, Acropora tenuis
MLIINNNNNNNNNNNNNNNNKRGRKNRGLLQEECKSLSVTKLITYIEKQKFRLRKLKAAFGRKKRQEEVKSLNAQFRTDPGWVYARINQIVAEDPDNAHPKYKAASPAVEQSGGGKNMFEDIGEAESFWRSLWEEQGSGDENAEWLKEIEEAIRQRVPPASQEEWDLETVVIAKVISKKRNWSAPGPDRVVNFWWKRARAVHEDVKISFKGISESLQAYPEWFAQGKSSLIPKPGEFSSENQRPITCLNTCYKWFTSCVLDPMDYHLDYYDLMEMQQRGAKAKCSGTTDNLMIDRMVTLDCHRHKRNLSVAWIDVRKAFDSVNHGWLKKILRINRFPTWICRVVDNLSDSWNTRIAVKTMKGYEVSPPINFNRGLPQGDALCPRLFTLCLNPVAWKLSSTEGYRLSKPVVGNNITNLLYVDDLKVFASSQAKLNRVLKMTEEAMGDIGLLWNPKKCNVLHARRGVIDKTSQDFKAGQTVIDCLKDKQYRFLGAPEQLLQDQKLALETAAKTYLQRLSVIWSSPLSDMNRVTASNQLALPVLTYLMWSQHWNLTDLRNIDREARKVISENGGKHPLGSTALLYLPRNQGGRGLRSVETEYKHTKIKSAIKLYQNKDPTMSLVRAFEERAVDKGNQSLIKEASTFAEEMGISLELSHPNPRCLKEDGTEVPNIKNHLKQSSRQQFEDKIRGEKWQGKYLTNRWNDDDLNVQGCFGWLKEWPSAPTHTIAGMMELYEQMLPTRVYTTYKTRTNPSDDTLCRLCGEAVESLEHVLAGCLALAQSKYLARHNAALKVLFFEMLRDLQLCEGVPPWYSPVAPKPLYESPDAQAFWDIPMFAEHNHVRSNRVDVRVIDHKQKRIYAIEMSCPWIDNRKKKEVEKTTKYAPLRWELKQQFPTYTVKQFNIIIDVLGGWSREVDLAMRELFGTRGGDVLLRMQKAVISHSLNIARTFKVLT

SEQ ID NO: 25423 - protein, 1057 aa, Pachyseris speciosa
MIIIIIIILIIIIIIIIMLYANEQKIGANFHTENSENQTMRHEELINTLTQGERELFEKSVQLYTLVNTREGDYSNREIDTRIKQKPTQSDLKSFNRVLKGLLEQKKTISLNNDPFAHFWLVNCVLYSVVAAFLLLKGWKKDPKDKLDKQRVYNGEKWKKNYLDEMCEIRKNISIASAEVNRVKENRKLTKRGRKNRALLQEECKSLSVTQLITYIEKQKFRLRKLKAAFGRKKRQEEAKSLNDQFRTDPGRVYARINQIVAEDPDNAHPKYKAASPTVEQSGGGKNMFEDIGEAEGFWRTLWEEQGSGDENAGWLKEIEEGIRQRVPPASQEEWDLETAVIAKVISKKRNWSAPGPDRVVNFWWKRAYAVHEDVKIIFKGISESLQAYPEWFAQGKSSLIPKPGEFSSENQRPITCLNTGYKWFTSCVLGSMDYHLDYYDLMEMQQRGAKAKCSGTTDNLMIDRMVTLDCHRHKRNLSVAWIDVRKAFDSVDHGWLKKILRINRFPTWICRVVDNLSDSWNTRIAVKTMKGHEVSPPINFNRGLPQGDALCPRLFTLCLNPVAWKLSSTEGYRLSKPVVGNNITNLLYVDDLKVFASSQAKLNRVLKMTEEAMGDIGLLWNPKKCNVLHVRRGVIDKTSQGFKAGQTAIDCLKDKQYCFLGAPEQLLQDQKLALETAARTYLQRLSVIWSSPLSDMNRVTASNQLALPVLTYLMWSQHWNLTDLRNIDREARKVISENGGKHPLGSTALLYLPRHQGGRGLRSVETEYKHTKIKSAIKLYQNKDPTMSLVRAFEERAADKGNQSLIKEASTFAEELGISLELSHPNPRCLKEDGTEVPNIKNHLKQSSRQQLEDKIRGEKWQGKYLTNRWNDDDLNVQGCFGWLKEWPSAPTHTIAGMMELYEQMLPTRAYTTYKTRTNPSDDTLCRSCGKAVESLEHVLAGCLALAQSKYLARHNAALKVLFFEMLRDLQLCEGVPPWYSPVAPKPLYESPDAQAFWDIPMFAEHNHVRSNRVDVRVIDHKQKKIYAIEMSCPWIDNRKKKEVEKTTKYAPFGGN

SEQ ID NO: 25424 - protein, 835 aa, Montipora efflorescens
MFEDIGEAEGFWRTLWEEQGSGDENAGWLKEIEEGIRQRVPPVSQEEWDLETVVIAKVISKKRNWSAPGPNRMVNFWWKRACAVHEDVKISFKGISESLQAYPEWFAQGKSSLIPKPGEFSSENQRPITCLNTGYKWFTSCVLGPMDYHLDYYDLMETQQRGAKAKCSGTTNNLMIDRMVTLDCHRHKHNLSVAWIDVRKAFDSVDHGWLKKILRINRFPTWICRVVDNLSDSWNTRIAVKTMKGYEVSPPINFNRGLPQGDALCPRLFTLCLNPVAWKLSSTEGYCLSKPVVGNNITNLLYVDDLKVFASSQAKLNRVLKMTEEAMGDIGLLWNPKKCNVLHVRRGVIDKTSQGFKAGQTAIDCLKDKQYCFLGAPEQLLQDQKLALETAARTYLQRLSVIWSSPLSDMNRVTASNQLAPPVLTYLMWSQHWNLTDLCNIDREARTVISENGGKHPLGSTALLYLPRHQGGRGLRSVETEYKHTKIKSAIKLYQNKDATVSLVRVFEERAADKGNQSLIKEASTFAEEMGISLELSHPNPRCLKEDGTEVPNIKNHLKQISRQQLEDKIGGEKWQGKYLTNRWNDEDLNMQGCFDWLKEWPSAPTHTIAGMMELYEQMLPTRAYTTYKTRTNPSDGSLCRLCGKAVESLEHVLAGCLALAQSKYLARHNPAVKVLFFEMLRDLQLCEGVPPWYSPVAPKPLYESPDAQAFWDIPMFAEHNHVRSNRVDVRVIDHKQKRIYAIEMSCPWIDNRKKKEVEKTTKYAPLRWELKQQFPTYTVKQFNIIIDVLGGWSQEVDLAMRELFGTRGGDVLLRMQKAVISHSLNIARTFKVLT

SEQ ID NO: 25425 - protein, 835 aa, Pachyseris speciosa
MFEDIGEAEGFWRTLWEEQGSGDENAGWLKEIEEGIRQRVPPASQEEWDLETAVIAKVISKKRNWSAPGPDRVVNFWWKRAYAVHEDVKINFKGISESLQAYPEWFAQGKSSLIPKPGEFSSENQRPITCLNTGYKWFTSCVLGSMDYHLDYYDLMEMQQRGAKAKCSGTTDNLMIDRMVTLDCHRHKRNLSVAWIDVRKAFDSVDHGWLKKTLRINRFPTWICRVVDNLSDSWNTRIAVKTMKGHEVSPPINFNRGLPQGDALCPRLFTLCLNPVAWKLSSTEGYRLSKPVVGNNITNLLYVDDLKVFASSQAKLNRVLKMTEEAMGDIGLLWNPKKCNVLHVRRGVIDKTSQGFKAGQTAIDCLKDKQYCFLGAPEQLLQDQKLALETAARTYLQRLSVIWSSPLSDMNRVTASNQLALPVLTYLMWSQHWNLTDLRNIDREARKVISENGGKHPLGSTALLYLPRHQGGRGLRSVETEYKHTKIKSAIKLYQNKDPTMSLVRAFEERAADKGNQSLIKEASTFAEEMGISLELSHPNPRCLKEDGTEVPNIKNHLKQSSRQQLEDKIRGEKWQGKYLTNRWNDDDLNVQGCFGWLKEWPSAPTHTIAGMMELYEQMLPTRAYTTYKTRTNPSDDTLCRLCGKAVESLEHVLAGCLALAQSKYLARHNAALKVLFFEMLRDLQLCEGVPPWYSPVAPRPLYESPDAQAFWDIPMFAEHNHVRSNRVDVRVIDHKQKKIYAIEMSCPWIDNRKKKEVEKTTKYAPLRWELKQQFPTYTVKQFNIIIDVLGGWSQEVDLAMRELFGTRGGDVLLRMQKAVISHSLKIARTFKVLT

SEQ ID NO: 25426 - protein, 1222 aa, Pachyseris speciosa
MGRQRKGPKIHWTEEMNNLVLQCREKALKLSNSEDPPRHENGRKIGYMRLMKDFWEELGMEHLELTSQNLRDQAAALDKSIGSVAENIASRVGRRRRSAGGREGNEAEEEGNLERDNSQYANEQKIGANFHTENSENQTMRHEEFINTLTQGERELFEKSVQLYTLVNTREGDYSNREIDTRIKQKPTQSDLKSINRVLKGLLEQKKTISLNNDPFAHFWLVNCVLYSVVAAFLLLKGWKKDPKDKLDNQRVYNGEKWKKNYLDEMGEIRKNISIASAEVNRVKENRKLTKRGRKNRALLQEECKSLSVTQLITYIEKQKFRLRKLKAAFGRKKRQEEAKSLNDQFRTDPGRVYARINQIVAEDPDNAHPKYKAASPTVEQSGGGKNMFEDIGEAEGFWRTLWEEQGSGDENAGWLKEIEEGIRQRVPPASQEEWDLETAVIAKVISKKRNWSAPGPDRVVNFWWKRAYAVHEDVKIIFKGISESLQAYPEWFAQGKSSLIPKPGEFSSENQRPITCLNTGYKWFTSCVLGSMDYHLDYYDLMEMQQRGAKAKCSGTTDNLMIDRMVTLDCHRHKRNLSVAWIDVRKAFDSVDHGWLKKILRINRFPTWICRVVDNLSDSWNTRIAVKTMKGHEVSPPINFNRGLPQGDALCPRLFTLCLNPVAWKLSSTEGYRLSKPVVGNNITNLLYVDDLKVFASSQAKLNRVLKMTEEAMGDIGLLWNPKKCNVLHVRRGVIDKTSQGFKAGQTAIDCLKDKQYCFLGAPEQLLQDQKLALETAARTYLQRLSVIWSSPLSDMNRVTASNQLALPVLTYLMWSQHWNLTDLRNIDREARKVISENGGKHPLGSTALLYLPRHQGGRGLRSVETEYKHTKIKSAIKLYQNKDPTMSLVRAFEERAADKGNQSLIKEASTFAEEIGISLELSHPNPRCLKEDGTEVPNIKNHLKQSSRQQLEDKIRGEKWQGKYLTNRWNDDDLNVQGCFGWLKEWPSAPTHTIAGMMELYEQMLPTRAYTTYKTRTNPSDDTLCRLCGKAVESLEHVLAGCLALAQSKYLARHNAALKVLFFEMLRDLQLCEGVPPWYSPVAPKPLYESPDAQAFWDIPMFAEHNHVRSNRVDVRVIDHKQKKIYAIEMSCPWIDNRKKKEVEKTTKYAPLRWELKQQFPTYTVKQFNIIIDVLGGWSQEVDLAMRELFGTRGGDVLLRMQKAVISHSLKIARTFKVLT

SEQ ID NO: 25427 - protein, 957 aa, Pachyseris speciosa
MGEIRKNISIASAEVNRVKENRKLTKRGRKNRALLQEECKSLSVTQLITYIEKQKFRLRKLKAAFGRKKRQEEAKSLNDQFRTDPGRVYARINQIVAEDPDNAHPKYKAASPTVEQSGGGKNMFEDIGEAEGFWRTLWEEQGSGDENAGWLKEIEEGIRQRVPPASQEEWDLETAVIAKVISKKRNWSAPGPDRVVNFWWKRAYAVHEDVKIIFKGISESLQAYPEWFAQGKSSLIPKPGEFSSENQRPITCLNTGYKWFTSCVLGSMDYHLDYYDLMEMQQRGAKAKCSGTTDNLMIDRMVTLDCHRHKRNLSVTWIDVRKAFDSVDHGWLKKILRINRFPTWICRVVDNLSDSWNTRIAVKTMKGHEVSPPINFNRGLPQGDALCPRLFTLCLNPVAWKLSSTEGYRLSKPVVGNNITNLLYVDDLKVFASSQAKLNRVLKMTEETMGDIGLLWNPKKCNVLHVRRGVIDKTSQGFKAGQTAIDCLKDKQYCFLGAPEQLLQDQKLALETAARTYLQRLSVIWSSPLSDMNRVTASNQLALPVLTYLMWSQHWNLTDLRNIDREARKVISENGGKHPLGSTALLYLPRHQGGRGLRSVETEYKHTKIKSAIKLYQNKDPTMSLVRAFEERAADKGNQSLIKEASTFAEEMGISLELSHPNPRCLKEDGTEVPNIKNHLKQSSRQQLEDKIRGEKWQGKYLTNRWNDDDLNVQGCFGWLKEWPSAPTHTIAGMMELYEQMLPTRAYTTYKTRTNPSDDTLCRLCGKAVESLEHVLAGCLALAQSKYLDRHNAALKVLFFEMLRDLQLCEGVPPWYSPVAPKPLYESPDAQAFWDIPMFAEHNHVRSNRVDVRVIDHKQKKIYAIEMSCPWIDNRKKKEVEKTTKYAPLRWELKQQFPTYTVKQFNIIIDVLGGWSQEVDLAMRELFGTRGGDVLLRMQKAVISHSLKIARTFKVLT

SEQ ID NO: 25428 - protein, 1110 aa, Pachyseris speciosa
MRLMKDFWEELGMEHLELTSQNLRDQAAALDKSIGSVAENIASRVGRRRRSAGGREGNEAEEEGNLERDNSQYANEQKIGANFHTENSENQTMRHEEFINTLTQGERELFEKSVQLYTLVNTREGDYSNREIDTRIKQKPTQSDLKSINRVLKGLLEQKKTISLNNDPFAHFWLVNCVLYSVVAAFLLLKGWKKDPKDKLDKQRVYNGEKWKKNYLDDMGEIRKNISIASAEVNRVKENRKLTKRGRKNRALLQEECKSLSVTQLITYIEKQKFRLRKLKAAFGRKKRQEEAKSLNDQFRTDPGRVYARINQIVAEDPDNAHPKYKAASPTVEQSGGGKNMFEDIGEAEGFWRTLWEEQGSGDENAGWLKEIEEGIRQRVPPASQEEWDLETAVIAKVISKKRNWSAPGPDRVVNFWWKRAYAVHEDVKIIFKGISESLQAYPEWFAQGKSSLIPKPGEFSSENQRPITCLNTGYKWFTSCVLGSMDYHLDYYDLMEMQQRGAKAKCSGTTDNLMIDRMVTLDCHRHKRNLSVAWIDVRKAFDSVDHGWLKKILRINRFPTWICRVVDNLSDSWNTRIAVKTMKGHEVSPPINFNRGLPQGDALCPRLFTLCLNPVAWKLSSTEGYRLSKPVVGNNITNLLYVDDLKVFASSQAKLNRVLKMTEEAMGDIGLLWNPKKCNVLHVRRGVIDKTSQGFKAGQTAIDCLKDKQYCFLGAPEQLLQDQKLALETAARTYLQRLSVIWSSPLSDMNRVTASNQLALPVLTYLMWSQHWNLTDLRNIDREARKVISENGGKHPLGSTALLYLPRHQGGRGLRSVETEYKHTKIKSAIKLYQNKDPTMSLVRAFEERAADKGNQSLIKEASTFAEEMGISLELSHPNPRCLKEDGTEVPNIKNHLKQSSRQQLEDKIRGEKWQGKYLTNRWNDDDLNVQGCFGWLKEWPSAPTHTIAGMMELYEQMLPTRAYTTYKTRTNPSDDTLCRLCGKAVESLEHVLAGCLALAQSKYLARHNAALKVLFFEMLRDLQLCEGVPPWYSPVAPKPLYESPDAQAFWDIPMFAEHNHVRSNRVDVRVIDHKQKKIYAIEMSCPWIDNRKKKEVEKTTKYAPFGGN

SEQ ID NO: 25429 - protein, 1083 aa, Montipora cactus
MPHEEFINTLTQGERELFEKSVQLYTLVNTREGDYSNREIDTRIKQKPTQSDLKSINRVLKGLLEQKKTISLNNDPFAHFWLVNCVLYSVVAAFLLLKGWKKDPKDKLDKQRVYNGEKWKKNYLDEMGEIRKNISIASAEVNRVKENRKLTKRGRKNRALLQEECKSLSVTQLITYIEKQKFRLRKLKAAFGRKKRQEEAKSLNDQFRTDPGRVYARINQIVAEDPDNAHPKYKAASPTVEQSGGGKNMFEDIGEAEGFWRTLWEEQGSGDENAGWLKEIEEGIRQRVPPASQEEWDLETAVIAKVISKKRNWSAPGPDRVVNFWWKRAYAVHEDVKINFKGISESLQAYPEWFAQGKSSLIPKPGEFSSENQRPITCLNTGYKWFTSCVLGSMDYHLDYYDLMEMQQRGAKAKCSGTTDNLMIDRMVTLDCHRHKRNLSVAWIDVRKAFDSVDHGWLKKILRINRFPTWICRVVDNLSDSWNTRIAVKTMKGHEVSPPINFNRGLPQGDALCPRLFTLCLNPVAWKLSSTEGYRLSKPVVGNNITNLLYVDDLKVFASSQAKLNRVLKMTEEAMGDIGLLWNPKKCNVLHVRRGVIDKTSQGFKAGQTAIDCLKDKQYCFLGAPEQLLQDQKLALETAARTYLQRLSVIWSSPLSDMNRVTASNQLALPVLTYLMWSQHWNLTDLRNIDREARKVISENGGKHPLGSTALLYLPRHQGGRGLRSVETEYKHTKIKSAIKLYQNKDPTMSLVRAFEERAADKGNQSLIKEASTFAEEMGISLELSHPNPRCLKEDGTEVPNIKNHLKQSSRQQLEDKIRGEKWQGKYLTNRWNDDDLNVQGCFGWLKEWPSAPTHTIAGMMELYEQMLPTRAYTTYKTRTNPSDDTLCRLCGKAVESLEHVLAGCLALAQSKYLARHNAALKVLFFEMLRDLQLCEGVPPWYSPVAPKPLYESPDAQAFWDIPMFAEHNHVRSNRVDVRVIDHKQKKIYAIEMSCPWIDNRKKKEVEKTTKYAPLRWELKQQFPTYTVKQFNIIIDVLGGWSQEVDLAMRELFGNRGGDVLLRMQKAVISHSLNIARTFKVLT

SEQ ID NO: 25430 - protein, 1002 aa, Montipora capitata
MTLSRICGWLTVFFTLSLWKKDPKDKLDKQCVYDGEKWKKNYLDEMGEIRKNISIASAEINRVKENRKLTKRGRKNRALLQEKCKSLSVTQLITYIEKQKFRLRKLKAAFGRKKRQEEAKSLNDQFRTDPGRVYARINQIVAEDPDNAHPKYKAASPTVEQSDGGKNMFEDIGEAEGFWRTLWEGQGSGDENAGWLKEIEEGIRQRVPQASQEEWDLETVVIAKVISKKRNWSAPGPDRVVNFWWKRACAVHEDVKISFKGISESLQAYPEWFAQGKSSLIPKSGEFSSENQRPITCLNTGYKWFTSCVLGPMDYHLDYYDLMEMQQRGAKAKCSGTTDNLMIDRMVTLDCHRHKRNLSVAWIDVRKAFDSVDHGWLKKILRINRFPTWICRVVDNLSDSWNTRIAVKTMKGYELSPPINFNRGLPQGDALCPRLFTLCLNPVAWKLSSTEGYRLSKPVVGNNITNLLYVDDLKVFASSQAKLNRVLKMTEEAMGDIGLLWNPKKCNVLHVRRGVIDKTSQGFKAGQTTIDCLKDKQYCFLGAPEQLLQDQKLALETAARTYLQRLSVIWSSPLSDMNRVTASNQLALPVLTYLMWSQHWNLTDLRNIDREARKVISENGGKHPLGSTALLYLPRHQGGRGLRSVETEYKHTKIKSAIKLYQNKDPTMSLVRAFEERAADKGNQSLIKEASTFAEEMGISLELSHPNPRCLKEDGSQVPNIKNHLKQSSRQQLEDKIRGEKWQGKYLTNRWNDDDLNVQGSFGWLKEWSSAPTHTIAGMMELYEQMLPTRAYTTYKTRTNPSDDTLCRLCGKAVESLEHVLAGCSALAQSKYLARHNAALNVLFFELLRDLQLCEGVPPWYFPVAPKPLYESPDAQAFWDIPMFAEYNHVRSNRVDVRVIDHKQKRIYAIEMSCPWIDNRKTKEVEKTTKYAPLRWELKQQFPTYTVKQFNIIIDVLGGWSQEVDLAMRELFGTRGGDVLLRMQKAVISHSLNIARTFKVLT

SEQ ID NO: 25431 - protein, 1069 aa, Montipora efflorescens
MPHEEFINTLTQGERELFEKSVQLYTLVNTREGDYSNREIDTRIKQKPTQSDLKSINRVLKGLLEQKKTISRNNDPFAHFWLVNCVLYSVVAAFLLLKGWKKDPKDKLDKQRVYNGEKWKKNYLDEMGEIRKNISIASAEVNRVKENRKLTKRGRKNRALLQEECKSLSVTQLITYIEKQKFRLRKLKAAFGRKKRQEEAKSLNDQFRTDPGRVYARINQIVAEDPDNAHPKYKAASPTVEQSGGGKNMFEDIGEAEGFWRTLWEEQGSGDENAGWLKEIEEGIRQRVPPASQEEWDLETAVIAKVISKKRNWSAPGPDRVVKINFKGISESLQAYPEWFAQGKSSLIPKPGEFSSENQRPITCLNTGYKWFTSCVLGSMDYHLDYYDLMEMQQRGAKAKCSGTTDNLMIDRMVTLDCHRHKRNLSVAWIDVRKAFDSVDHGWLKKILRINRFPTWICRVVDNLSDSWNTRIAVKTMKGHEVSPPINFNRGLPQGDALCPRLFTLCLNPVAWKLSSTEGYRLSKPVVGNNITNLLYVDDLKVFASSQAKLNRVLKMTEEAMGDIGLLWNPKKCNVLHVRRGVIDKTSQGFKAGQTAIDCLKDKQYCFLGAPEQLLQDQKLALETAARTYLQRLSVIWSSPLSDMNRVTASNQLALPVLTYLMWSQHWNLTDLRNIDREARKVISENGGKHPLGSTALLYLPRHQGGRGLRSVETEYKHTKIKSAIKLYQNKDPTMSLVRAFEERAADKGNQSLIKEASTFAEEMGISLELSHPNPRCLKEDGTEVPNIKNHLKQSSRQQLEDKIRGEKWQGKYLTNRWNDDDLNVQGCFGWLKEWPSAPTHTIAGMMELYEQMLPTRAYTTYKTRTNPSDDTLCRLCGKAVESLEHVLAGCLALAQSKYLARHNAALKVLFFEMLRDLQLCEGVPPWYSPVAPKPLYESPDAQAFWDIPMFAEHNHVRSNRVDVRVIDHKQKKIYAIEMSCPWIDNRKKKEVEKTTKYAPLRWELKQQFPTYTVKQFNIIIDVLGGWSQEVDLAMRELFGTRGGDVLLRMQKAVISHSLNIARTFKVLT

SEQ ID NO: 25432 - protein, 1174 aa, Pachyseris speciosa
MLTTKLLNTSWLSITGLIKLEFPSNSVLNCLNNNNNNNNNNNNNNNNNNNKGGREGNEAEEEGNLERDNSQYANEQKIGANFHTENSENQTMRHEEFINTLTQGERELFEKSVQLYTLVNTREGDYSNREIDTRIKQKPTQSDLKSINRVLKGLLEQKKTISLNNDPFAHFWLVNCVLYSVVAAFLLLKGWKKDPKDKLDKQRVYNGEKWKKNYLDEMGEIRKNISIASAEVNRVKENRKLTKRGRKNRALLQEECKSLSVTQLITYIEKQKFRLRKLKAAFGRKKRQEEAKSLNDQFRTDPGRVYARINQIVAEDPNNAHPKYKAASPTVEQSGGGKNMFEDIGEAEGFWRTLWEEQGSGDENAGWLKEIEEGIRQRVPPASQEEWDLETAVIAKVISKKRNWSAPGPDRVVNFWWKRAYAVHEDVKIIFKGISESLQAYPEWFAQGKSSLIPKPGEFSSENQRPITCLNTGYKWFTSCVLGSMDYHLDYYDLMEMQQRGAKAKCSGTTDNLMIDRMVTLDCHRHKRNLSVAWIDVRKAFDSVDHGWLKKILRINRFPTWICRVVDNLSDSWNTRIAVKTMKGHEVSPPINFNRGLPQGDALCPRLFTLCLNPVAWKLSSTEGYRLSKPVVGNNITNLLYVDDLKVFASSQAKLNRVLKMTEEAMGDIGLLWNPKKCNVLHVRRGVIDKTSQGFKAGQTAIDCLKDKQYCFLGAPEQLLQDQKLALETAARTYLQRLSVIWSSPLSDMNRVTASNQLALPVLTYLMWSQHWNLTDLRNIDREARKVISENGGKHPLGSTALLYLPRHQGGRGLRSVETEYKHTKIKSAIKLYQNKDPTMSLVRAFEERAADKGNQSLIKEASTFAEEMGISLELSHPNPRCLKEDGTEVPNIKNHLKQSSRQQLEDKIRGEKWQGKYLTNRWNDDNLNVQGCFGWLKEWPSAPTHTIAGMMELYEQMLPTRAYTTNKTRTNPSDDTLCRLCGKAVESLEHVLAGCLALAQSKYLARHNAALKVLFFEMLRDLQLCEGVPPWYSPVALKPLYESPDAQAFWDIPMFAEHNHVRSNRVDVRVIDHKQKKIYAIEMSCPWIDNRKKKEVEKTTKYAPLRWELKQQFPTYTVKQFNIIIDVLGGWSQEVDLAMRELFGTRGGDVLLRMQKAVISHSLKIARTFKVLT

SEQ ID NO: 25433 - protein, 1175 aa, Montipora efflorescens
MRLMKDFWEELGIEHLELTSQNLRDQAAALDKSIGSVAGNIASRVGRRRRSAGGQEGNEAEEEGNLERDNSQYANEQKIGANFHTENSENQTMRHEEFINTLTQGERELFEKSVQLYTLVNTREGDYSNREIDTRIKQKPTQSDLKSINRVLKGLLEQKKTISLNNDPFAHFWLVNCVLYAVVAAFLLLKGWKKDPKDKLDKQRVYNGEKWKKNYLDEMGEIRKNISIASSEVNRVKENRKLTKRGRKNRALLQEECNSLSVTQLITYIEKQKFRLRKLKAAFGRKKRQEEAKSLNDQFRTDPGRVYARINQIVAEDPDNAHPKYKAASPTVEQSGGGKNMFEDIGEAEGFWRTLWEEQGSGDENAGWLKEIEEGIRQRVPPASQEEWDLETAVIAKVISKKRNWSAPGPDRVVNFWWKRAYAVHEDVKINFKCISESLQAYPEWFAQGKSSLIPKPGEFSSENQRPITCLNTGYKWFTSCVLGSMDYHLDYYDLMEMQQRGAKAKCSGTTDNLMIDRMVTLDCHRHKRNLSVAWIDVRKAFDSVDRGWLKKILRINRFPTWICRVVDNLSDSWNTRIAVKTMKGHEVSPPINFNRGLPQGDALCPRLFTLCLNPVAWKLSSTEGYRLSKPVVGNNITNLLYVDDLKIFASSQAKLNRVLKMTEEAMGDIGLLWNPKKCNVLHVRRGVIDKTSQGFKAGQTAIDCLKDKQYCFLGAPEQLLQDQKLALETAARTYLQRLSVIWSSPLSDMNRVTASNQLALLVLTYLMWSQHWNLTDLRNTDREARKVISENGGKHPLGSTALLYQPRHQGGRGLRSVETEYKHTKIKSAIKLYQNKDPTMSLVRAFEERAADKGNQSLIKEASTFAEEMGISLELSHPNPRCLKEDGTEVPNIKNHLKQSSRQQLEDKIRGEKWQGKYLTNRWNDDDLNVQGCFGWLKEWPSAPTHTIAGMMELYEQMLPTRAYTTYKTRTNRSDDTLCRLCGKAFESLEHVLAGCLALAQSKYLARHNAALKVLFFEMLRDLQLCEGVPPWYSPVAPKPLYESPDAQAFWDIPMFAEHNHVRSNRVDVRVIDHKQKNIYAIEMSCPWIDNRKKKEVEKTTKYAPLRWELKQQFPTYTVKQFNIIIDVLGGWSQDVDLAMRELFGSRGGDVLLRMQKAVISHSLNIARTFKVLT

SEQ ID NO: 25434 - protein, 1223 aa, Acropora acuminata
MGRQRKGPKIHWTEEMNNLVLQCREKALKLSNSEDPPRYENGRKIGYMRLMKDFWEELGMEHLELTSQNLRDQAAALDKSIGSVAENIASRVGRWRSSAGGRGGNEAEEEGNLERDNSQHANEQQRIGANLHTENSGNQTMPHEEFINTLTQGERELFEKSVQLYTLVNTREGDYSNREIDTRIKQKPTQSDLKSINRVLKGLLEQKKTISLNNDPFAHLWLVNCVLYSVVAAFLLLRGWKKDPKNKSDKQCVYNGEKWKKKYLDEMGEIRKKISIASAEVNRVKENRKLTKRGRKNRALLQEECKSLSVTQLITYIEKQKFRLRKSKAAFGRKKRQEEVKSLNDQFRTDPGWVYARINQIVSEDPDNAHPKYKAASPAVEQSGGGKNMFEDIGEAEAFWRSLWEEQGSGDENAEWLKEIEEVIRQRVPPASQEAWDLETVAVAKVISKKRNWSAPGPDRVMNFWWKRACAVHEDVKISFKGISESLQAYPEWFAQGKSSLIPKPGEFSSENQRPITCLNTGYKWFTSCVLDPMDYHLDYYDLMEMQQRGAKAKCSGTTDNLMIDRMVTLDCHRHKRNLSVAWIDVRKAFDSVDHGWLKKILRINRFPTWICRVVDNLSDSWNTRIAVKTTKGYEVSSPINFNRGLPQGDALCPRLFTLSLNPVAWKLSSTEGYRLSKPVVGNNITHLLYVDDLKVFASSQAKLNRVLKMTEEAMGDIGLLWNLKKCNVLHARRGVIDETSQGFKAGRTVIDCLKDKQYRFLGAPEQLLQDQKLALETAAKTYLQRLSVIWSSPLSDMNRVTASNQLALPVLTYLMWSQHWNLTDLRNIDREARKVISENGGKHPLGSTALLYLPRHQGGRGLRSVETEYKHTKIKSAIKLYQNKDPTMSLVRASEERAVDKGNQSLIKEASTFAEEMGISLELSHPNPRCLKEDGTEVPNIKNHLKQSSRQQLEDKIRGEKWQGKYLTNRWNDDDLNVQGCFGWLKEWPSAPTHTIAGMMELYEQMLPTRVYTTYKTRTNPSDDTLCRLCGEAVESLEHVLAGCLALAQSKYLARHNAALKVLFFEMLRDLQLCEGVPPWYSPVAPKPLYESPDAQAFWDIPMFAEHNHVRSNRVDVRVIDHKQKRIYAIEMSCPWIDNRKKKEVEKTTKYAPLRWELKQQFPTYTVKQFNIIIDVLGGWSREVDLAMRELFGTRGGDVLLRMQKAVISHSLNIARTFKVLT

SEQ ID NO: 25435 - protein, 835 aa, Pachyseris speciosa
MFEDIGEAEGFWRTLWEEQGSGDENAGWLKEIEEGIRQRVPPASQEEWDLETAVIAKVISKKRNWSAPGPDRVVNFWWKRAYAVHEDVKINFKGISESLQAYPEWFAQGKSSLIPKPGEFSSENQRPITCLNTGYKWFTSCVLGSMDYHLDYYDLMEMQQRGAKAKCSGTTDNLMIDRMVTLDCHRHKRNLSVAWIDVRKAFDSVDHGWLKKILRINRFPTWICRVVDNLSDSWNTRIAVKTMKGHEVSPPINFNRGLPQGDALCPRLFTLCLNPVAWKLSSTEGYRLSKPVVGNNITNLLYVDDLKVFASSQAKLNRVLKMTEEAMGDIGLLWNPKKCNVLHVRRGVIDKTSQGFKAGQTAIDCLKDKQYCFLGAPEQLLQDQKLALETAARTYLQRLSVIWSSPLSDMNRVTASNQLALPVLTYLMWSQHWNLTDLRNIDREARKVISENGGKHPLGSTALLYLPRHQGGRGLRSVETEYKHTKIKSAIKLYQNKDPTMSLVRAFEERAADKGNQSLIKEASTFAEEMGISLELSHPNPRCLKEDGTEVPNIKNHLKQSSRQQLEDKIRGEKWQGKYLTNRWNDDDLNVQGCFGWLKEWPSAPTHTIAGMMELYEQMLPTRAYTTYKTRTNPSDDTLCRLCGKAVESLEHVLAGCLALAQSKYLARHNAALKVLFFEMLRDLQLCEGVPPWYSPVAPKPLYESPDAQAFWDIPMFAEHNHVRSNRVDVRVIDHKQKKIYAIEMSCPWIDNRKKEEVEKTTKYAPLRWELKQQFPTYTVKQFNIIIDVLGGWSQEVDLAMRELFGTRGGDVLLRMQKAVISHSLKIARTFKVLT

SEQ ID NO: 25436 - protein, 836 aa, Montipora efflorescens
MFEDIGEAEGFWRTLWEEQGSGDENAGWLKEIEEGIRQRVPPASQEEWDLETAVIAKVISKKRNWSAPGPDRVVNFWWKRAYAVHEDVKINFKGISESLQAYPEWFAQGKSSLIPKPGEFSSENQRPITCLNTGYKWFTSCVLGSMDYHLDYYNLMEMQQRGRRLSAVGPPDNLMIDRMVTLDCHRHKRNLSVAWIDVRKAFDSVDHGWLKKILRINRFPIWICRVVDNLSDSWNTRIAVKTMKGHEVSPLINFNRGLPQGDALCPRLFTLCLNPVAWKLSSTEGYRLSKPVVGNNITNLLYVDDLKIFASSQAKLNRVLKMTEEAMGDIGLLWNPKKCNVLHVRRGVIDKTSQGFKAGQTAIDCLKDKQYCFLGAPEQLLQDQKLALETAVRTYLQRLSVIWSSPPLSDMNRVTASNQLALPVLTYLMWSQHWNLTDLRNIDREARKVISENGGKHPLGSTALLYLPRHQGGRGLRSVETEYKHTKIKSAIKLYQNKDPTMSLVRAFEERAADKGNQSLIKEASTFAEEMGISLELSHPNPRCLKEDGTQVPNIKNHLKQSSRQQLEDKIRGEKWQGKYLTNRWNDDDLNVQGCFGWLKEWPSAPTHTIAGMMELYEQMLPTRAYTTYKTRTNRSDDTLCRLCGKAVESLEHVLAGCLALAQSKYLARHNAALKVLFFEMLRDLQLCEGVPPWYSPVAPKPLYESPDAQAFWDIPMFAEHNHVRSNRVDVRVIDHKQKKIYAIEMSCPWIDNRKKKEVEKTTKYAPLRWELKQQFPTYTVKQFNIIIDVLGGWSQEVDLAMRELFGSRGGDVLLRMQKAVISHSLNIARTFKVLT

SEQ ID NO: 25437 - protein, 830 aa, Pachyseris speciosa
MFEDIGEAEGFWRTLWEEQGSGDENAGWLKEIEEGIRQRVPPASQEEWDLETAVIAKVISKKRNWSAPGPDRVVNFWWKRAYAVHEDVKINFKGISESLQAYPEWFAQGKSSLIPKPGEFSSENQRPITCLNTGYKWFTSCVLGSMDYHLDYYDLMEMQQRGAKAKCSGTTDNLMIDRMVTLDCHRHKRNLSVAWIDVRKAFDSVDHGWLKKILRINRFPTWICRVVDNLSDSWNTRIAVKTMKGHEVSPPINFNRGLPQGDALCPRLFTLCLNPVAWKLSSTEGYRLSKPVVGNNITNLLYVDDLKVFASSQVLKMTEEAMGDIGLLWNPKKCNVLHVRRGVIDKTSQGFKAGQTAIDCLKDKQYCFLGAPEQLLQDQKLALETAARTYLQRLSVIWSSPLSDMNRVTASNQLALPVLTYLMWSQHWNLTDLRNIDREARKVISENGGKHPLGSTALLYLPRHQGGRGLRSVETEYKHTKIKSAIKLYQNKDPTMSLVRAFEERAADKGNQSLIKEASTFAEEMGISLELSHPNPRCLKEDGTEVPNIKNHLKQSSRQQLEDKIRGEKWQGKYLTNRWNDDDLNVQGCFGWLKEWPSAPTHTIAGMMELYEQMLPTRAYTTYKTRTNPSDDTLCRLCGKAVESLEHVLAGCLALAQSKYLARHNAALKVLFFEMLRDLQLCEGVPPWYSPVAPKPLYESPDAQAFWDIPMFAEHNHVRSNRVDVRVIDHKQKKIYAIEMSCPWIDNRKKKEVEKTTKYAPLRWELKQQFPTYTVKQFNIIIDVLGGWSQEVDLAMRELFGTRGGDVLLRMQKAVISHSLKIARTFKVLT

SEQ ID NO: 25438 - protein, 994 aa, Cantharis rustica
MFPWWWRNSLISQVVGEASFNTSTIATQTEPEPGAEPVGRKIITPSTRVLRSMRNIRPEGTPQRAAGFSFGARTLMREESIRSETPSASPVLVSAEQPAGEGLTHPSQTPCRRGPLGRRSPILAADPVIAHIAGLRDAWDGWNDSDRSLIHCVTRLTRKARGALVEELGRYAERFIAEHGKVARRTKPPNGGHVNSDSTQLDKRRARVASYKAAQALYAKNRKRLAESILDGRSLLIAGDSAVGPPILDVEGRYVELWETGEERPLDTPVEKVRMRSCVEWTPITSQEIEDALRASKNTASGPDGITLETLRTVPRMRLELLYNAGLVAGGLPDVLQEGRTILIPKADEGLEKVDNWRPITITSVITRVCHKIVAKKVSNVVTLHHNQSGFVDRDGVLLNTALLDAVLVEKRSQIKEHHLVAIDFRRAFDTVLHSAVRRALIRFDIEPKLIEFIMRGLVSARTIVYSGGQATRAIALKRGVRQGDPLSPLLFNIVLDELITDLQGSGLGLSVPGMRLGCLAYADDLVVASDTLRGCQRLLAKVSSFGSVSGLRVNPQKSVSISMRVVPGKKVLYAATRSRFFSEGQPIPSLTLGDLIKYLGEKYMVHGQSGPTIHVLKEWLQRLIGAPLKPAQKVAVLRQYLVPRIQAKLCSLRVTKGVLKEADKLLRMFLRSALHLNRTCSDAFLHAPIKSGGLGLVSLMSTVPVILRRRLASLAFSNSEFVSKVLALPALVHGWERLLKWTATFGTNKNAIALDWAERLDASYSGNGLRQGAETGVSSRWLIDPPPYWKGYEFIKAVQLRGNLLPTQGIPSNPVELRKCRAGCARAETLSHVLQSCPLTHWPRVLRHDRIGARLTHLTGRRGWLVEQEPHIRAPDGQLFKPDMIFKRPGELIVCDVAVAWEGPSPLSHTYDHKVAKYSEPKFISALESKYPDWTITVRALVIGARGIWCPQNELLVSELGLHKNEVATLITNCLQGSILIHTRFMQTCGHRK

SEQ ID NO: 25439 - protein, 1174 aa, Rhagonycha fulva
MVVVCVCGKTFGSDAGMKQHIRRRYCRGAPVEDDPVQPGPSKRDGDCPLCNRSFQTYAGMRQHMRRAHPVEYNADLEHQADNPVRDPTRWSEEELGRMAREELAYEGRFTNLYLAGVLPGRTQEAIKARRRLDDYKALVVSLRGRDGVSVDLEERKQAEHPEASTSGVIPDKAEVEEDLPSSLDTNGNPNGNISTVDSTISGMADSTISTKAQHNTRVLPTRVLRSNTQKTQEEGTPRREAGFSFGARTLMREESIRTQTPISVLENAAEETKNVSTSQDSHRQSSFNKRRSILASDPVVEHIAGMKDIWDGWSGSDRALIHCVTRLTNKNRSSLVEELGRWTEGLLKDHGKVVRSMNSRNGGKKTINATQSGKNRRRVAEYKTAQTLFAKNRKRLAETILDGRSLSIADQNTVRPPISDIEDRYVGLWETGPQLLSDKPVEKVRKRGDSEWTPITGEEIEDAIRASKKTASGPDGITLETLKAIPRLKLELLFNAALVAGGLPGVLQKGRTILIPKTDEDQERVDNWRPITVTSVITRVCNKIIAKRISSYITLHHNQSGFIDRDGVLLNSALLDAMIKEKRTAIKEHHMIAVDFHRAFDTVLHPAVRRALDRFDLDPRLVGFIMCGLASASTEVHSGGEATRTITLKRGVRQGDPLSPLLFNIVLDELICDLEETGLGLSVPGLRVACLAYADDLVIASDTLRGCQRLLAKVVAFGSVSGLHINPAKSVSLSVKVVPGKKILFSSTVPRFFCEGRPIKPLAPGDFMKYLGEKFDVHGLSGPTIQMLKVGLQRLIRAPLKPAQKVELLRYHLIPRFQARLCSLRVTKGVLKESDKLVRMFVRSSFHLNRTCSDAFIHAPIKCGGLGVTNFSTTVPVILRKRMANLMFSDSEFVKNVLALPPLQKVWEKLLRWTNTYGTNRNAIALDWAVRLDASYSGNGLRQGAETVISSKWVTAPPPYWRGAEYVKAVQLRGNLLPTQGIPSNPQELRKCRAGCAKVESLSHVLQSCPLTHWPRVLRHDRISGRLAHLAGRKGWMVDQEPHIRAADGQLFKPDLIFKRPGELIVCDVAVAWEGPSPLALTYAHKVAKYSEPKFIDALGRLYPDWNISTRALVIGARGTWCPENNIVTAEIGISDNEAATLVTNCIQGSVLIHGRFMQSCGRQNRSNKNLRRI

SEQ ID NO: 25440 - protein, 1108 aa, Pterostichus madidus
MNEYIIRSYYELNKLDTEPTIFGYKLHEVVINKFPELNHLKIQNIVDKKNNLLKCKGITKDKLNSIRKEVMINIHLEENDQPALEAENITNDQEDITELTASIEIDEIEENFNTNYILYEGTEPTARPRLQKLRFNRNTRNIILRVNDLIGFKLKENSTFNELHDLIYIGAATVLKCHNPKPIPRDRKDNSQVKIPPWERRIQNNIKNLRAHIGRLTQKVKNTNITAKVNRQALGTIETYKTEEHNTPEKILDYLKQKLTITAHKLRKYKKSNKRKRENQTFMSSQRTFYRNLEKEVTPEENSSIMPDTQKLKEFWQDIWGKQDSHKSQAAWIKEERNKTANIPYMLDHKIEMAETQEQIKKLQNWKAPGIDMIQNFWIKKFSSTHRMIAVLYSKMLQEPNTIPDFLTTGITYLVPKTDNLSTDPSKYRPITCLPTLYKLFTSIITAKISKHLEDNKVMAEEQNACKKNSQGCKEQLVIDSTITEDAKKNKKTLYTTYIDYKKAFDSVPHSWLLETLDIYKVNPVIQQTLQNLIKRWKTKLIIKAKRTEETEIGKIHIKRGIFQGDSMSALWFCLALNPLTSVLNRQHAGYVINENHPDISHLLYMDDIKLLSNSKKNMGILVRQTEAFSRDIKMKFGIEKCKTNIMKRGQWEEHEGYSVDTQNEEETIEGMMKKETYSYLGIQQSRGIAHGNVKNHLKLKTLRRIENILNTNLSGHNTIKAVNTYALPVITYSFGVVKWSKTDLEEIHRSIRTLFTKYKAHHPRSSTIRFHLHRSKGGVGVTDLINLHLKQIESLRKYFYKKEETSSLHRVINNTDDSYTPLNLKNKNYHPLQEIKTDEAKLHEWSGMDLHGKYPTSIAKDHIDRKASNGWLQSDLFKETEGFVMAIQDKVVPTLNHRKYIIKDNSIKDDKCRMCGKSPETIEHIISGCLILAAREYTNRHNDVARIIHRKICEKHNITQAQKSNHKYQPEAIIENAEVKIFWDRTILTDHPIENNRPDIVYCNKKDKVTYLIDIAVPIHKNVESRHGEKIQKYLQLATEIHQIWNQTKVVIIPIIVGAMGEIPNKLHENTKKLNISRNTYLELQKAALLSTCNIVRKVLNIQHDQL

SEQ ID NO: 25441 - protein, 1108 aa, Pterostichus madidus
MNEYIIRSYYELNKLDTEPTIFGYKLHEVVINKFPELNHLKIQNIVDKKNNLLKCKGITKDKLNSIRKEVMINIHLEENDQPALEAENITNDQEDITELTASIEIDEIEENFNTNYILYEGTEPTARPRLQKLRFNRNTRNIILRVNDLIGFKLKENSTFNELHDLIYIGAATVLKCHNPKPIPRDRKDNSQVKIPPWERRIQNNIKNLRAHIGRLTQKVKNTNITAKVNRQALGTIETYKTEEHNTPEKILDYLKQKLTITAHKLRKYKKSNKRKRENQTFMSSQRTFYRNLEKEVTPEENSSIMPDTQKLKEFWQDIWGKQDSHKSQAAWIKEERNKTANIPYMLDHKIEMAETQEQIKKLQNWKVPGIDMIQNFWIKKFSSTHRMIAVLYSKMLQEPNTIPDFLTTGITYLVPKTDNLSTDPSKYRPITCLPTLYKLFTSIITAKISKHLEDNKVMAEEQNACKKNSQGCKEQLVIDSTITEDAKKNKKTLYTTYIDYKKAFDSVPHSWLLETLDIYKVNPVIQQTLQNLIKRWKTKLIIKAKRTEETEIGKIHIKRGIFQGDSMSALWFCLALNPLTSVLNRQHAGYVINENHPDISHLLYMDDIKLLSNSKKNMGILVRQTEAFSRDIKMKFGIEKCKTNIMKRGQWEEHEGYSVDTQNEEETIEGMMKKETYSYLGIQQSRGIAHGNVKNHLKLKTLRRIENILNTNLSGHNTIKAVNTYALPVITYSFGVVKWSKTDLEEIHRSIRTLFTKYKAHHPRSSTIRFHLHRSKGGVGVTDLINLHLKQIESLRKYFYKKEETSSLHRVINNTDDSYTPLNLKNKNYHPLQEIKTDEAKLHEWSGMDLHGKYPTSIAKDHIDRKASNGWLQSDLFKETEGFVMAIQDKVVPTLNHRKYIIKDNSIKDDKCRMCGKSPETIEHIISGCLILAAREYTNRHNDVARIIHRKICEKHNITQAQKSNHKYQPEAIIENAEVKIFWDRTILTDHPIENNRPDIVYCNKKDKVTYLIDIAVPIHKNVESRHGEKIQKYLQLATEIHQIWNQTKVVIIPIIVGAMGEIPNKLHENTKKLNISRNTYLELQKAALLSTCNIVRKVLNIQHDQL

SEQ ID NO: 25442 - protein, 983 aa, Enterobius vermicularis
MTIDDAKERRRNDPQAKREREWFAEKKIQVHRIKDAIVRARAELVRQRERRPRTDKDRRNAQILGTSNAAELERIAIENEQRLEIVEERIQLRKQEIRRKKLRKAFYAQPSLRVLKKLTVLKNGKIPRIDRPGADEIERFWEPILGRAKESKPRECEYLREWEETLRLEYHEFSISEARVEQELQKGIRHMKPRKAPGPDGIQAFWWKSIPGVSALPSKVGAKIILLGKWPLDWLAQGRTVLIYKKGDAKNPSNYRPITCLNTCYKVLTTAINALLLKHLEGVSDFTREQRANKKGEGGCLHASLIDRAIVKDAQVGKRHPLSVAWLDYKKAFDFIPHAYIKWLLRAVNAARFILRFVDRATDRWGTTFHSQNAITRKIPVKNGIFQGDSLSPTLFVLAVGPLSYALNRFGPRMETSFGRTTGRTLQCNHLFYMDDLKLFARGTEQLGKLLSIVRSVSSVLGLELNLDKCAKAEYIPGGGRVAPSLMGIRELGEARTYRYLGIEQHFKNTGDGYNLLVAEAKAEVRQILSTDLSLGQKRLALSSIVVAKMSYFYMMTAGGKTKLVDSLKAATQLDTEIRAILSEEMAIYAKSCTSRVYLAAEEGGHGWPSMKDELENQVVAFYAYLASMPELRPIWYFNEATRKSGKRSINTDVREILARYEVEVSGGNLCFYGDRDFLNQPRNLRKYLVNRIREYRAAERILQWRSKEVAGKVHRMENLNHYLSFRWLKRGCISSQNARIALGIQEHNILTRASAAAAAIRRSLGSNQSSLCRQCGKREETVEHVVSSCSKWLSNLYVERRDAALRVVYYHLATRYGLPTVHYSQELPDQAKSDSAELLWNVAIQTQRLMDHRKPDLVLIDSKNKQIYVVEISVASAVGIEQQHNIKFNRYVVNSRKQEDETKTPYERGPKLVDDMRQRYKMDVSFIPIVIGTTGEISYRTTKALEQLPGMNRRKLEDVAERLSRAVVINTARIVKNHLAKK

SEQ ID NO: 25443 - protein, 938 aa, Pollicipes pollicipes
MVTDASRRNEAYHQRRGQATARRRGQPGAAAPHGPPGRPAVVPPLNGRPGTAGGAPPPPPRGRPDRPAAGGPPPPQNGDPAPPPAQQPDRRTTYRPPRHEPAEASRLQRLYRANRGKAMRDVLAEESPSCPLQPAVIREHFAPPNRAADPFEWEAHPECVEEPVEALPTAELFRYFEADEVWRRMSAASTAPGADGLRYVAWRALDPGALLLTRAFNLCARHRRVPAAWKESSTILLHKGGDVREPSNWRPIALMNTIAKVYAGLWADRLSRWAETENLLSCQQKGFRSYDGVLEHNFILQSAITAQRRQPGGQLHVCFIDLANAFGSLPHRYLWSVLARLGLPGEVLFTLEDLYDGSTTTYTTAQGTSEPAPVTRGVRQGCPLSGILFNLGMEPLVRALDAADGVTTLAFADDLALLCRDAEALDTALTTLEEVCSWCGLAPNARKSGLLSVGSPSPQVRLMGQPIPVIGERCSYRYLGRPVGHTRLSCPPLQVLAEAEQAARLVLDSALAPWQKLDALRAFILPRLTHCLRLGLLPKQALRRFDAELRWRVKGALQLPSRACQEYLHASTSRGCVGLTELASEADILLLASTWQLLTSPDELVRETAASQLQESVRKRLLAEPTPAQLADYLNGRELRDGGDVSTRFSRTRVATKALAKTIPVAWRAVDGELRLAVGDDVVPRRQAAALLREAVRQAAAERLYRLPHQGKVMQTVGDQRVSSHYMYSGSFTRFAEWRFVHRARLGLVPLNGVRRSRVRGDERCRRCGYARETLPHVLCHCMPHSAAFQRRHNAILSRLHKAVQRDGVVTQINRRVPGCASTLRPDLVVTRGDEVILADVTVAFENGPDALRAASDAKVRKYTPLVHELRGQGKTASVVALIVGPLGTWWRGNEASLRRLRVSRKYAMLMRRLMVSDTLRWSRDIYIEHLSGRRQYE

SEQ ID NO: 25444 - protein, 1091 aa, Pollicipes pollicipes
MPPAPATPPIARRPLLRPVPPARRVPPPPPPPRLSRPRAPTPHRRPAVSSEVQGDGRPARGGGRGARRGAGRPGRGGGGGGGGRGGGGGGGGGGGGPPDEPAPGPGGQADRPRDAAAPEPELTELQAEFIPRLQRLLDEPEDDWEPCEALLQRMVTDASRRNEAYHQRRGQATARRRGQPGAAVPHGPPGRPAVVPPLNGRPGTAGGAPPPPPRGRPDRPAAGGPPPSQNGDPAPPPAQQPDRRTTYRPPRHEPTEASRLQRLYRANRGKAMRDVLAEESPSCPLQPAVIREHFAPPNRAADPFEWEAHPECVEEPVEALPTAELFRYFETDEVWRRMSAASTAPGADGLRYVAWRALDPGALLLTRAFNLCARHRRVPAAWKESSTILLHKGGDVREPSNWRPIALMNTIAKVYAGLWADRLSRWAETENLLSCQQKGFRSYDGVLEHNFILQSAITAQRRQPGGQLHVCFIDLANAFGSLPHRYLWSVLARLGLPGEVLFTLEDLYDGSTTTYTTAQGTSEPAPVTRGVRQGCPLSGILFNLGMEPLVRALDAADGVTTLAFADDLALLCRDAEALDTALTTLEEVCSWCGLAPNARKSGLLSVGGPSPQVRLMGQPIPVIGERCSYRYLGRPVGHTRLSCPPLQVLAEAEQAARLVLDSALAPWQRLDALRAFILPRLTHCLRLGLLPKQALRRFDAELRWRVKGALQLPSRACQEYLHASTSRGCVGLTELASEADILLLASTWQLLTSPDELVRETAASQLQESVRKRLLAEPTPAQLADYLNGRELRDGGDVSTRFSRTRVATKALAKTIPVAWRAVDGELRLAVGDDVVPRRQAAALLREAVRQAAAERLYRLPHQGKVMQTVGDQRVSSHYMYSGSFTRFAEWRFVHRARLGLVPLNGVRRSRVRGDERCRRCGYARETLPHVLCHCMPHSAAFQRRHNAILSRLHKAVQRDGVVTQINRRVPGCASTLRPDLVVTRGDEVILADVTVAFENGPDALRAASDAKVRKYTPLVHELRGQGKTASVVALIVGPLGTWWRGNEASLRRLRVSRKYAMLMRRLMVSDTLRWSRDIYIEHLSGRRQYE

SEQ ID NO: 25445 - protein, 1688 aa, Amphibalanus amphitrite
MVSPPASSGRVPAAGASSPSPGPAALQQPWLEGQLLVLPSPLPLHVCCPVAGCPRSYANQAQTAVRHSLLRHLRTDFHPGLSVTGSEWRCAACGAKLARKVSAHRCPLGPLNRPVPDAASAFRQECHWCRKWFTTRRGVLNHRARCPRRPPPAPPQPTDWAAALARLRAETAPAAGAPARPATPTSPEMDLSLSPPPPPPGQSRPSPPPEPTPPPPPEPTPTPSPGSTPTPPREPTPTPPRERTPPPAPEEDRLSPLLSPGPLPERWWSPTQPSQPPRSPPLVFPETSPSPDSSSKTAESPPLHEDLAACDGGPVDALSPHRAERVSDNVSVPPASASDATVPPASASDATVPPASLPDAAVPRESTPRESVPTCLVLVSPVPPATEPAGSALVQPTPCVAGTTLVRPPSSASPVPRPRSDGVDCVGGASITTPRRGRRSPNLTSSWFWLRGPGVGARREPSADSSDSSPDSPSPAPTLYLPPGSSSSDSTSTAGSGPAASPGRAARRRRYRARRRAERRRSGHVVPEAAPPLADAGPARAAPPALPPGTAPPPRSPPVSRRPPPGPPPPPPQRESPPSRRPPERAPPDARRSPQERDLPARRPPPPSTGRTAAAPAPRQRGGRRGRGGRGGGQRRAEVRNDVTTTVSDRRDPPQEVTPPPQPTLRPDAPPPTPGPDAPPPTPPAGAPPAEAAAPASRSRAGRGRGRGRGGAASARAQPQAQEPELTELQRLFLPRLEHLLAADAEWAACEEVLTAMVAEASRRNEAYHAKRAEETDRRRRQPPPDRQRLRRDPPRRPDPAGRPAAAPAPPPGPNPVPAPPAEGAAPPPPPPPADRRRQYRPPQYDPAEASRLQRLYRTNRARAMREVLAEDGPRCSLDPAAIRSHFSPSPTADPPVDWDARPPCVPELGEANQCDGLTRPFTEDEVWQRLRSAANTAPGPDGLRYVAWRALDPGARLLTLAYNVCKSHRRVPGEWGKSSTVLIHKGGDADDPSCWRPIALISTIAKVYAGLWADRLSRWAEGEDLLSPGQKGFRHYDGVLEHNFILQSALTASRRAAGGELHVCFVDLTNAFGSLSHSYLWDVLARLGLEPEVLLALQSIYDGTTTVYATAQGVSEPAPVVRGVRQGCPLSGVLFALAMEPLVRALNGIDGVEALAFADDVALLCRDHPALESALTALEDVCAWCGLHPNPRKSGLLSIGPAPPPAQLCGQPLPVVGEGGSYRYLGRPVGHSRLSCPPTEVLDDARRAAERVTDSALAPWQKLDALRSCVMPRLTHCLRLGLLPKTALRSLDAAIRWRVKGILNLPSRASAEYLYSGVAQGCVGLTELAVEADMLLVASTWQLLTSPDGAVRTTAEDQLTECVRRRLSAPPTAAQVAGYLNGEAMRDGGDVATRFSRARVATKALAKLVGIRWQAADGQLSLTLDGEPLPRGKTAALLRDAVRRAAAARLHTKPHQGKVMRCVADQRISSHYMYSGDYTRFAEWRFVHRARLGLVPLNGARHGAAPGDQRCRRCGHASETLPHVLCHCMQRHSVAYQRRHDALLARLANAVRRDGVDVRVNRQVPGVQSTLRPDLVVTRDGGATVVLADVTVAFENGPEALQAASDAKVRKYAPLVAELRAAGKEASVVALVVGPLGTWWRGNEAVLRRLRVSRAYARLMRRLMVCDTLRWSRDVYIEHITGHRQYQ

SEQ ID NO: 25446 - protein, 1507 aa, Amphibalanus amphitrite
MDLTLSPPPPPSRQGRPSPPPEPTPPPPPEPTPTPSPGPTPTLPREPTPTPPRELTPPPAPEEDRLSPLPSPGPLPERWWSPTQPSQPPRSPPLVFPETSPSPDSSSKTVQSLSLHEDPAACDGDSVDALSPHRAERVSDNVTVPPASASDVTVPPASTSDATVPPASLPDAAVPRESTPRESVPTCLVLVSPVPPATEPAGPALVHTTPCVAGTTLVRPPSSASPVPRPRSDGVDCVGGASITTPRRGRRSPNLTSSWFWLRGPGVGARREPSADSSDSSPDSPSPAPTLYLPPSSSSSDSSSTAGSEPAASPGRAARRRRYRARRRAERRRSGHVVPEAAPPLADAGPARAAPPALLPGTAPPPRSPPVSRRPPPGPPPPPPQRDSPPSRRPPERAPPGARRSPQERDLPARRPPPPSTGRTAAAPAPRQRGGRRGRGGRGGGQRRAEVRNDVTTTVSDRRDPPQEVTPPPQPTPRPDALPPTPGPDAPPPTPRPDAPPPTPPAGAPPAEAAAPASRSRAGRGRGRGRGGAASARAQPQAQEPELTELQRLFLPRLEHLLAADAEWAACEEVLTAMVAEASRRNEAYHAKRAEETDRRRRQPPPDRQRLRRDPPRRPDPAGRTAAAPAPPPGPNPVPAPPAEGAAPPPPPADRRRQYRPPQYDPAEASRLQRLYRTNRARAMREVLAEDGPRCSLDPAAIRSHFSPSPTADPPVDWDARPPCVPELGEASQCDGLTRPFTEDEVWQRLRSAANTAPGPDGLRYVAWRALDPGARLLTLAYNVCKSHRRLPGEWGKSSTVLIHKGGDADDPSCWRPIALISTIAKVYAGLWADRLSRWAEGEDLLSPGQKGFRHYDGVLEHNFILQSALTASRRAAGGELHVCFVDLTNAFGSLSHSYLWDVLARLGLEPEVLLALQSIYDGTTTVYATAQGVSEPAPVVRGVRQGCPLSGVLFALAMEPLVRALNGIDGVEALAFADDVALLCRDHPALESALTALEDVCAWCGLHPNPRKSGLLSIGPAPPPAQLCGQPLPVVGEGGSYRYLGRPVGHSRLSCPPTEVLDDARRAAERATDSALAPWQKLDALRSCVMPRLTHCLRLGLLPKTALRSLDAAIRWRVKGILNLPSRASAEYLYSGVAQGCVGLTELAVEADMLLVASTWQLLTSPDEAVRTTAEDQLTECVRRRLSAPPTAAQVAGYLNGEAMRDGGDVATRFSRARVATKALAKLVGIRWQAADGQLSLTLDGEPLPRGKAAALLRDAVRRAAAARLHTKPHQGKVMRCVADQRISSHYMYSGDYIRFAEWRFVHRARLGLVPLNGARHGAAPGDQRCRRCGHASETLPHVLCHCMQRHSVAYQRRHDALLARLANAVRRDGVDVRVNRQVPGVQSTLRPDLVVTRDGGATVVLADVTVAFENGPEALQAASDAKVRKYAPLVAELRAAGKEASVVALVVGPLGTWWRGNEAVLRRLRVSRAYARLMRRLMVSDTLRWSRDVYIEHITGHRQYQ

SEQ ID NO: 25447 - protein, 1697 aa, Amphibalanus amphitrite
MVSPPASSGRVPAAGASSPSPGPAALQQPWLEGQLLVLPSPLPLHVCCPVAGCPRSYANQAQTAVRHSLLRHLRTDFHPGLSVTGSEWRCAACGAKLARKVSAHRCPLGPLNRLVPDAASAFRQECHWCRKWFTTRRGVLNHRARCPRRPPPAPPQPTDWAAALARLRAETAPAAGAPARPATPTSPEMDLSLSPPPPPPGQSRPSPPPEPTPPPPPEPTPTPSPGPTPTPPREPTPTPPRERTPPPAPEEDRLSPLLSPGPLPERWWSPTQPSQPPRSPPLVFPETSPSPDSSSKTAESPLLHEDLAACDGGPVDALSPHRAERVSDNVSVPPASASDATVPPASASDATVPPASLPDAAVPRESTPRESVPTCLVLVSPVPPATEPAGSALVQPTPCVAGTTLVRPPSSASPVPRPRSDGVDCVGGASITTPRRGRRSPNLTSSWFWLRGPGVGARREPSADSSDSSPDSPSPAPTLYLPPSSSSSDSTSTAGSGPAASPGRAARRRRYRARRRAERRRSGHVVPEAAPPLADAGPARAAPPALPPGTAPPPRSPPVSRRPPPGPPPPPPQRESPPSRRPPERAPPDARRSPQERDLPARRPPPPSTGRTAAAPAPRQRGGRRGRGGRGGGQRRAEVRNDVTTTVSDRRDPPQEVTPPPQPTPRPDAPPPTPGPDAPPPTPRPDAPPPTPPAGAPPAEAAAPASRSRAGRGRGRGRGGAASARAQPQAQEPELTELQRLFLPRLEHLLAADAEWAACEEVLTAMVAEASRRNEAYHAKRAEETDRRRRQPPPDRRRLRRDPPRRPDPAGRPAAAPAPPPGPNPVPAPPAEGAAPPPPPPPADRRRQYRPPQYDPAEASRLQRLYRTNRARAMREVLAEDGPRCSLDPAAIRSHFSPSPTADPPVDWDARPPCVPELGEANQCDGLTRPFTEDEVWQRLRSAANTAPGPDGLRYVAWRALDPGARLLTLAYNVCKSHRRVPGEWGKSSTVLIHKGGDADDPSCWRPIALISTIAKVYAGLWADRLSRWAEGEDLLSPGQKGFRHYDGVLEHNFILQSALTASRRAAGGELHVCFVDLTNAFGSLSHSYLWDVLARLGLEPEVLLALQSIYDGTTTVYATAQGVSEPAPVVRGVRQGCPLSGVLFALAMEPLVRALNGIDGVEALAFADDVALLCRDHPALESALTALEDVCAWCGLHPNPRKSGLLSIGPAPPPAQLCGQPLPVVGEGGSYRYLGRPVGHSRLSCPPTEVLDDARRAAERVTDSALAPWQKLDALRSCVMPRLTHCLRLGLLPKTALRSLDAAIRWRVKGILNLPSRASAEYLYSGVAQGCVGLTELAVEADMLLVASTWQLLTSPDEAVRTTAEDQLTECVRRRLSAPPTAAQVAGYLNGEAMRDGGDVATRFSRARVATKALAKLVGIRWQAADGQLSLTLDGEPLPRGKAAALLRDAVRRAAAARLHTKPHQGKVMRCVADQRISSHYMYSGDYTRFAEWRFVHRARLGLVPLNGARHGAAPGDQRCRRCGHASETLPHVLCHCMQRHSVAYQRRHDALLARLANAVRRDGVDVRVNRQVPGVQSTLRPDLVVTRDGGATVVLADVTVAFENGPEALQAASDAKVRKYAPLVAELRAAGKEASVVALVVGPLGTWWRGNEAVLRRLRVSRAYARLMRRLMVCDTLRWSRDVYIEHITGHRQYQ

SEQ ID NO: 25448 - protein, 1670 aa, Amphibalanus amphitrite
MVSPPASSGRVPAAGASSPSPGPAAPQQPWLEGELLVLPSPLPLHVCCPVAGCPRSYANQAQTAVRHSLLRHLRTDFHPGLSVTGSEWRCAACGAKLARKVSAHRCPLGPLNRPVPDAASAFRQECHWCRKWFTTRRGVLNHRARCPRRPPPAPPQPTDWAAALARLRAETAPAAGAPARPATPTSPEMDLSLSPPPPPPGQGRPPPPPEPTPTPSPEPTPPPAPEEERLSPPPSPGPLPERWWSPAQPSPEEPTSPPLVFPAPSSDSSGTPSPPSPLERPDAERRPAADGGEPPPTGTLQRGAERAGQCCDKVTVPNASDSSVPVPPALVPPALVPPVTVPPASVPPVTVSPASVPPAPEPSPAAPVPPVMPPSAESTTPAWPSRLRPPSSASPDPRPRPGVNRVGGASATTPRRGRRSPNLTSSWFWLRGPGVGARREPSADSSDSSPDSPSPAPTLYLPPSSSSSDSSSAAGSEPAASPGRAARRRRYRAKRRAERRRSGHVVPEAAPPLAGAGPARTAPPALLPGTAPPPRSPPVSRRPPPPPPGPPPPPPERDSPPSRRPPERAPPDARWSPPERDLPARRPPPPSNGQTAAVPAPRRRGGRRGRGGRGGGQRCAEVRDDVTTTVSDRRDPPQEVTPPPQPTPRPDAPPPTPGPDAPQPTPPAGAPPAEAAAPASRSRAGRGRGRGRGGAASARAQPQAQEPELTELQRLYLPRLEQLLAADAEWAACEEVLTAMVAEASRRNEAYHAKRAEETDRRRRQPPPDRQRLRRDPPRRPDPAGRPAAAPAPPPGPNPVPAPPAEGAAPPPPPPADRRRQYRPPQYDPAEASRLQRLYRTNRARAMREVLAEDGPRCSLDPAAIRSHFSPSPTADPPVDWDARPPCVPELGEASQCDGLTRPFTEDEVWQRLRSAANTAPGPDGLRYVAWRALDPGARLLTLAYNVCKSHRRLPGEWGKSSTVLIHKGGDADDPSCWRPIALISTIAKVYAGLWADRLSRWAEGEDLLSPGQKGFRHYDGVLEHNFILQSALTASRRAAGGELHVCFVDLTNAFGSLSHSYLWDVLARLGLEPEVLLALQSIYDGTTTVYATARGVSEPAPVVRGVRQGCPLSGVLFALAMEPLVRALNGIDGVEALAFADDVALLCRDHPALESALTALEDVCAWCGLHPNPRKSGLLSIGPAPPPAQLCGQPLPVVGEGGSYRYLGRPVGHSRLSCPPTEVLDDARRAAERVTDSALAPWQKLDALRSCVMPRLTHCLRLGLLPKTALRSLDAAIRWRVKGVLNLPSRASAEYLYSGVAQGCVGLTELAVEADMLLVASTWQLLTSPDEAVRTTAEDQLTECVRRRLSAPPTAAQVAGYLNGEAMRDGGDVATRFSRARVATKALAKLVGIRWQAADGQLSLTLDGEPLPRGKAAALLRDAVRRAAAARLHTKPHQGKVMRCVADQRISSHYMYNGDYIRFAEWRFVHRARLGLVPLNGARHGAAPGDQRCRRCGHASETLPHVLCHCMQRHSVAYQRRHDALLARLANAVRRDGVDVRVNRQVPGVQSTLRPDLVVTRDGGATVVLADVTVAFENGPEALQAASDAKVRKYAPLVAELRAAGKEASVVALVVGPLGTWWRGNEVVLRRLRVSRAYARLMRRLMVSDTLRWSRDVYIEHITGHRQYQ

SEQ ID NO: 25449 - protein, 1657 aa, Amphibalanus amphitrite
MVSPPASSGRVPAAGASSPSPGPAALQQPWLEGQLLVLPSPLPLHVHCPVAGCPRSYANQVQTAVRHSLLRHLRTDFHPGTSVTGSEWRCAACGARLARKVSAHRCPLGPLNRPVPDAATAFRQECLWCRKWYTTRRGLLNHRARCPRRPPPAPPQPTDWAAALARLRAETAPAAGAPARPATPTSPELDLSLSPPPPPPGQGRPSPPPEPTPPPPPEPTPTPSPGPTPTPAPEEDRLSPPPSPGPLPERWWSPTQPSPEEPTSPPLVFPAPSSGSSDTSSPPSLLVRLASERRPAADGGEPPPTGTLQRSAERAGQCCEKVTVLNASDSSVPVPPVTVPPALVPPASVPPVTVSPASVPPAPEPSPAAPVPPVMPPSAESTTPAWPSRLRPLSSASPDPRHRPGGNSVGGASITTPRRGRRSPNLTSSWFWLRGPGVGARREPSADSSDSSPDSPSPAPTLYLPPSSSSSDSTSTVGGGPAASPGRAARRRRYRARRRAERRRSGHVVPEAAPPLADAGPARAAPPALLPGTAPPPRRPPVTRQPPPPPPERDSPPSRRPPERAPPDARRSPPERDLPARRPPPPSTGQTEAAPASRRRGGRRGRGGRGGGQRCAVVRNNASATVSDRRDPPQEVTPPPQPKPRPDAPPPTPPAGAPPAEAAAPASRSRAGRGRGRGRGGAASARAQPQAQEPELTELQRLFLPRLEHLLAADAEWAACEEVLTAMVAEASRRNEAYHAKRAEETDRRRRQPPPDRQRLRRDPPRRPDPAGRPAAAPAPPPGPNPVPAPPAEGAAPPPPPPADRRRQYRPPQYDPAEASRLQRLYRTNRARAMREVLAEDGPRCSLDPAAIRSHFSPSPTADPPVDWDARPPCVPELGEASQCDGLTRPFTEDEVWQRLRSAANTAPGPDGLRYVAWRALDPGARLLTLAYNVCKSHRRLPGEWGKSSTVLIHKGGDADDPSCWRPIALISTIAKVYAGLWADRLSRWAEGEDLLSPGQKGFRHYDGVLEHNFILQSALTASRRAAGGELHVCFVDLTNAFGSLSHSYLWDVLARLGLEPEVLLALQSIYDGTTTVYATAQGVSEPAPVVRGVRQGCPLSGVLFALAMEPLVRALNGIDGVEALAFADDVALLCRDHPALESALTALEDVCAWCGLHPNPRKSGLLSIGPAPPPAQLCGQPLPVVGEGGSYRYLGRPVGHSRLSCPPTEVLDDARRAAERVTDSALAPWQKLDALRSCVMPRLTHCLRLGLLPKTALRSLDAAIRWRVKGILNLPSRASAEYLYSGVAQGCVGLTELAVEADMLLVASTWQLLTSPDEAVRTTAEDQLTECVRRRLSAPPTAAQVAGYLNGEAMRDGGDVATRFSRARVATKALAKLVGIRWQAADGQLSLTLDGEPLPRGKAAALLRDAVRRAAAARLHTKPHQGKVMRCVADQRISSHYMYSGDYTRFAEWRFVHRARLGLVPLNGARHGAAPGDQRCRRCGHASETLPHVLCHCMQRHSVAYQRRHDALLARLANAVRRDGVDVRVNRQVPGVQSTLRPDLVVTRDGGATVVLADVTVAFENGPEALQAASDAKVRKYAPLVAELRAAGKEASVVALVVGPLGTWWRGNEAVLRRLRVSRAYARLMRRLMVSDTLRWSRDVYIEHITGHRQYQ

SEQ ID NO: 25450 - protein, 1072 aa, Androctonus mauritanicus
MVGTSKKKLKDKGGRTRAALPTRGDSGSVSTAGQDDPPSDVVVAQFCCPHCDRSFTTKTGLGVHKRRQHPAAFEAEIRTERKKARWSGEEERLLARREAELTIQGTRWMNRALSGFLPGRSDESVKSHRRLSSYRRMVDEYLSEFQSISELEDPFPSEEPPEVDVTPFLDYVISLGTPEPYVFCEDELDAIWALVRKSPSQLDEVADQLAHYLLKVFPPGCSVRKRPCPSKRARPHTIEAAVEDVSRRDAPHAQGQLGKARSVPDHRDEESNSRRSKRFRRRLEYARTQRLYKHDRGRCIRGILSDTLDARTLPLASLTSFWQPIMTRCNHSAGRGADVFHQFGTLTLPPVSPKVSEVWQPITIAEVKAKGLPPKAAAGPDGMTTALLRSVPPRVLAKVFNIFLVCSRLPGHLLDARTVFIPKTGVEGERGPGDYRPITIGPVLVRAFHRVLAARLSAATELEPGQRAFLPTDGTAEDVMLLDVVIRHHRAMFRPLYLASLDVSKAFDNISHEAVLHALRVFGIPSPCIRYLADVYERATTTLTSCGEASPPFHPTLGVRQGDPISPLLFIMVMDLLIRNLPRSVGAELWGTRLNVIAYADDLVLLASTPAGLQQLIDTTVRFLGCCGLVLNPRKSFTLGLTTAVKEQQMVVDVKHLFTIDQSFIPAKTVTDTWTYLGVRFGVSGRTGVQPKKELESRLLRLTRAPLKPQQRLFALRNFLLPGFYHQLVLGKTFAGVLNSLDKVVRKQIRSWLRLPADVPCGFYHSRPQDGGLGVPSFRWTIPRVKLTRLKRCMQRISEAPMPSNNVLSREIHQMENLLLDRGKSISSKSAQFVYWAAKLHLAVDGRGLCESSKIPQAHRWVSDGTCFLSGRDFLNSLKVRINTLPTRSRTTRGRPEDRFCRAGCLRPETLYHTVQQCHRTHGVRIRRHDAICNYVARGFQQRGWSVHWEPRFPTAAGVRKPDLLLVGPVAHVVDVQVVSDHGSLDEAHDRKVSYYRENTDVASGVKARFNVSAVQFQSVTISWRGVWSHKSASGLLAAGLLSTKDLSVVASRAVLGSYICWRTFCRMTTIV

SEQ ID NO: 25451 - protein, 1137 aa, Tetramorium bicarinatum
MDVTDGIKASEARGSVLASDEPGAAYPRVANKRRDASDARVPGASLDEQWEPITIRVCETLTIQASLSGPISCPKCSETGSNISCPEIYQLNKHILKEHPNVQSQWECDKCQRRFDKLHSWRCHYPKCDGISIYQNAEHKCTSCPLSFKTKNGLAQHERHAHPDVRNAKRAAVAEKPAGKFGRKLTVWTEAELEKLDQLNEQFQGERHINIKLMEHFPGKSNKQISDARRRLNSPTLLSPISEPVTPEPPTPTEPDTHDHMYNPTASGPNPEEEDWRETIINEIRKPHKISDKWADTITKLVAELDETNKTKLDTLYDDLVGELAKSNKPVDTHPKKRSRSKRGKPPNRLARRRYAYAKCQELINKCPRKLADAVIANDLSLLQLRQAPGSAETRNLYNSLWGNEGPIIDLDYTADEIIPTKDIWLPITPREVFDKIKRISNSSAAGPDGLTKASLKGEGTSIVLSKLFNLLMLKEVYPKAWKWNRTTLIPKAGKNVNDIKNWRPITISSIVGRIFSSLLDRRLRNVIKQNARQKGFTEENGCFANTHLLNAAIVEAKENGGIFTVLDISKAFDTVPHQAIRLGLKRKGISPTIIEYVSNMYTDCHTTIKTKDNEIPIQLKKGVKQGDPLSPILFNLAIEPIIETIQKAYPGISIDNQNLSAMAFADDIILLARNRETAIQQITFVNNELRKRGMALSIEKSLSFQYVPRNRTWYLKDPELVVRETPIPYGEPQIAFRYLGATATPWKGLIEGLELKTLQEIIERVKALPLKPMQKISLLRTHLLPRYTYGLVMRPPNKETLKIIDTTIRSGIKDILHLHETTANAFLYTPRKHGGLGICEFLPMVYIAALRNALKATETTDVVVQKAIQTEKSQKALKSYADALRLPWPATREQLNQRKAQVKKSYITEWAQLPTQGQGVMIFAKEPISNEWLIRTNLLKPSRITDAIKMRTNTYPTKTSMSRAHKESNPICRACGETSETLGHIIGQCRTTKTKRIQRHNEIVNLISERLSKSNRIMKEPCIKHQDERFKPDLVAWNEDRALIIDVTVRYENKEYLALAAAEKIQKYECIVNKIKDDLKAKKCEVIPIVIGSRGGMPTETIKTLGQLKIGKADWLTISMIALRSSIEMANAFMDK

SEQ ID NO: 25452 - protein, 1169 aa, Tetramorium simillimum
MSSLKCQLTGMAPTRVLNDGANIHNMGDTPDNEMPRRHAVFVPASGEPGAAYPLVANTRRGANDARVPGASLVEQWEPIPIQVTEILTIQVSLDGPINCPKCREEGINISCLTANQLKRHMLQEHPNVEAHWKCDKCHKIHQNFHSWRCHYAKCTGISVNLEAEYGCDSCPLSFKTKNGLAQHERHAHPEIRNAKRAAEAEKPAGRTGRRLTVWTEAELDELERLSEELQGEKHINVKLMEYFPGKTNKQISDARRRLPSPTTLEPIIEQVTPQSPAPEEPEWHNPDPLNSCTQEPAASMSTPGDDNWQESIVNEIRMAYEIPDEWADSAAKLEALIDAGNEEDINAICDDLIVKLFDKNKARNAHSDKRRSRKRTKPPNRAARRKFAYAKCRELMDKCPKRLADAVVANDLTLLQLRQAPSTVETKDLYTSLWGNKGPEINVEYEIAETIPTSNIWLPITPMEVQNRIRRIENSSAAGPDGITKSSLKEEGVSIILAKLFNILLLREVYPKAWKRNRTTLIPKAGKDAGDIKNWRPITISSLLGRIFSALLDRRLRNVVKQNPRQKGFTNENGCYANTRLLGAAIREAKVNGGIFTVLDISKAFDTVPHQVIRLGLERKGVSSTVTNYIGNMYTGCHTQIKTRDEEIPIELKKGVKQGDPLSPVLFNLAIESIIETAQEDYLGITIGSHKLGAMAFADDIILLAHDQDTAIQQTTLVYNELKKRGMALSLEKCLSFQYVPRNRTWYIRDPELVINGTPIPYGEPHQTFKYLGAATTPWKGLIEGFELATLKEIIGRVKTLPIKPMQKVKLLRTYLLPKYTHELVMQPPAKETLKQIDIVIRSGIKEILHLHETTNSAFLYTPSRQGGLGLYEVFPMVYIASIRNAIKAAESTDTIVREAIQGVKSQENLKAYAAALRLPWPVTHKQLSQRKAQIKNSYVIEWAKLPAQGQGVRDFASERVSNLWITQSNLLKPSRITDAIKLRTNTYPTRSTMKRAHKNTNPICRACGTTEETLGHILGQCTSTKPKRIQRHNEIVRLIKKSLSRNNSTMVEPSIEHQGERFKPDLVVWNEDRALVIDVTVRYERSEYLALAAVEKMKKYKGIAEKLKGDLGVKHSKVVPIIVGSRGALPTKTISMLEQLKISKADWLTISMIALRSSIEIANSFMDA

SEQ ID NO: 25453 - protein, 1264 aa, Phanerotoma sp.
MPLSNFKETTAGQNKEHKLLAREYSMTEEFNSFGIDIPSEHCLLSPNEHDTATGRGSTPRDSKLNRQTLPSQRGNPVGNNTKTTDIGAWADNNLSPSKGISTINTTDTNTSNNNQPHVDRQENITSDNTTTQTFQCPNCDRAFPSYRGLGVHRKSKHPKEVNAEIDVSKKKERWEVEDIKRMCEAELNISDSVRNVNDVLRQNVMPNRTLESIKYIRSTKRYRDTYKSMRTAKADSGTIEPIIQPSTPRDEPPQKSYYRWTDQELTKYAIEEVKAPVNTRDINEYLFKKVNIRTITALSSARRRPAYKNILKDVRDKLRNGVDLSAHYAVEDGPNSGSEERNSTYLDNAGSSSGLINHQPPDRVSSILPPRHDTVSDIIDSPQHQQVNNASLESPPSLVQNVDEPETYKKNFINTAKQILTSASYPEPAREILIQALSNLEGNKNPLPILESWAQLRLPRPAEKSKSRVIIHRELLSRKKRKRRDYAFVQKLWRRSMSKAAEHVPDGPTNITNKPSLDDQERYWRPIFEDSGTGDSIPVVTPSQCYNHLLEPISVAEVRKTCLKSKTSAGPDGLSGNLWNKAISDSTKAIVFNILLYWGHVPKIWGHSRTILIPKAPETMDPAQFRPISISSVILRHLHRIIAARLMNISLFGDKQRGFINADGISENVTVLASIIDNAWSNINQVHVATVDVKKAFDTVSHKSISSVLLNRGVPDHLVAYIANIYSESYTVLEVDSTRSSPIYPGQGVRQGDPLSSLLFNTVMDEIIKAVPDTVGYSFGNCHVNALAFADDLVILASTKLGLQESLDRIVAAMKTHGLSPAPNKCHTFSLIPAGKAQKLKIMEEPAFTIDDVLVDPLKTGEVWKHLGIAFSVKGPMPPNLEMEHFLERITTAPLKPQQRLKILKTFLIPRYLHVLTFSPTTYGKLRQLDKIIRRSVRRWVRLPNDTPTAFFHAPIKDGGLGIFPFATKIPDLIMRRLNSLRDSKFPPASAAGISNYAIKRRKWCSIVPKINWSRNLHNSVDGWSLRHCRDVQASHAWVEDPYLRLSAKEWIQFIRLRINALPSRMRTTRGQRRNQQPVQCRAGCQANETTAHIIQNCFRTHGGRIMRHDAIVKKTVEILTAKNYDVKVEPLIRTSVGNRKPDIVAVREDGAHILDVQIVSSYGDLKQANRNKVMYYKNNSDVIDYVRRRWSIPATTIQIAAITLSWVGVWCKESADHLQAIGFSKAALLAMTTRTMRGSHINFNRFNKMTTMACHNLWPKRLK

SEQ ID NO: 25454 - protein, 785 aa, Philotrypesis tridentata
MIIADDLSEIRPAPTAPMPEDIRAAYSRLWDAESEVKSHDNVPVEALGDGSDMVIFGHITKREVDNRVSWLKKSSAAGVDHLVKDSLSDPNVRLLLTKIFNLVLISNHFPRIWGRNRTTLIPKKATNLEDVGNWRPITIGSIISRVFSGIIDRKIRPFLRLSARQKGFMPEKGCANNIRVFEAGLKTAKNNSGGTFCIMDTAKAFDTIPHTLIGTRMIKAGIPSYIAHFIQCSYKDCSTEIKAGDGSVVSIKIHRGVKQGDPLSPIIFNCVLDRLLHELEESESGLLIGSQKVACLAFADDLVILAEKSQEAQILVRKTYNFLDNMGMQLAPHKSWTFEIESKRKTFICKDPVIKVKESLVPFLNAEDSTKYLGIRIGAWRGITGKSVKIELIGAVNRLQSVPLKIGQKLYLLNKYIIPHFLYNLIGNRISKTELRLIDDEVRQILKRILHLQNCVTDKVFYARRCDGGLGILNIERVVLHARLKHWASMNESRDPLINQVAMGDALVKEAQNTAKHLGILWPPSVESVEKAKELYKKQFAEEWAGLRSQGQGVKNYRDNSVSHKWLSKYYLLKPSRMITALQMRTNTFGTLSALERGSEGNDITCRGCGAALETLGHVLGQCPKTKTRWIGRHNRICKIISKKLISNKHKVFNEPILKFDGRNLRPDIMGIDLVKKELVVYDITVKYENGDWYEEGAQQKVAKYAEGAAEYARKYKLEKSRVVPVVVGARGIMPKRTIEELRKIGCRNWDISAISMTALRSSIELGFEFIDRFGRRKRACRVER

SEQ ID NO: 25455 - protein, 1192 aa, Emesis temesa
MDRIREVRIGSLPGGRQGASGAGAGRGSMRDASQTRRPTRPPGQSSTPSSPVGLTPAGPLTTQQEESATGRTRKSRMRWSADQNKNAMRAYYRATEGGINRTGYRVRLLREFNILEPCLTLTEQNVVDRVRYILRRNIFGVAELEQLGCASASTLTSRLSDANNPPDAPSCFQENTRIDQENTEIEEHVEADSYYKEDLRRKLEDTISRYRGIAVERRSQLPRVPYRAATKLAVDTVNRLLPPFLETSCDIGDTGTILYAAAEVVCHAVGITLPSLGGRLPIEHVKPAWRRRIENRIATARVLIGKLTAFKAGNTRPRVMRFVRSAIGDISYRLPRADLLRVVTERIDSLKQQVAAWGKRIRRYSETSRRHYENRLFKNDQKKLYRHLQTTGREPIRKHRPEKADLLTFWRGLWSQPVEHVEGAWMAELVRTCACLSPMDPIVISEHDVSLAIQKFPNWKTPGLDGLQNYWLKGFNTCHATLARQFKEALEQSSLPECLTTGVTYLAPKSINNADPSQYRPITCLPTIYKALTSVLASKIALHIDRHKILAVTQNGCRAKGRGAKELLLIDTVIGQQVKRNRRNLSAAWIDYKKAFDSVPHTWLMRVLELYKIDNSVQALLKTCMGQWSTMLSLQGVRLSDAEDRIRIRRGIFQGDCLSPLWFCLALNPLSHLLESIGKGFQLRRGGLKLSHLLYMDDLKLFAPNATKLRELLNVTCDFSSSIGMELGVDKCAVLHVERGRVTTSLLEESIYLDSPQLGSLTEAETYRYLGMSQNLCVDESGMKQAVVGVFCERMTKVFNSYLSGVNKIHAYNSWVMPVLMYTFGVIKWSQTELSALDRKVRTTMTRHRLHHPKSSVMRLYIPRRYGGRGMLNVQDLHNREIGNLRDYFLAKSGDAIHAEVIECDKGLTPLSLAKRDWQKPEVLCSSDREAIWKEKELHGRFYKTLHEFHVDLSSSVNWLRFGDLFGETEGFVCAIQDQVVKTNNYRKYIIKDGTIDTCRLCHCLGESLRHITSGCAMLANTEYLHRHNLAAKIIHQEIALKYGLRDQKLPYYKYSPEPVLENDRAKLYWDRSIITDRTIVANKPDIVLMERASSRIFLVDITIPHDDNLVKAESDKRLKYLDLAHEVAEMWNGVSAEVIPIVVSTNGLIPASLKVYLRKLDLPVKPIIAGIQRAVLLDNARIVRRFLSQSP

SEQ ID NO: 25456 - protein, 1215 aa, Apodemia mormo
MTNETVSSGGGRPSMVYIAQKIWMDRDIRVRIGPLPGGRQGASGAGAGRGSMRDASRTRRLAQPSGQSNAPSSPVGLTPAGPATTQQEESATGGIKKSRMRWSTDQNKNAMRAYYRATEGGVNRTGYRVRLLREFNILEPHLTTLSEQNMVDRVRYILRSNIFSAAELEQLGNAAASSLAPEEARVHDPSEVPGLFQENAGVELGAVETGESVEVAAQNNQHLRREIEETILYYRGISVEQRSQLPRVPYTAATRLAVETINDLLPPFLETSSGIGDTGTILYAAAVVVCHAVGIPLPIMRGRPPLRRATPTWRRRIETRITNARILIGKLTAFSAGNTRPRVMRFVKAAISETSRRLPRAELLRLVTERIDSLKQQVAAWGKRIRRYSETSRRHSENRLFESDQRKYYKCLQTMSRQQSREQLPEKADLLTFWRGIWSQPVEHAEGAWMAKLEEICASLPTMDPVVITEHDISAVVRKCPNWKTPGVDGLQNYWLKGFTACHATLARQFGEAIEQCSVPNFLTTGVTYLVPKTNSYTADPSQYRPITCLPTIYKVLTSILAAKIASHIDGNRILADTQNGCRVRGRGTKELLLIDTVIGQQVKRNRRNLSAAWIDYKKAFDSVPHTWLIRILELYKIDEAARGFLETCMRQWSTMLNLQGERMSDAEDRIRIKRGIFQGDCLSPLWFCLALNPLSYLLESLGTGFQLRRGGLKLNHLLYMDDLKLFAPNASRLSELLNATCDFSSSIGMELGVDKCAVLHVERGKVTASDDIITSDADRLRSLTEAETYRYLGMSQNVCVDVSGMKQVVMEVFCERMTKVFNSHLSGVNKVRAYNAWVMPVLMYTFGVLKWSQTELSALDRKVRTTMTRHRLHHPKSSVMRLYISRKRGGRGMLSAQVLHNREICNLRDYFLTRSESAIHAEIIECDRGLTPLSLAKNDWQKPAVLSSSDREAIWKEKELHGRFYKTLHEPYVDFMSSVHWLRFGGLFGETEGFICAIQDQVVKTNNYRKYIIKDGTNDICRMCHRSGESLRHITSGCSMLANTEYLHRHNLAARIIHQELALKYGLREQKLPYYEYLPESVLENDRAKLYWDRPIITDRTILTNKPDIVLMDRASSRIFLVDITIPHDDNLVKAEADKKLKYLDLAHEVVEMWGGMSAEIIPIVVSTNGLIPSSLCFYLRKLDLPAKPIIAGIQRAVLLDNARIVRRFLTQSP

SEQ ID NO: 25457 - protein, 1190 aa, Colias croceus
MEENRMRTGPLPGGRQGAPGAGAGRGSMRDASQSRRPTRPPGRSNPPSPPVSLTTAGPATTQHMESATGGNNKKTRMRWSADQNKNAMRAYYRATEGETNRTGYRVRLLREFNILEPNITLTEQNLVDRVRYILRRNIFSASELEQLGCAAVSAEAPEPMGVDDPPDVSVLFEENTGVETNAIGAGETEEIATQDMDKIRRELEETISHYRGIPVEQRSQLPRVPYRASTRLTVETVNKLLPPYLETSTDIGDTGSILYAAAVVVCRAVGINFSNTGRGSPQRHTTPAWRRRIETRIANARVLIGKLTAFRAGNTRPRVMRFVRSAISEISHNLPQAELLRIVTVRIDTLKQQVAAWGKRIRRYSETTRRHRENRLFESDQRKFYKYLQSGARKAHMGPQPEKADLIAFWRGIWSHAAEHVEGAWMMELEEACVALPPMDPVVVTRDDISAAVRKCPNWKTPGVDGLQTYWLKGFNACHATLARQFGEAIEHRLLPNFLTTGVTYLAPKSNRSADPSQYRPITCLPTIYKALTSVLAAKIAKHIDGNRILADTQNGCRAGGRGTKELLLIDTVIGQQVKRNRRNLSAAWIDYKKAFDSVPHTWLTRVLELYKIDPSIRGLLGTCMGQWSTMLCLQGKRLSDAEDRIKIRRGIFQGDCLSPLWFCLALNPLSYLLERLGSGFQLRRGGLRLNHLLYMDDLKLFAPNRSRLTELLKITCDFSSSIGMELGVDKCAVIHVERGKVTASDDITPSGAAHLRVLTEAETYRYLGMSQNICVEGVSVKQDVAEVFCERMTKVFNSYLSGVNKIRAFNTWVMPVLLYTFGVLKWTQTELNALDRKVRTTMTLHRLHHPKSSVMRLYIPRRCGGRGMLSAQSLHNREICKLRDYFLAKVSHAIHAEVIECDKGLTPLSLAKQDWQKPAVLSISDREAIWKEKELHGRFHRILHEPHVDFLSSVHWLRFGDLFGETEGFVCAIQDQVVKTNNYRRYIIKDGTQDLCRMCHRPGETLRHVTSGCSMLANTEYLHRHNLAARIIHQELALKYGLLVGKVPYYKYAPEPVLENNRAKLYWDRPIITDRTILANRPDIVVMDLATSRIFLVDITIPHDDNLVKADSDKRLKYLDLAHEVVEMWGGVSAEIIPIVVSTNGLIPSSLKQYLRRLDLPVKPMTVGIQRAVLLDNARIVRRFLTQSP

SEQ ID NO: 25458 - protein, 1031 aa, Colias croceus
MGVDDPPDVSVLFEENTGVETNAIGAGETEEIATQDMDKIRRELEETISHYRGIPVEQRSQLPRVPYRASTRLTVETVNKLLPPYLETSTDIGDTGSILYAAAVVVCRAVGINFSNTGRGSPQRHTTPAWRRRIETRIANARVLIGKLTAFRAGNTRPRVMRFVRSAISEISHNLPQAELLRIVTVRIDTLKQQVAAWGKRIRRYSETTRRHRENRLFESDQRKFYKYLQSGARKAHMGPQPEKADLIAFWRGIWSHAAEHVEGAWMMELEEACVALPPMDPVVVTRDDISAAVRKCPNWKTPGVDGLQTYWLKGFNACHATLARQFGEAIEHRLLPNFLTTGVTYLAPKSNRSADPSQYRPITCLPTIYKALTSVLAAKIAKHIDGNRILADTQNGCRAGGRGTKELLLIDTVIGQQVKRNRRNLSAAWIDYKKAFDSVPHTWLTRVLELYKIDPSIRGLLGTCMGQWSTMLCLQGKRLSDAEDRIKIRRGIFQGDCLSPLWFCLALNPLSYLLERLGSGFQLRRGGLRLNHLLYMDDLKLFAPNRSRLTELLKITCDFSSSIGMELGVDKCAVIHVERGKVTASDDITPSGAAHLRVLTEAETYRYLGMSQNICVEGVSVKQDVAEVFCERMTKVFNSYLSGVNKIRAFNTWVMPVLLYTFGVLKWTQTELNALDRKVRTTMTLHRLHHPKSSVMRLYIPRRCGGRGMLSAQSLHNREICKLRDYFLAKVSHAIHAEVIECDKGLTPLSLAKQDWQKPAVLSISDREAIWKEKELHGRFHRILHEPHVDFLSSVHWLRFGDLFGETEGFVCAIQDQVVKTNNYRRYIIKDGTQDLCRMCHRPGETLRHVTSGCSMLANTEYLHRHNLAARIIHQELALKYGLLVGKVPYYKYAPEPVLENNRAKLYWDRPIITDRTILANRPDIVVMDLATSRIFLVDITIPHDDNLVKADSDKRLKYLDLAHEVVEMWGGVSAEIIPIVVSTNGLIPSSLKQYLRRLDLPVKPMTVGIQRAVLLDNARIVRRFLTQSP

SEQ ID NO: 25459 - protein, 1192 aa, Eurybia lycisca
MKWMENKRKRIRPLPGGRQGAPGAGAGRDSMRDASQTRRPTQPSGRSNSPSPLTGLIPAGPATTQQEESAVSGRKKTRMRWSIDRNKNAMRAYYRATEGGINRTGYRVRLLREFNILEPHLTLTEQNLVDRVRYILRRNIFSTAELEQLGCTAASVEVPDPANIDDVPDVSILFEGNTGTANDLAELESTEEVASHYNEKLKRELEETIAYYRGLPIEQRSQLPRVPYRAKTRIAVETVNKMLLPYLESSTGIDDTGSILYAAAVVVCGALDINLPNIGGGSSRRCATPAWRRRIEARIANARVLIGKLTAFRAGNTRPRVVRFVRSAVGEIFHHQPRTQLFRIVTEHIDTLKQQVAAWGKRIRRYSETSRRHRENRLFESDQGKFYKHLQTSARQSSTGRLPEKADLLAFWRGIWSQPAEHVEGVWMSGLEEACSGLPPMNPVVITEQDISAAIRKCSNWKTPGLDRLQNYWLKGFTACHATLSRQFGEALEHRFLPNFLTTGVTYLAPKSTDTADPSHYRPITCLPTIYKALTSVLTAKILEHIKRNRILADTQGGCRAGGRGTKELLLIDTVIGQQVKRNRRNLSAAWIDYKKAFDSVPHTWLMKVLKLYKIDESIQDLLETCMGQWSTMLSIQGERLSGAQDRIRIRRGIFQGDCLSPLWFCLALNPLSFLLESSGTGFQLRRGGLRLNHLLYMDDLKLFAPNATRLRELLNITCNFGGSVGMELGVDKCAILHVERGRVVTSDDIIVSDVAHLRTLTEAETYRYLGMSQNICVDGAGMKQVMIDVFCERMTKVFNSYLSGVNKIRAYNAWVMPVLMYTFGVLKWSQTELSALDRKVRTILTRHRMHHPKSSVMRLYISRRCGGRGLLSAQTLHNREICNIKDYFLEKSGDSIWAEVINCDKGLTPLFLAKRDWQKPVVLSTSDREDIWKEKELHGRFYKTLHESHVDSLSSVHWLRFGDLYGETEGFVCAIQDQVIKTNNYRKYIIKDGTQDICRMCHRPGESLRHVTSGCSMLANTEYLHRHNLVARIIHQDLALKYGLLDWKLPYYKYAPEPVLENNRAKLYWDRPIITDRTILANKPDIVLMDRVSSRIFLVDITIPHDDNLVKAEADKKLKYLDLAHEVVEMWGGVSAEIVPIVVSTNGLIPCSLKQHLRRLDLPVKPISVGIQRAVLLDNARIVRRFLAQSP

SEQ ID NO: 25460 - protein, 1190 aa, Apodemia murphyi
MDKLREVRIGPLPGGRQGASGAGAGRSSMRDASQTRRPARPPGRSNSPSSPVGLTSAGPTTQQKESAAGGTKKSRMRWSIDQNKNAMRAYYRATEGGANRTGYRVRLLREFNILEPHLTTLSEQNVVDRVRYILRSNIFSAIELEQLGSAAVSSLAPEEACVHDPPEVSDLFQENAVVELNMAETGESVETVAQKNEHLRRKIEETISYYRGIPVEQRSQLPRVPYTAVTRLAVETVNQLLPPFLETSCSIGDTATILYAAAVVVCQAAGIALPSGGRRPPPRRAIPAWRRRIETRIANARILIGKLTAFKSGNTRPRVLRFVKAAIGEMSQRLPRAELSRLVTERIDSLKQQVAAWGKRIRRYSETSRRHHENRLFESDQRKFYKYLQTTARHPSRENLPERAKLLAFWRGIWSQPVEHIEGAWMANLEDTCASLPAMNPVVITEHDISVVVRKCPNWKTPGVDGLQYYWLKGFTACHITLARQFREAVEQRSLPNFLTTGVTYLAPKTSYTTDPSQYRPITCLPTIYKTLTSILAAKIASHVHGNRILADAQNGCRVRGRGTKELLLIDTVIGHQVKRNRRNLSAAWIDYKKAFDSVPHTWLMRTLELYKIDESIRGFLETCMRQWSTMLSLQGERLSDEEDRIRIRRGIFQGDCLSPLWFCLALNPLSYLLESLGTGFQLRRGGLRLNHLLYMDDLKLFAPNASRLDELLDATCGFSSSIGMELGVDKCAILHVERGKVTTSDDIITSAAAQLRSLTEAETYRYLGMSQNVCVDVSGMKQAVMDVFCERMTKVFNSYLSGVNKIRAYNAWVMPVLMYTFGVLKWSQTELSALDRKVRTTMTRHRLHHPKSSVMRLYISRKRGGRGMLNAQVLHNREICNLRDYFLAKSESAIHAEVIECDKGLTPLSLAKNEWQKPAVLCNSDREAIWKEKELHGRFYKTLHEPYVDFISSVHWLRFGGLFGETEGFVCAIQDQVVKTNNYRKYIIKDGTNDICRMCHRPGESLRHVTSGCAMLANTEYLHRHNLAARIIHQELALKYGLLEQKLPYYKYSPEPVLENDRAKLYWDRPIITDRSILMNKPDIVLMDRTSSRIFLVDITIPHDDNLVKAETDKKLKYLDLAHEVVEMWGGVSAEIIPIVVSTNGLVPSSLFTYIRKLDLPAKPVIAGIQRAVLLDNARIVRRFLTQSP

SEQ ID NO: 25461 - protein, 1190 aa, Colias croceus
MEENRMRTGPLPGGRQGAPGAGAGRGSMRDASQSRRPTRPPGRSNPPSPPVSLTTAGPATTQHMESATGGNNKKTRMRWSADQNKNAMRAYYRATEGETNRTGYRVRLLREFNILEPNITLTEQNLVDRVRYILRRNIFSASELEQLGCAAVSAEAPEPMGVDDPPDVSVLFEENTGVETNAIGAGETEEIATQDMDKIRRELEETISHYRGIPVEQRSQLPRVPYRASTRLTVETVNKLLPPYLETSTDIGDTGSILYAAAVVVCRAVGINFSNTGRGSPQRHTTPAWRRRIETRIANARVLIGKLTAFRAGNTRPRVMRFVRSAISEISHNLPQAELLRIVTVRIDTLKQQVAAWGKRIRRYSETTRRHRENRLFESDQRKFYKYLQSGARKAHMGPQPEKADLIAFWRGIWSHAAEHVEGAWMMELEEACVALPPMDPVVVTRDDISAAVRKCPNWKTPGVDGLQTYWLKGFNACHATLARQFGEAIEHRLLPNFLTTGVTYLAPKSNRSADPSQYRPITCLPTIYKALTSVLAAKIAKHIDGNRILADTQNGCRAGGRGTKELLLIDTVIGQQVKRNRRNLSAAWIDYKKAFDSVPHTWLTRVLELYKIDPSIRGLLGTCMGQWSTMLCLQGKRLSDAEDRIKIRRGIFQGDCLSPLWFCLALNPLSYLLERLGSGFQLRRGGLRLNHLLYMDDLKLFAPNRSRLTELLKITCDFSSSIGMELGVDKCAVIHVERGKVTASDDITPSGAAHLRVLTEAETYRYLGMSQNICVEGASVKQDVAEVFCERMTKVFNSYLSGVNKIRAFNTWVMPVLLYTFGVLKWTQTELNALDRKVRTTMTLHRLHHPKSSVMRLYIPRGCGGRGMLSAQSLHNREICKLRDYFLAKVSHAIHAEVIECDKGLTPLSLAKQDWQKPAVLSISDREAIWKEKELHGRFHRILHEPHVDFLSSVHWLRFGDLFGETEGFVCAIQDQVVKTNNYRRYIIKDGTQDLCRMCHRPGETLRHVTSGCSMLANTEYLHRHNLAARIIHQELALKYGLLDGKVPYYKYAPEPVLENNRAKLYWDRPIITDRTILANRPDIVVMDLATSRIFLVDITIPHDDNLVKADSDKRLKYLDLAHEVVEMWGGVSAEIIPIVVSTNGLIPSSLKQYLRRLDLPVKPMTVGIQRAVLLDNARIVRRFLTQSP

SEQ ID NO: 25462 - protein, 1190 aa, Apodemia murphyi
MDQVRRVRIGSLPGGRQGASGAGAGRGSMRDASQTRRPARPPGRSNTPSSLVGLTPAGPATTQQEESAAGETRKPRMRWSTDQNKNAMRAYYRATEGGTNRTGYRVRLLREFSILEPRLTLTEQNVVDRVRYILRRNIFNTTELEQLGCASASSLAPESASVNYLPNESRCRGENSRMEPNMVETEEIAEADYQYRDNLRKELEEAITRYRGMSVEQRSQLPRVPYKAATRLAVETVNQLLPPFLETSCGIGDTGTILYAAAVVVCHAVGITFPKMERRLSLRRVAPAWKRRIETRIADARILIGKLTAFKAGNTRPRVMRFVRSAISEMSHRLPRVDLLRVVTERIDSLKQQVAAWGKRIRRYSETSKRHYENRLFKSDQKKFYNYIQTPGRQPTRELLPEKADLLAFWRKLWSHPAEHVEGAWMTELESTCASLPTMDPIVITEQDVSAAVRKCPNWKTPGVDGLQNYWLKGFNTCHAVLARQFEEALEQRSFPELFTTGVTYLAPKSTNTADPSQYRPITCLPTIYKVLTSILATRIALHVDAYNILADTQNGCRAKGRGTKELLLIDSVVGQQVKRNRRNLSAAWIDYKKAFDSVPHTWLLRILELYKIDESIRGLLKTCMGKWNTMLSLQGVRMSDAEDRIRIRRGIFQGDCLSPLWFCLALNPLSHLLENSGTGFQLRRGGLRLSHLLYMDDLKLFAPNASKLRELLNITCNFSSSISMELGVDKCAVLHVERGKVAASDESISFDPAQLRSLTEAETYRYLGLSQNICVDESGMKQAVVDVFCERMRKVFSSYLSGVNKIRAYNAWVMPVLMYTFGVLKWTQTDLSALDRKVRTTMTRHRLHHPKSSVMRLYISRRCGGRGMLSTQVLHNREICNLRDYFLTKSESAIHAEIIQCDKGLTPLSLAKSDWQKPAILCNSDREAIWKEKELHGRFYKTLHESHVDLLYSVHWLRFGDLFGETEGFVCAIQDQVIKTNNYRKYIIKDGTNDICRMCHRPGESIRHVTSGCAMLANTEYLHRHNLAAKIIHQELALKYGLLDQKLPYYKYSPEPVLENERAKLYWDRPIITDRTILENKPDIVLMERASSRIFLVDITIPHDDNLVKAESDKRLKYLNLAHEVVEMWGGVSAEIIPIVVSVNGLIPSSLKLYLRKLDLPVRPVMAAVQRAVLLDNARIVRRFLTQSP

SEQ ID NO: 25463 - protein, 1161 aa, Apodemia virgulti
MRDASQTRRPALPPGRSNKPSSPVGLTPAGPATTQQKESAAGGARKPRMRWSADQNKNAMRAYYRATEGGTNRTGFRVRLLREFNILEPHITLTEQNMVDRVRYILRRNIFDANELEQLGCASASTVASELSSVNDPPYVSNCRGENTRMEPNADQIEGNVEADSQYRDNLRRELEEAITRYRGMSVEQRSRLPRVPYKNATRLAVDTVNQLLPPFLETSSGIGDTGTILYAAADVVCHAVGITFPNMGSRLPLRHVTPAWRRRIETRIADARILIGKLTAFKAGNTRPRVMRFVRSAISEFHRLPRADQLRVTTERIDSLKQQIAAWGRRIRRYTETSRRHYENRLFKSDQRKFYKYLQTTNGKPSREQMPEKADLLTFWRSLWSQPVEHVEGTWMAELENTCASLPTMDPVVITEHDVSAVIQKCPNWKTPGLDGLQNYWLKGFNTCHATLARQFEEALEKRSLPDFLTTGVTYLVPKTTNTTDPSQYRPITCLPIIYKTLTSILAAKISSHVDSHKILADTQNGCRAKSRGTKELLLIDTVVGQQVKRNRRNLSVAWIDYKKAFDSVPHTWLMRILELYKIDESIRGLLEACMAQWSTMLNLQGVCLSNTEDRVRIRRGIFQGDCLSPLWFCLALNPLSHLLGSLGTGFQLRRGGLRLSHLLYMDDLKLFAPNASRLNELLNVTCNFSSSIGMELGVNKCAVLHVERGKVAATDESIPFDPARLRSLTQAETYRYLGMSQNMCVDEAGMKQAMVDVFCERMTKVFNSYLSGVNKIRAYNAWVMPVLMYTFGVLKWSQTELSALDRKVRTTMTRHRLRHPKSSVMRLYISRKHGGRGMLSAQGLHNREICNLRDYFLTKSEGAIHAEVIECDKGLTPLSLAKRDWQKPAVLCNSDREAIWKGKELHGRFYKTLHEPHVDLLSSVHWLRFGDLFGETEGFVCAIQDQVVKTNNYRKYIIKDGTNDICRMCHRPGESLRHVTSGCAMLANTEYLHRHNLAAKIIHQELALKYGLRDQKLPFYKYSPVPVLENDRAKLYWDRPIITDRTILMNKPDIVLMERASSKIFLVDITIPHDDNLVKAESDKRLKYLDLAHEVVEMWGGTSAEIIPIVVSTNGLIPSSLKLYLKKLDLPPKPIMASIQRAVLLDNARIVRRFLTQSP

SEQ ID NO: 25464 - protein, 1115 aa, Apodemia walkeri
MRWSIDQNKNAMRAYYRATEGGANRTGYRVRLLREFNTLEPRLTTLSEQNVVDRVRYILRSNIFSVTELEQLGSTAASSLAPEEAHVHDLPKVPDVIQENAGVELNTAETGESVEADAQKNEHLRRKIEETINYYRGVPVEQRSQLPRVPYTAATKLAVKTVNQLLPLFLENSCSVGDTGVILYAAAVVVCQAVGIALPSGGCRSPLRRATPAWKRRIETRISNARILIGKLTAFSSGNTRPRVMRFVKTAINEISQHLPRAELSRLVTERIDNLKQQVAAWGKRIRRYSETSRRHHENRLFESDQRKFYKCLQTVDRQPSRENLPEKVDLLTFWRGIWSQPVEHIEGAWMANLADACASLPAMDPVVITEHDISVAVRKCSNWKTPGVDGLQYYWLKGFTACHATLARQFREAIEQRSVPDFLTTGVTYLAPKTNYTTDPSQYRPITCLPTIYKTLTSILAAKIASHVDGNRILADAQNGCRVGGRGTKELLLIDTVIGYQVKRNRRNFSAAWIDYKKAFDSVPHTWLMRTLELYKIDESIQGFLETCMRQWSTMLSLQGERLSDAEDRIRIRRGIFQGDCLSPLWFCLALNPLSYLLESLGTGFQLRRGGLKLNHLLYMDDLKLFAPNASRLGELLNVTCEFSSSIGMELGVDKCAVLHVERGRVTASDDILTSAAAQLRLLTEAETYRYLGMSQNVCVDGSGMKQVVTDVFCKRMTKVFNSYLSGVNKIRAYNAWVMPVLMYTFGVLKWSQTELSVLDRKVRTTMTRHRLHHPKSSVVRLYISRKCGGRGMLSAQVLHNREICSLRDYFLAKSENAIHAEVIECDKGLTPLSLAKSDWQKPAILCNSDREAIWKEKELHGRFYKTLHEPYVDFISSVHWLRFSGLFGETEGFVCAIQDQVVKTNNYRKYIIKDGTNDICRMCHRPGESLRHVTSGCAMLANTEYLHRHNLAARIIHQELALKYGLREQTLPYYKYSPEPVLENDRAKLYWDRPIITDRTILTNKPDIVLMDRTSSRIFLVDITIPHDDNLVKAETDKKLKYLDLANEVVEMWGGVSAEIIPIIVSTNGLVPSSLFSYLGKLDLPAKSIIARIQRAVLLDNARIVRRFLTQSP

SEQ ID NO: 25465 - protein, 871 aa, Apodemia zela
MRFVKAAISETSQRLPRAELLRLVTERIDALKQQVAAWGKRIRRYSDTTRRHRENRLFESDQRKFYKYLQTMARQPSREQLPEKADLLAFWRGIWSQPVEHVEGAWMAKLEDTCASLPAMDPVVITEHDISVVVRKCQNWKTPRVDGLQNYWLKGFTACHATLARQFREAIEQRSVPDFLTTGVTYLAPKTNHTADPSQYHPITCLPTIYKILTSILAAKIASHVDGNRILADTQNGCRVRGRGTKELLLIDTVIGHQVKRNRRNLSAAWIDYKKAFDSVPHTWLMRTLELYKIDESIRGLLETCMGQWSTMLNLQGQRLSDAEDRIRIKRGIFQGDCLSPLWFCLALNPLSYLLESLGTGFQLRRGGLRLTHLLYMDDLKLFAPNSSKLGELLNATCDFSSSIGMELGVDKCAVLHVERGKVTASDDIVTSAAARLRSLTEAETYRYLGMSQNVCVDVSGMKQVVMDVFCERMTKVFNSYLSGVNKIRAYNAWVMPVLMYTFGVLKWSQTELSALDRKVRTTMTRHRLHHPKSSVMRLYISRKRGGRGMLSAQVLHNREVCNLRDYFLAKSGNAIHAEVIECDKGLTPLSLAKSDWQKPAVLCISDREAIWKEKELHGRFYRTLHESYVDFLSSVHWLRFSGLFGETEGFVCAIQDQVVKTNNYRKYIIKDGTIDICRMCHRPGESLRHVTSGCAMLANTEYLHRHNLAARIIHQELALKYGLREQKLPYYKYSPEPVLENDRAKLYWDRPIITDRSILTNKPDIVLMDRVTSRIFLVDITIPHDENLVKAEADKKLKYLDLAHEVVEMWGGVSAEIIPIVVSTNGLVPSSLFSHLRKLDLPAKPVIAGIQRAVLLDNARIVRRFLTQSP

SEQ ID NO: 25466 - protein, 1189 aa, Apodemia mormo
MDQVRRMRIGPLPGDRQGASGAGAGRGSMRDASQTRRPALPPGRSNTPSSPVGLTPAGPATTQQKESAAGGARKPRMRWSADQNKNAMRAYYRATEGGTNRTGFRVRLLREFNILEPHITLTEQNMVDRVRYILRRNIFDANELEQLGCASASTVASELSSVNDPPYVSNCRGENTRMEPNADQIEGNVEADSQYRDNLRRELEEAITRYRGMSVEQRSRLPRVPYKNATRLAVDTVNQLLPPFLETSSGIGDTGTILYAAADVVCHAVGITFPNMGSRLPLRHVTPAWRRRIETRIADARILIGKLTAFKAGNTRPRVMRFVRSAISEFHRLPRADQLRVTTERIDSLKQQIAAWGRRIRRYTETSRRHYENRLFKSDQRKFYKYLQTTNGKPSREQMPEKADLLTFWRSLWSQPVEHVEGTWMAELENTCASLPTMDPVVITEHDVSAVIQKCPNWKTPGLDGLQNYWLKGFNTCHATLARQFEEALEKRSLPDFLTTGVTYLVPKTTNTTDPSQYRPITCLPIIYKTLTSILAAKISSHVDSHKILADTQNGCRAKSRGTKELLLIDTVVGQQVKRNRRNLSVAWIDYKKAFDSVPHTWLMRILELYKIDESIRGLLEACMAQWSTMLNLQGVCLSNTEDRVRIRRGIFQGDCLSPLWFCLALNPLSHLLGSLGTGFQLRRGGLRLSHLLYMDDLKLFAPNASRLNELLNVTCNFSSSIGMELGVNKCAVLHVERGKVAATDESIPFDPARLRSLTQAETYRYLGMSQNMCVDEAGMKQAMVDVFCERMTKVFNSYLSGVNKIRAYNAWVMPVLMYTFGVLKWSQTELSALDRKVRTTMTRHRLRHPKSSVMRLYISRKHGGRGMLSAQGLHNREICNLRDYFLTKSEGAIHAEVIECDKGLTPLSLAKRDWQKPAVLCNSDREAIWKGKELHGRFYKTLHEPHVDLLSSVHWLRFGDLFGETEGFVCAIQDQVVKTNNYRKYIIKDGTNDICRMCHRPGESLRHVTSGCAMLANTEYLHRHNLAAKIIHQELALKYGLRDQKLPFYKYSPVPVLENDRAKLYWDRPIITDRTILMNKPDIVLMERASSKIFLVDITIPHDDNLVKAESDKRLKYLDLAHEVVEMWGGTSAEIIPIVVSTNGLIPSSLKLYLKKLDLPPKPIMASIQRAVLLDNARIVRRFLTQSP

SEQ ID NO: 25467 - protein, 1164 aa, Apodemia virgulti
MRDASRTRRLAQPSGQSNAPSSPVGLTPAGPATTQQEESATGGIKKSRMRWSTDQNKNAMRAYYRATEGGVNRTGYRVRLLREFNILEPHLTTLSEQNMVDRVRYILRSNIFSAAELEQLGNAAASSLAPEEARVHDPSEVPGLFQENAGVELGAVETGESVEVAAQNNQHLRREIEETISYYRGISVEQRSQLPRVPYTAATRLAVETINDLLPPFLETSSGIGDTGTILYAAAVVVCHAVGIPLPIMRSRPPLRRATPTWRRRIETRITNARILIGKLTAFSAGNTRPRVMRFVKAAISETSRRLPRAELLRLVTERIDSLKQQVAAWGKRIRRYSETSRRHSENRLFESDQRKYYKCLQTMSRQQSREQLPEKADLLTFWRGIWSQPVEHAEGAWMAKLEEICASLPTMDPVVITEHDISAVVRKCPNWKTPGVDGLQNYWLKGFTACHATLARQFGEAIEQCSVPNFLTTGVTYLVPKTNSYTADPSQYRPITCLPTIYKVLTSILAAKIASHIDGNRILADTQNGCRVRGRGTKELLLIDTVIGQQVKRNRRNLSAAWIDYKKAFDSVPHTWLIRILELYKIDEAARGFLETCMRQWSTMLNLQGERMSDAEDRIRIKRGIFQGDCLSPLWFCLALNPLSYLLESLGTGFQLRRGGLKLNHLLYMDDLKLFAPNASRLSELLNATCDFSSSIGMELGVDKCAVLHVERGKVTASDDIITSDADRLRSLTEAETYRYLGMSQNVCVDVSGMKQVVMEVFCERMTKVFNSHLSGVNKVRAYNAWVMPVLMYTFGVLKWSQTELSALDRKVRTTMTRHRLHHPKSSVMRLYISRKRGGRGMLSAQVLHNREICNLRDYFLTRSESAIHAEIIECDRGLTPLSLAKNDWQKPAVLSSSDREAIWKEKELHGRFYKTLHEPYVDFMSSVHWLRFGGLFGETEGFICAIQDQVVKTNNYRKYIIKDGTNDICRMCHRSGESLRHITSGCSMLANTEYLHRHNLAARIIHQELALKYGLREQKLPYYEYLPESVLENDRAKLYWDRPIITDRTILTNKPDIVLMDRASSRIFLVDITIPHDDNLVKAEADKKLKYLDLAHEVVEMWGGMSAEIIPIVVSTNGLIPSSLYFYLRKLDLPAKPIIAGIQRAVLLDNARIVRRFLTQSP

SEQ ID NO: 25468 - protein, 1189 aa, Apodemia mejicanus
MDQVRRMRIGPLPGDRQGASGAGAGRGSMRDASQTRRPAIPPGRSNTPSSPVGLTPAGPATTQQKESAAGGARKPRMRWSADQNKNAMRAYYRATEGGTNRTGFRVRLLREFNILEPHITLTEQNMVDRVRYILRRNIFDANELEQLGCASASTVASELSSVNDPPYVSNCRGENTRMEPNADQIEGNVEADSQYRDNLRRELEEAITRYRGMSVEQRSRLPRVPYKSATRLAVDTVNQLLPPFLETSSGIGDTGTILYAAADVVCHAVGITFPNMGSRLPLRHVTPAWRRRIETRIADARILIGKLTAFKAGNTRPRVMRFVRSAISEFHRLPRADQLRVTTERIDSLKQQIAAWGRRIRRYTETSRRHYENRLFKSDQRKFYKYLQTTNGKPSREQMPEKADLLTFWRSLWSQPVEHVEGTWMAELENTCASLPTMDPVVITEHDVSAVIQKCPNWKTPGLDGLQNYWLKGFNTCHATLARQFEEALEKRSLPDFLTTGVTYLVPKTTNTTDPSQYRPITCLPIIYKTLTSILAAKISSHVDSHKILADTQNGCRAKSRGTKELLLIDTVVGQQVKRNRRNLSVAWIDYKKAFDSVPHTWLMRILELYKIDESIRGLLEACMAQWSTMLNLQGVCLSNTEDRVRIRRGIFQGDCLSPLWFCLALNPLSHLLQSLGTGFQLRRGGLRLNHLLYMDDLKLFAPNASRLNELLNVTCNFSSSIGMELGVNKCAVLHVERGKVAATDESIPFDPARLRSLTQAETYRYLGMSQNMCVDEAGMKQAMVDVFCERMTKVFNSYLSGVNKIRAYNAWVMPVLMYTFGVLKWSQTELSALDRKVRTTMTRHRLRHPKSSVMRLYISRKHGGRGMLSAQGLHNREICNLRDYFLTKSEGAIHAEVIECDKGLTPLSLAKRDWQKPAVLCNSDREAIWKEKELHGRFYKTLHEPHVDLLSSVHWLRFGDLFGETEGFVCAIQDQVVKTNNYRKYIIKDGTNDICRMCHRPGESLRHVTSGCAMLANTEYLHRHNLAAKIIHQELALKYGLRDQKLPFYKYSPVPVLENDRAKLYWDRPIITDRTILMNKPDIVLMERASSKIFLVDITIPHDDNLVKAESDKRLKYLDLAHEVVEMWGGTSAEIIPIVVSTNGLIPSSLKLYLKKLDLPPKPIMASIQRAVLLDNARIVRRFLTQSP

SEQ ID NO: 25469 - protein, 1190 aa, Colias croceus
MEENRMRTGPLPGGRQGAPGAGAGRGSMRDASQSRRPTRPPGRSNPPSPPVSLTTAGPATTQHMESATGGNNKKTRMRWSADQNKNAMRAYYRATEGETNRTGYRVRLLREFNILEPNITLTEQNLVDRVRYILRRNIFSASELEQLGCAAVSAEAPEPMGVDDPPDVSVLFEENTGVETNAIGAGETEEIATQDMDKIRRELEETISHYRGIPVEQRSQLPRVPYRASTRLTVETVNKLLPPYLETSTDIGDTGSILYAAAVVVCRAVGINFSNTGRGSPQRHTTPAWRRRIETRIANARVLIGKLTAFRAGNTRPRVMRFVRSAISEISHNLPQAELLRIVTVRIDTLKQQVAAWGKRIRRYSETTRRHRENRLFESDQRKFYKYLQSGARKAHMGPQPEKADLIAFWRGIWSHAAEHVEGAWMMELEEACVALPPMDPVVVTRDDISAAVRKCPNWKTPGVDGLQTYWLKGFNACHATLARQFGEAIEHRLLPNFLTTGVTYLAPKSNRSADPSQYRPITCLPTIYKALTSVLAAKIAKHIDGNRILADTQNGCRAGGRGTKELLLIDTVIGQQVKRNRRNLSAAWIDYKKAFDSVPHTWLTRVLELYKIDPSIRGLLGTCMGQWSTMLCLQGKRLSDAEDRIKIRRGIFQGDCLSPLWFCLALNPLSYLLERLGSGFQLRRGGLRLNHLLYMDDLKLFAPNRSRLTELLKITCDFSSSIGMELGVDKCAVIHVERGKVTTSDDITPSGAAHLRVLTEAETYRYLGMSQNICVEGVSVKQDVAEVFCERMTKVFNSYLSGVNKIRAFNTWVMPVLLYTFGVLKWTQTELNALDRKVRTTMTLHRLHHPKSSVMRLYIPRRCGGRGMLSAQSLHNREICKLRDYFLAKVSHAIHAEVIECDKGLTPLSLAKQDWQKPAVLSISDREAIWKEKELHGRFHRILHEPHVDFLSSVHWLRFGDLFGETEGFVCAIQDQVVKTNNYRRYIIKDGTQDLCRMCHRPGETLRHVTSGCSMLANTEYLHRHNLAARIIHQELALKYGLLVGKVPYYKYAPEPVLENNRAKLYWDRPIITDRTILANRPDIVVMDLATSRIFLVDITIPHDDNLVKADSDKRLKYLDLAHEVVEMWGGVSAEIIPIVVSTNGLIPSSLKQYLRRLDLPVKPMTVGIQRAVLLDNARIVRRFLTQSP

SEQ ID NO: 25470 - protein, 1201 aa, Apodemia mejicanus
MVYIAQKIWMDRDIRVRIGPLPGGRQGASGAGAGRGSMRDASQTRRLAQPSGQSNAPSSPVGLTPAGPATTQQEESATGGIKKSRMRWSTDQNKNAMRAYYRATEGGVNRTGYRVRLLREFNILEPHLTTLSEQNMVDRVRYILRSNIFSAAELEQLGNAAASSLAPEEARVHDPSEVPGLFQENAGVELGAVETGESVEVAAQNNQHLRREIEETISYYRGISVEQRSQLPRVPYTAATRLAVETINDLLPPFLETSSGIGDTGTILYAAAVVVCHAVGIPLPIMRGRPPLRRATPTWRRRIETRITNARILIGKLTAFSAGNTRPRVMRFVKAAISETSRRLPRAELLRLVAERIDSLKQQVAAWGKRIRRYSETSRRHSENRLFESDQRKYYKCLQTMSRQQSREQLPEKADLLTFWRGIWSQPVEHGEGAWMAKLEEICASLPTMDPVVITEHDISAVVRKCPNWKTPGVDGLQNYWLKGFTACHATLARQFGEAIEQCSVPNFLTTGVTYLVPKTNSYTADPSQYRPITCLPTIYKVLTSILAAKIASHIDGNKILADTQNGCRVRGRGTKELLLIDTVIGQQVKRNRRNLSAAWIDYKKAFDSVPHTWLIRILELYKIDEAARRFLETCMRQWSTMLNLQGERMSDAEDRIRIKRGIFQGDCLSPLWFCLALNPLSYLLESLGTGFQLRRGGLKLNHLLYMDDLKLFAPNASRLSELLNATCDFSSSIGMELGVDKCAVLHVERGKVTASDDIITSDADRLRSLTEAETYRYLGMSQNVCVDVSGMKQVVMEVFCERMTKVFNSHLSGVNKVRAYNAWVMPVLMYTFGVLKWSQTELSALDRKVRTTMTRHRLHHPKSSVMRLYISRKRGGRGMLSAQVLHNREICNLRDYFLTRSESAIHAEIIECDRGLTPLSLAINDWQKPAVLSSFDREAIWKEKELHGRFYKTLHEPYVDFMSSVHWLRFGGLFGETEGFVCAIQDQVVKTNNYRKYIIKDGTNDVCRMCHRSGESLRHITSGCSMLANTEYLHRHNLAARIIHQELALKYGLREQKLPYYEYLPESVLENDRAKLYWDRPIITDRTILTNKPDIVLMDRASSRIFLVDITIPHDDNLVKAEADKKLKYLDLAHEVVGMWGGMSAEIIPIVVSTNGLIPSSLCFYLRKLDLPTKPIIAGIQRAVLLDNARIVRRFLTQSP

SEQ ID NO: 25471 - protein, 871 aa, Colias croceus
MRFVRSAISEISHNLPQAELLRIVTVRIDTLKQQVAAWGKRIRRYSETTRRHRENRLFESDQRKFYKYLQSGARKAHMGPQPEKADLIAFWRGIWSHAAEHVEGAWMMELEEACVALPPMDPVVVTRDDISAAVRKCPNWKTPGVDGLQTYWLKGFNACHATLARQFGEAIEHRLLPNFLTTGVTYLAPKSNRSADPSQYRPITCLPTIYKALTSVLAAKIAKHIDGNRILADTQNGCRAGGRGTKELLLIDTVIGQQVKRNRRNLSAAWIDYKKAFDSVPHTWLTRVLELYKIDPSIRGLLGTCMGQWSTMLCLQGKRLSDAEDRIKIRRGIFQGDCLSPLWFCLALNPLSYLLERLGSGFQLRRGGLRLNHLLYMDDLKLFAPNRSRLTELLKITCDFSSSIGMELGVDKCAVIHVERGKVTASDDITPSGAAHLRVLTEAETYRYLGMSQNICVEGVSVKQDVAEVFCERMTKVFNSYLSGVNKIRAFNTWVMPVLLYTFGVLKWTQTELNALDRKVRTTMTLHRLHHPKSSVMRLYIPRRCGGRGMLSAQSLHNREICKLRDYFLAKVSHAIHAEVIECDKGLTPLSLAKQDWQKPAVLNISDREAIWKEKELHGRFHRILHEPHVDFLSSVHWLRFGDLFGETEGFVCAIQDQVVKTNNYRRYIIKDGTQDLCRMCHRPGETLRHVTSGCSMLANTEYLHRHNLAARIIHQELALKYGLLVGKVPYYKYAPEPVLENNRAKLYWDRPIITDRTILANRPDIVVMDLATSRIFLVDITIPHDDNLVKADSDKRLKYLDLAHEVVEMWGGVSAEIIPIVVSTNGLIPSSLKQYLRRLDLPVKPMTVGIQRAVLLDNARIVRRFLTQSP

SEQ ID NO: 25472 - protein, 1188 aa, Colias croceus
MEENRMRTGPLPGGRQGAPGAGAGRGSMRDASQSRRPTRPPGRSNPPSPPVSLTTAGPATTQHMESATGGNNKKTRMRWSADQNKNAMRAYYRATEGETNRTGYRVRLLREFNILEPNITLTEQNLVDRVRYILRRNIFSASELEQLGCAAVSAEAPEPMGVDDPPDVSVLFEENTGVETNAIGAGETEEIATQDMDKIRRELEETISHYRGIPVEQRSQLPRVPYRASTRLTVETVNKLLPPYLETSTDIGDTGSILYAAAVVVCRAVGINFSNTGRGSPQRHTTPAWRRRIETRIANARVLIGKLTAFRAGNTRPRVMRFVRSAISEISHNLPQAELLRIVTVRIDTLKQQVAAWGKRIRRYSETTRRHRENRLFESDQRKFYKYLQSGARKAHMGPQPEKADLIAFWRGIWSHAAEHVEGAWMMELEEACVALPPMDPVVVTRDDISAAVRKCPNWKTPGVDGLQTYWLKGFNACHATLARQFGEAIEHRLLPNFLTTGVTYLAPKSNRSADPSQYRPITCLPTIYKALTSVLAAKIAKHIDGNRILADTQNGCRAGGRGTKELLLIDTVIGQQVKRNRRNLSAAWIDYKKAFDSVPHTWLTRVLELYKIDPSIRGLLGTCMGQWSTMLCLQGKRLSDAEDRIKIRRGIFQGDCLSPLWFCLALNPLSYLLERLGSGFQLRRGGLRLNHLLYMDDLKLFAPNRSRLTELLKITCDFSSSIGMELGVDKCAVIHVERGKVTASDDITPSGAAHLRVLTEAETYRYLGMSQNICVEGVSVKQDVAEVFCERMTKVFNSYLSGVNKIRAFNTWVMPVLLYTFGVLKWTQTELNALDRKVRTTMTLHRLHHPKSSVMRLYIPRRCGGRGMLSAQSLHNREICKLRDYFLAKVSHAIHAEVIECDKGLTPLSLAKQDWQKPAVLSISDREAIWKEKELHGRFHRILHEPHVDFLSSVHWLRFGDLFGETEGFVCAIQDQVVKTNNYRRYIIKDGTQDLCRMCHRPGETLRHVTSGCSMLANTEYLHRHNLAARIIHQELALKYGLLVGKVPYYKYAPEPVLENNRAKLYWDRPIITDRTILANRPDIVVMDLATSRIFLVDITIPHDDNLVKADSDKRLKYLDLAHEVVEMWGGVSAEIIPIVVSTNGLIPSSLYLRRLDLPVKPMTVGIQRAVLLDNARIVRRFLTQSP

SEQ ID NO: 25473 - protein, 1189 aa, Apodemia hypoglauca
MDELREVRTGSLPGGRQSASGAGAGRSSMRDASQTRRPARPPGRSNSPSSPVGLTSAGSTTQQKESAAGGTKKSRMRWSIDQNKNAMRAYYRATEGGANRTGYRVRLLREFNILEPHLTTLSEQNVVDRVRYILRSNIFSATELEQLGSAAVSSLAPEEACVHDPPEVSDLFQENAAELNMAETGESVETAAQKNEHLKRKIEETISYYRGIPVEQRSQLPRVPYTAVTRLAVETVNQLLPPFLETSCSISDTATILYAAAVVVCQAAGITLPSGGRRPPPRRPTPAWRRRIETRIADARIIIGKLTAFKSGNSRPRVLRFVKAAIGEMSQRLPRAELSRLVTERIDSLKQQVAAWGKRIRRYSETSRRHHENRLFESDQRKFYKYLQTPARQPSRENLPERAELLAFWRGIWSQPVEHIEGAWMANLEDTCASLPAMDPVVITEHDISVVVRKCPNWKTPGVDGLQYYWLKGFTACHITLARQFREAVEQRSVPNFLTTGVTYLAPKTSYTTDPSQYRPITCLPTIYKTLTSILADKIASHVDGNKILADAQNGCRVGGRGTKELLLIDTVIGHQVKRNRRNLSAAWIDYKKAFDSVPHTWLMRTLELYKIDESIRGFLETCMRQWSTMLSLQGERLSDAEDRIRIRRGIFQGDCLSPLWFCLALNPLSYLLESLGTGFQLRRGGLRLNHLLYMDDLKLFAPNASRLGELLDATCDFSSSIGMELGLDKCAILHVERGKFTASDDIIISTATQLRSLTEAETYRYLGMSQNVCVDGSGMKQAVMDVFCERMTKVFNSYLSGVNKIRAYNAWVMPVLMYTFGVLKWSQTELLALDRKVRTTMTRHRLHHPKSSVMRLYISRKRGGRGMLNAQVLHNREICNLRDYFLAKSESAIHAEVIECDKGLTPLSLAKNEWQKPAVLCNSDREAIWKEKELHGRFYKTLHEPYVDFTSSVHWLRFGGLFGETEGFVCAIQDQVVKTNNYRKYIIKDGTNDICRMCHRPGESLRHVTSGCAMLANTEYLHRHNLAARIIHQELALKYGLREQKLPYYKYSPEPVLENDRAKLYWDRPIITDRSILMNKPDIVLMDRTSSRIFLVDITIPHDDNLVKAETDKKLKYLDLAHEVVEMWGGVSAEIIPIVVSTNGLVPSSLFSYIRKLDLPAKPVIAGIQRAVLLDNARIVRRFLTQSP

SEQ ID NO: 25474 - protein, 947 aa, Conus ventricosus
MDKIRVQKNNLKKQMKTALPAEKQGLEKLWEDLKEKHSALSKAESARKRKSIKKKTQERFFRDPFQFARTLFEQPKSGTLSVDKGVLEQHLRKTYSDSQSKAPLDIQDLVWPTNPEEQFNGKPPTLAEIKKVVDKARAKSSPGPNGIPYQLYKKCPKVLEWLHRLLRSAWRNQKISGQWMTADGVYIPKEQNSSDISQFRPISLLNVEGKIFFSVMAARLTKYLMENKYLDVSVQKGGIPGVAGCVEHATMIWDAIQKAKTEKRDLDVVWLDLANVYGSVPHEMIQLALEMYHVPKNIRDMLKKYFNGFSMRFSTKEYTTDWINLEVGIAMGCAISPILFVLAMELILKAATNNARQTDLGDGYKMPPLKAFMDDTTVISSREDETRHVLERLDDIVASSRMKFKPKKSRSLSLRKGKVAESVVFSVANQAIPTVTEEPVKSLGRWYDDTLKDTQRAKETKQMAEKGLETIDQCGLPGKYKVWCLQFMLIPKLLWPLMIYDICTSTVEAMEAKINKFTRKWLGVPPCLTDIALYCRQAKLKLPLKSILEEYKAGKIRLQSMLEDSRDKVVEAIKPQLKTGRKWKVQEAMDSAKESLKIREITGHTQTNRQGLGVTKTEWWSKAKGKAKRDMMIQEMRKEEDQKRLQKAVQQSQQGQWTTWENALQRSLTWNDIWHMAPLRISFILRSAYDLLPSNANLVKWGKTDDPACPLCHKKQTVEHVLSLCKVALAQGRYTWRHNQVLKEIVQVVWASTNTTKGRIRTPKAPATFFTAGGSKSWPRTTVPLETCRQSLLDGADDWECTADLPEWKSHPEIISKSGMRPDIVVHSKSTKQLIMIELTVPYENRMEAAQIYKTEKYADLANSLRREGYQVKVLTAEIGARGFIGTSAYSLMKQLSVAGKEKTRALKAMAEAAERCSSWIWSRRNKSELHKASFPYKYQVSLWLSG

SEQ ID NO: 25475 - protein, 1085 aa, Conus ventricosus
MNMDQMEHPCVCGKRFATTRGMKIHRTKMGCVKTHLNEQQRTASADKTSEDQGQDLNHSAKDIHAVGSDEEFAQALDARRLKLNLPRANETEDWEKLDAKIVQRLDALIGKSTLEHKLATYGDIVYATCRDAYGVKLPKEKTPPKKSRRQEKMDKIRVQKNNLKKQMKTALPAEKQGLEKLWEDLKEKHSALSKAESARKRKSKKKKTQERFFRDPFQFARTLFEQPKSGTLSVDKGVLEQHLRKTYSDSQSKAPLDIQDLVWPTNPEEQFNGKPPTLAEIKKVVDKARAKSSPGPNGIPYQLYKKCPKVLEWLHRLLRSAWRNQKISGQWMTADGVYIPKEQNSSNISQFRPISLLNVEGKIFFSVMAARLTKYLMENKYLDVSVQKGGIPGVAGCVEHATMIWDAIQKAKTEKRDLDVVWLDLANAYGSVPHEMIQLALEMYHVPKNIRDMLKKYFNGFSMRFSTKEYTTDWINLEVGIAMGCAISPILFVLAMELILKAATNNARQTDLGDGYKMPPLKAFMDDTTVISSREDETRHVLERLDDIVASSRMKFKPKKSRSLSLRKGKVAESVVFSVANQAIPTVTEEPVKSLGRWYDDTLKDTQRAKETKQMAEEGLETIDQCGLPGKYKVWCLQFMLIPKLLWPLMIYDICTSTVEAMEAKINKFTRKWLGVPPCLTDIALYCRQAKLKLPLKSILEEYKAGKIRLQSMLEDSGDKVVEAIKPQLKTGRKWKVQEAMDSAKESLKIREITGHTQTNRQGLGVTKTEWWSKTKGKAKRDMMIQEMRKEEDQKDSKKQSSRASKGNGQRGRNALQRSLTWNDIWHMAPLRISFILRSAYDLLPSNANLVKWGKTDDPACPLCHEKQTVEHVISSCKVALAQGRYTWRHNQVLKEIVQVVWASTNTTKGRIRTPKAPATFFTAGGSKSWPRTTVPLETCRQSLLDGADDWECTADLPEWKSHPEIISKSGMRPDIVVHSKSTKQLIMIELTVPYENRMEAAQIYKTEKYADLANSLRREGYQVKVLTAEIGARGFVGTSAYSLMKQLSVAGKEKTRALKAMAEAAERCSSWIWSRRNKSELHKA

SEQ ID NO: 25476 - protein, 1085 aa, Conus ventricosus
MNMDQMEYPCVCGKRFATTRGMKIHRTKMGCVKTHLNEQQRTASADKTSEDQGQDLNHSAKDIHAVGSDEEFAQALDARRLKLNLPRANETEDWEKLDAKIVQRLDALIGKSTLEHKLATYGDIVYATCRDAYGVKLPKEKTPPKKSRRQEKMDKIRVQKNNLKKQMKTALPAEKQGLEKLWEDLKEKHSALSKAESARKRKSKKKKTQERFFRDPFQFARTLFEQPKSGTLSVDKGVLEQHLRKTYSDSQSKAPLDIQGLVWPTNPEEQFNGKPPTLAEIKKVVDKARAKSSPGPNGIPYQLYKKCPKVLEWLHRLLRSAWRNQKISGQWMTADGVYIPKEQNSSDISQFRPISLLNVEGKIFFSVMAARLTKYLMENKYLDVSVQKGGIPGVAGCVEHATMIWDAIQKAKTEKRDLDVVWLDLANAYGSVPHEMIQLALEMYHVPKNIRDMLKKYFNGFSMRFSTKEYTTDWINLEVGIAMGCAISPILFVLAMELILKAATNNARQTDLGDGYKMPPLKAFMDDTTVISSREDETRHVLERLDDIVASSRMKFKPKKSRSLSLRKGKVAESVVFSVANQAIPTVTEEPVKSLGRWYDDTLKDTQRAKETKQMAKEGLETIDQCGLPGKYKVWCLQFMLIPKLLWPLMIYDICTSTVEAMEAKINKFTRKWLGVPPCLTDIALYCRQAKLKLPLKSILEEYKAGKIRLQSMLEDSGDKVEEAIKPQLKTGRKWKVQEAMDSAKESLKIREITGHTQTNRQGLGVTKTEWWSKAKGKAKRDMMIQEMRKEEDQKRLQKAVQQSQQGQWTTWENALQRSLTWNDIWHMAPLRISFILRSAYDLLPSNANLVKWGKTDDPACPLCHEKQTVQHVLSSCKVALSQGRYTWRHNQVLKEIVQVVWASTNTTKGRIRTPKAPATFFTAGGSKSWPRTTVPLETCRQSLLDGADDWECTADLPEWKSHPEIISRSGMRPDIVVHSKSTKQLIMIELTVPYENRMEAAQIYKTEKYADLANSLRREGYQVKVLTAEIGARGFVGTSAYSLMKQLSVAGKEKTRALKAMAEAAERCSSWIWSRRNKNELHKA

SEQ ID NO: 25477 - protein, 933 aa, Conus ventricosus
MDKIRVQKNNLKKQMKTALPAEKQGLEKLWEDLKEKHSALSKAESARKRKSKKKKTQERFFRDPFQFARTLFEQPKSGTLCVDKGVLEQHLRKTYSDSQSKAPLDIQGLVWPTNPEEQFNGKPPTLAEIKKVVDKARAKSSPGPNGIPYQLYKKCPKVLEWLHRLLRSAWRNQKISGQWMTADGVYIPKEQNSSDISQFRPISLLNVEGKIFFSVMAARLTKYLMENKYLDVSVQKGGIPGVAGCVEHATMIWDAIQKAKTEKRDLDVVWLDLANAYGSVPHEMIQLALEMYHVPKNIRDMLKKYFNGFSMRFSTKEYTTDWINLEVGIAMGCAISPILFVLAMELILNAATNNARQTDLGDGYKMPPLKAFMDDTTVISSREDETRHVLERLDDIVASSRMKFKPKKSRSLSLRKGKVAESVVFSVANQAIPTVTEEPVKSLGRWYDDTLKDTQRAKETKQMAEEGLETIDQCGLPGKYKVWCLQFMLIPKLLWPLMIYDICTSTVEAMEAKINKFTRKWLGVPPCLTDIALYCRQAKLKLPLKSILEEYKAGKIRLQSMLEDSGDKVVEAIKPQLKTGRKWKVQEAMDSAKESLKIREITGHTQTNRQGLGVTKTEWWSKAKGKAKRDMMIQEMRKEEDQKRLQKAVQQSQQGQWTTWENALQRSLTWNDIWHMAPLRISFLLRSAYDLLPSNANLVKWGKTDDPACPLCHEKQTVEHVLSSCKVALAQGRYTWRHNQVLKEIVQVVWASTNTTKGRIRTPRAPATFFTAGGSKSWPRTTVPLETCRQSLLDGADDWECTADLPEWKSHPKIISKSGMRPDIVVHSQSTKQLIMIELTVPYENRMEAAQIYKTEKYADLANSLRREGYQVKVLTAEIGARGFVGTSAYSLMKQLSVAGKEKTRALKAMAEAAERCSSWIWSRRNKSEFHKA

SEQ ID NO: 25478 - protein, 1085 aa, Conus ventricosus
MNMDQMQHPCVCGKRFATTRGMKIHRTKMGCVKTHLNEQQRTASADKTSEDQGQDLNHSAKDIHAVGSDEEFTQALDARRLKLNLPRANETEDWEKLDAKIVQRLDALIGKSTLEHKLATYGDIVYATCRDAYGVKLPKEKTPPKKSRRQEKMDKIRVQKNNLKKQMKTALPAEKQGLEKLWEDLKEKHSALSKAESARKRKSKKKKTQERFFRDPFQFARTLFEQPKSGTLSVDKGVLEQHLRKTYSDSQSKAPLDIQDLVWPTNPEEQFNGKPPTLAEIKKVVDKARAKSSPGPNGIPYQLYKKCPKVLEWLHRLLRSAWRNQKISGQWMTADGVYIPKEQNSSDISQFRPISLLNVEGKIFFSVMAARLTKYLMENKYLDVSVQKGGIPGVAGCVEHATMIWDAIQKAKTEKRDLDVVWLDLANAYGSVPHEMIQLALEMYHVPKNIRDMLKKYFNGFSMRLSTNDYTTDWINLEVGIAMGCAISPILFVLAMELILKAATNNAKQTDLGDGYKMPPLKAFMDDTTVISSREDETRHVLERLDDIVASSRMKFKPKKSRSLSLRKGKVAESVVFSVANQAIPTVTEEPVKSLGRWYDDTLKDTQRAKETKQMAEEGLETIDQCGLPGKYKVWCLQCMLIPKLLWPLMIYDICTSTVEAMEAKINKFTRKWLGVPPCLTDIALYCRQAKLKLPLKSILEEYKAGKIRLQSMLEDSGDKVVEAIKPQLKTGRKWKVQEAMDSAKESLKIREITGHTQTNRQGLGVTKTEWWSKAKGKAKRDMMIQEMRKEEDQKRLQKAVQQSQQGQWTTWENALQRSLTWNDIWHMAPLRISFILRSAYDLLPSNANLVKWGKTDDPACPLCHKKQTVEHVLSSCKVALAQGRYTWRHNQVLKEIVQVVWASTNTTKGRIRTPKAPATFFTAGGSKSWPRTTVPLETCRQSLLDGADDWECTADLPEWKSHPEIISKSGMRPDIVVHSKSTKQLIMIELTVPYENRMEAAQIYKTEKYADLANSLRREGYQVKVLTAEIGARGFVGTSAYSLMKQLSVAGKEKTRALKAMAEAAERCSSWIWSRRNKSELHKA

SEQ ID NO: 25479 - protein, 933 aa, Conus ventricosus
MDKIRVQKNNLKNQMKTALPAEKQGLEKLWEDLKEKHSALSKAESARKRKSKKKKTQERFFRDPFQFARTLFEQPKSGTLSVDKGVLEQHLRKTYSDSQSKAPLNIQGLVWPTNPEEQFNGKPPTLAEIKKVVDKARAKSSPGPNGIPYQLYKKCPKVLEWLHRLLRSAWRNQKISGQWMTADGVYIPKEQNSSDISHFRPISLLNVEGKIFFSVMAARLTKYLMENKYLDVSVQKGGIPGVAGCVEHATMIWDAIQKAKTEKRDLDVVWLDLANAYGSVPHEMIQLALEMYHVPKNIRDMLKKYFNGFSMRFSTKEYTTDWINLEVGIAMGCAISPILFVLAMELILKAATNNARQTDLGDGYKMPPLKAFMDDTTVISSREDETRHVLERLDDIVASSRMKFKPKKSRSLSLRKGKVAESVVFSVANQAIPTVTEEPVKSLGRWYDDTLKDTQRAKETKQMAEEGLETIDQCGLPGKYKVWCLQFMLIPKLLWPLMIYDICTSTVEAMEAKINKFTRKWLGVPPCLTDIALYCRQARLKLPLKSILEEYKAGKIRLQSMLEDSGDKVVEAIKPQLKTGRKWKVQEAMDSAKESLKIREITGHTQTNRQGLGVTKTEWWSKAKRKAKRDMLIHEMRKEEDQKRLQKAVQQSQQGQWTTWENALQRSLTWNDIWHMAPLRISFILRSAYDLLPSNANLVKWGKTDDPACPLCHEKQTVEHVLSSCKVALAQGRYTWRHNQVLKEIVQVVWASTNTTKGRIRTPKAPATFFTAGGSKSWPRTTVPLETCRQSLLDGADDWECTADLPEWKSHPEIISKSGTRPDIVVHSKSTKQLIMIELTVPYENRMEAAQIYKTEKYADLANSLRREGYQVKVLTAEIGARGFVGTSAYSLMKQLSVAGKEKTRALKAMAEAAERCSSWIWSRRNKSELHKA

SEQ ID NO: 25480 - protein, 1066 aa, Conus ventricosus
MKMKIHRTKIGCVKTHLNEQQRTASADKTSEDQGQDVNHSAKDIHAVGSDEEFAKALDARRLKLNLPRANETEDWEKLDAKIVQRLDALIGKSTLEHKLATYGDIVYATCRDVYGAKLPKEKTPPKKSRRQEKTDKIRVQKKNLKMQIKTALPAEKEGLEKLWKDLKEEHSALSKAESARKRKSKKKKTQERFFRDPFQFARTLFEQPKSGTLSVDKGVLEQHLRKTYSDPQSKAPLDIQGLVWPTNPEEQFNGKPPPLAEIKKVVDKARDKSSPGPNGIPYQLYKKCPKVLEWLHRLLRSAWRNQKISGQWMTADGVYIPKEQNSSNISQFRPISLLNVEGKIFFSVMAARLTKYLMENKYLDVLVQKGGIPGVASCVEHATMIWDAIQKAKTEKRDMDVVWLDLANAYGSVPHEMIQLALEMYNVPKNIRDMLKKYFNGFSMRFSTKEYTTDWISLEVGIAMGCAISPILFVLAMELILKAATNNARQTDLGDGYKMPPLKAFMDDTTVISSREDETRHVLERLDDIVASSRMKFKPKKSRSLSLRKGKVAESVVFSVANQAIPTVTEEPVKSLGRWYDDTLKDTQKAKETKQMAEEGMETTDHCGLPGKYKVWCLQFMLIPKLLWPLMIYDICTSIVEAMEAKINKFTRKWLGVPPCLTDIALYCRQAKLKLPLKSILEEYKAGKIRLQSMLEDSGDKVVEAIKPQLKTGRKWKVQEAMDSAKESLKIREITGHTQTNRQGLGVTKTEWWSKAKGKAKRDMMIQEMRKEEDQKRLQKAVQQSQRGQWTTWENALQRSLTWNEIWHMAPLRISFILRSAYDLLPSNANLVKWGKTDDPACPLCHEKQTVEHVLSSCKVALAQGRYTWRHNQVLKEIVQVVWTSTNTTKGKIRTPKAPATFFTAGGSKSWPRTTVPHETCRQSLLDGADDWECTADLPEWKSHPEIISKSGMRPDIVVHSKSTKQLIMIELTVPYENRMEAAQIYKTEKYADLANSLRREGYQVKVLTAEIGTRGFVGTSAYSLMKQLSVAGKEKARALKAMAEATERCSSWIWSRRNKSELHKA

SEQ ID NO: 25481 - protein, 891 aa, Conus ventricosus
MDKIRVQKNNLKKQMKTALPAEKQGLEKLWEDLKEKHSALSKAESARKTKSKKKKTQERFFRDPFQFARTLFEQPKSGTLRVDKGVLEQHLRKTYSDSQSKAPLDIQGLVWPTNPEEQFNGKPPTLAEIKKVVDKARAKSSPGPNGIPYQLYKKCPKVLEWLHRLLRSAWRNQKISGQWMTADGVYIPKEQNSSDISQFRPISLLNVEGKIFFSVMAARLTKYLMENKYLDVSVQKGGIPGVAGCVEYATMIWDAIQKAKTEKRNLDVVWLDLANAYGSVPHEMIQLALEMYHVPKNIRDMLKKYFNGFSMRFSTKEYTTDWINLEVGIAMGCAISPILFVLAMELILKAATNNARQTDLGDGYKMPPLKAFMDDTTVISSREDETRHVLERLDDIVASSRMKFKPKKSRSLSLRKGKVAESVVFSVANQAIPTVTKEPVKSLGRWYDDTLKDTQRAKETKQMAEEGLETIDQCGLPGKYKVWCLQFMLIPKLLWPLMIYDICTSTVEAMEAKINMFTRKWLGVPPCLTDIALYCRQAKLKLPLKSILEEYKAGKIRLQSMLEDSGDKVVEAIKPQLKTGRKWKVQEAMDSAKESLKIREITGHTQTNRQGLGVTKTEWWSKAKGKAKRDMMIQEMRKKEDQKRLQKAVQQSQQGQWTTWENALQRSLTWNDIWHMAPLRISFILRSAYDLLPSNANLVKWGKTDDPACPLCHEKQTVEHVLSSCKVALAQGRYTWRHNQVLKEIVQVVWASTNTTKGRIRTPKAPATFFTAGGSKSWPRTTVPLETCRQSLLDGADDWECTADLPEWKSHPEIISKSGMRPDIVVHSKSTKQLIMIELTVPYENRMEAAQIYKTEKYADLANTLRREGYQVKGLTAEIGARGFVGTRAEI

SEQ ID NO: 25482 - protein, 920 aa, Conus ventricosus
MKTALPAEKQGLEKLWEDLKEKHSALSKAESARKRKSKKKKTQERFFRDPFQFARTLFEQPKSGTLSVDKGVLEQHLRKTYSDSQSKAPLDIQGLVWPTNPEEQFNGKPPTLAEIKKVVDKARAKSSPGPNGIPYQLYKKCPKVLEWLHRLLRDRLGETRRSVASGLTADGVYIPKEQNSSDISQFRPISLLNVEGKIFFSVMAARLTKYLMENKYLDMSVQKGGIPGVAGCVEHATMIWDAIQKAKTEKRDLDVVWLDLANAYGSVPHEMIQLALEMYHVPKNIRDMLKKYFNGFSMRFSTKEYTTDWINLEVGIAMGCAISPILFVLAMELILKAATNNARQTDLGDGYKMPPLKAFMDDTTVISSREDETRHVLERLDDIVASSRMKFKPKKSRSLSLRKGKVAESVVFSVANQAIPTVTEEPVKSLGRWYDDTLKDTQRAKETKQMAEEGLETIDQCGLPGKYKVWCLQFMLIPKLLWPLMIYDICTSTVEAMEAKINKFTRKWLGVPPCLTDIALYCRQAKLKLPLKSILEEYKAGKIRLQSMLEDSGDKVVEAIKPQLKTGRKWKVQEAMDSAKESLKIREITGHTQTNRQGLGVTKTEWCSKAKGKAKRDMMIQEMRNEEDQKRLQKAVQQSQQGQWTTWENALQRSLTWNDIWHMAPLRISFILRSAYDLLPSNANLVKWGKTDDPACPLCHEKQTLEHVLSSCKVALAKGRYTWRHNQVLKEIVQVVWASTNTTKGSIRTPKAPATFFTAGGSKSWPRTTVPLETCRQSLLDGADDWECTADLPEWKSHPEIISKSGMRPDIVVHSKSTKQLIMIELTVPYENRMEAAQIYKTEKYADLANSLRREGYQVKVLTAEIGARGFVGTSADSLMKQLSVAGKEKTRALKAMAEAAERCSSWIWSRRNKSELHKA

SEQ ID NO: 25483 - protein, 933 aa, Conus ventricosus
MDKIRVQKNNLKKHMKTALPAEKQGLEKLWEDLKEKHSALSKAESARKRKSKKKKTQERFFRDPFQFARTLFEQPKSGTLSVDKGDLEQHLRKTYSDSQSKAPLDIQGLVWPTNPEEQFNGKPATLAEIKKVVDKARAKSSPGPNGIPYQLYKKCPKVLEWLHRLLRSAWRNQKISGQWMTADGVYIPKEQNSSDISQFRPISLLNVEGKIFFSVMAARLTKYLMKNKYLDVSVQKGGIPGVAGCVEHATMIWDAIQKAKTEKRDLDVVWLDLANAYGSVPHEMIQLALEMHHVPKNIRDMLKKYFNGFSMRFSTKEYTTDWINLEVGIAMGCAISPILFVLAMELILKAATNNARQTDLGDGYKMPPLKAFMDDTTVISSREDETRHVLERLDDIVASSRMKFKPKKSRSLSLRKGKVAESVVFSVANQAIPTVTEEPVKSLGRWYDDTLKDTQRAKETKQMAEEGLETIDQCGLPGKYKVWCLQFMLIPKLLWPLMIYDICTSTVEAMEAKINKFTRKWLGVPPCLTDIALYCRQAKLKLPLKSILEEYKAGKIRLQSMLDDSGDKVVEAIKPQLKTGRKWKVQEAMDSAKESLKIREITGHTQTNRQGLGVTKTEWWSKAKGKAKRDMMIQEMRKEEDQKRLQKAVQQSQQGQWTTWENALQRSLTWNGIWHLAPLRISFILRSAYDLLPSNANLVKWGKTDDPACPLCHEKQTVEHVLSSCKVALAQGRYTWRHNQVLKEIVQVVWASTNTTKGGIRTPKAPATFFTAGGSKSWPRTTVPLETCRQSLLDGADDWECTADLPEWKSHPEIISKSGMRPDIVVHSKSTKQLIMIELTVPYENRMEAAQIYKTEKYADLANSLRREGYQVKVLTAEIGARGFVGTSAYSLMKQLSVAGKEKTRALKAMAEAAERCSSWIWSRRNKSELHKA

SEQ ID NO: 25484 - protein, 926 aa, Conus ventricosus
MEYLRKYLADLSENLQVWSLWVTNNAQCFSLPLYPLLTAVTACNGFSSLWNVSESTWPIFLKISRYVHYGSRMIPKCFSFPVIAVTKGRFFTEQSTTRHSRSGVANNPEEQFNGKPPTLAEIKKVVDKARAKSSPGPNGIPCQLYKKCPKVLEWLHRLLRSAWRNQKISGQWMTADGVYIPKEQNSSDISQFSPISLLNVEGKIFFSVMAARLTKYLMENMYLDVSVQKGGIPGVAGCVEHATMIWDAIQKAKTEKRDLDVVWLDLANAYGSVPHEMIQLALEMYHVPKNIRDMLKKYFNGFSMRFSTKEYTTDWINLEVGIAMGCAISPILFVLAMELILKAATNNARQTDLGDGYKMPPPKAFMDDTTVISSREDETRHVLERLDDIVASSRMKFKPKKSRSLSLRKGKVAESVVFSVANQAIPTVTEEPVKSLGRWYDDTLKDTQRAKETKQMAEEGLETIDQCGLPGKYKVWCLQFMLIPKLLWPLMIYDICTSTVEAMEAKINKFTRKWLGVPPCLTDITLYCRQAKLKLPLKSILEEYKAGKIRLQSMLEDSGDKVVEAIKPQLKTGRKWKVQEAMDSAKESLKIREITGHTQTNRQGLGVTKTEWWSKAKGKAKRDMMIQKMRKEEDQKRLQKAVQQSQQGQWTTWENALQRSLTWNDIWHMAPLRISFILRSAYDLLPSNANLVKWGKTDDPACPLCHEKQTVEHVLSSCKVALAQGRYTWRHNQVLKEIVQVVWASTNTTKGRIRTPKAPATFFTAGGSKSWPRTTVPLETCRQSLLDGADDWECTADLPEWKSHPEIISKSGMRPDIVVHSKSTKQLIMIELTVPYENRMEAAQIYKTEKYADLANSLRREGYQVKVLTAEIGARGFVGTSAYSLMKQLSVAGKEKTRALKAMAEAAERCSSWIWSRRNKSELHKA

SEQ ID NO: 25485 - protein, 1085 aa, Conus ventricosus
MNMDQMEHPCVCGKRFATTRGMKIHRTKMGCVKTHLNEQQRTASADKTSEDQGQDLNHSAKDIHAVGSDEEFTQALDARRLKLNLPRANETEDWEKLDAKIVQRLDALIGKSTLEHKLATYGDIVYATCRDAYGVKLPKEKTPPKKSRRQEKMDKIRVQKNNLKKQMKTALPAEKQGLEKLWEDLKEKHSALSKAESARKRKSKKKKTQERFFRDPFQFARTLFEQPKSGTLSVDKGVLEQHLRKTYSDSQSKAPLDIQDLVWPTNPEEQFNGKPPTLAEIKKVVDKARAKSSPGPNGIPYQLYKKCPKVLEWLHRLLRSAWRNQKISGQWMTADGVYIPKEQNSSDISQFRPISLLNVEGKIFFSVMATRLTKYLMENKYLDVSVQKGGIPGVAGCVEHATMIWDAIQKAKTEKRDLDVVWLDLANAYGSVPHEMIQLALEMYHVPKNIRDMLKKYFNGFSMRFSTKDYTTDWINLEVGIAMGCAISPILFVLAMELILKAATNNARQTDLGDGYKMPPLKAFMDDTTVISSREDETRHVLERLDDIVASSRMKFKPKKSRSLSLRKGKVAESVVFSVANQAIPTVTEEPVKSLGRWYDDTLKDTQRAKETKQMAEEGLETIDQCGLPGKYKVWCLQFMLIPKLLWPLMIYDICTSTVEAMEAKINKFTRKWLGVPPCLTDIALYCRQAKLKLPLKSILEEYKAVKIRLQSMLEDSGDKVVEAIKPQLKTGRKWKVQEAMDSAKESLKIREITGHTQTNRQGLGVTKTEWWSKAKGKAKRDMMIQEMRKEEDQKRLQKAVQQSQQGQWTTWENALQRSLTWNDIWHMAPLRISFILRSAYDLLPSNANLVKWGKTDDPACPLCHKKQTVEHVLSSCKVALAQGRYTWRHNQVLKEIVQVVWASTNTTKGRIRTPKAPATFFTAGGSKSWPRTTVPLETCRQSLLDGADDWECTADLPEWKSHPEIISKSGMRPDIVVHSKSTKQLIMIELTVPYENRMEAAQIYKTEKYADLANSLRREGYQVKVLTAEIGARGFVGTSAYSLMKQLSVAGKEKTRALKAMAEAAERCSSWIWSRRNKSELHKA

SEQ ID NO: 25486 - protein, 754 aa, Conus ventricosus
MTADGVYIPKEQNSSDISQFRPISLLNVEGKIFFSVMAARLTKYLMENKYLDVSVQKGGIPGVAGCVEHATMIWDAIQKAKTEKRDLDVVWLDLANAYGSVPHEMIQLALEMYHVPKNIRDMLKKYFNGFSMRFSTKEYTTDWINLEVGIAMGCAISPILFVLAMELILKAATNNTRQTDLGDGYKMHPLKAFMDDTTVISSREDETRHVLERLDDIVASSRMQFKPKKSRSLSLRKGKVAESVVFSVANQAIPTVTEEPVKSLGRWYDDTLKDTQRAKETKQMAEEGLETIDQCGLPGKYKVWCLQFMLIPKLLWPLMIYDICTSTVEAMEAKINKFTRKWLGVPPCLTDIALYCRQAKLKLPLKSILEEYKAGKIRLQSMLEDSGDKVVEAIKPQLKTGRKWKVQEAMDSAKQSLKIREITGHTQTNRQGLGVTKTEWWSKAKGKVKRDMMIQEMRKEEDQKRLQKAVQQSQQGQWTTWENALQRSLTWNDIWHMAPLRISFILRSAYDLLPSNANLVKWGKTDDPACPLCHEKQTVEHVLSSCKVALAQGRYTWRHNQVLKEIVQVVWASTNTTKGRIRTPKAPATFFTAGGSKSWPRTTVPLETCRQSLLDGADDWECTADLPEWKSHPEIISKSGMRPDIVVHSKSTKQLIMIELTVPYENRMEAAQIYKTEKYADLANSLRREGYQAKVLTAEIGARGFVGTSAYSLMKQLSVAGKEKTRALKAMAEAAERCSSWIWSRRNKSELHKA

SEQ ID NO: 25487 - protein, 1058 aa, Conus ventricosus
MNMDQMEYPCVCGKRFATTRGMKIHRTKMGCVKTHLNEQQRTASADKTSEDQGQDLNHSAKDIHAVGSDEEFTQALDARRLKLNLPRANETEDWEKLDAKIVQRLDALIGKSTLEHKLATYGDIVYATCRAAYGVKLPKEKTPPKKSRRQEKMDKIRVQKNNLKKQMKTALPAEKQGLENLWEDLKEKHSALSKAESARKRKSKKKKTQERFFRDPFQFARTLFEQPKSGTLSVDKGVLEQHLRKTYSDSQSKAPLDIQDLVWPTNPGGQFNGKPPTLAEIKKVVDKARAKSSPGPNGIPYQLYKKCPKVLEWLHRLLRSAWRNQKISGQWMTADGVYIPKEQNSSDISQFRPISLLNVEGKIFFSVMAARLTKYLMENKYLDVSVQKGGIPGVAGCVEHATMIWDAIQKAKTEKRDLDVVWLDLANAYGSVPHEMIQLALEMYHVPKNIRDMLKKYFNGFSMRFSTKDYTTDWINLEVGIAMGCAISPILFVLAMELILKAATNNARQTDLGDGYKMPPLKAFMDDTTVISSREDETRHVLERLDDIVASSRMKFKPKKSRSLSLRKGKVAESVVFSVANQAIPTVTEEPVKSLGRWYDDTLKDTQRAKETKQMTEEGLETIDQCGLPGKYKVWCLQFMLIPKLLWPLMIYDICTSTVEAMEAKINKFTRKWLGVPPCLTDIALYCRQTKLKLPLKSILEEYKAGKIRLQSMLEDSGDKVVEAIKPQLKTGRKWKVQEAMDSAKESLKIREITGHTQTNRQGLGVTKTEWWSKAKGKAKRDMMIQEMRKEEDQKRLQKAVQQSQQGQWTTWENALQRSLTWNDIWHMAPLRISFILRSAYDLLPSNANLVKWGKTDDPACPLCHKKQTVEHVLSSCKVALAQGRYTWRHNQVLKEIVQVVWASTNTTKGRIRTPKAPATFFTAGGSKSWPRTTVPLETCRQSLLDGADDWECTADLPEWKSHPEIISKSGMRPDIVVHSKSTKQLIMIELTVPYENRMEAAQIYKTEKYADLANSLRKEGYQVKVLTAEIGARGFVGTSAYSLMKQLSVAGKENPEP

SEQ ID NO: 25488 - protein, 1024 aa, Conus ventricosus
MHSAKDIHAVGSDEEFAQALDARRLKLNLPRANETEDWEKLDAKIVQRLDALIGKSTLEHKLATYGDIVYATCRDAYGVKLPKEKTPPKKSRRQEKMDKIRVQKNNLKKQMKTALPAEKQGLEKLWEDLKEKHSALSKAESARKRKSKKKKTQERFFRDPFQFARTLFEQPKSGTLSVDKGVLEQHLRKTYSDSQSKAPLDIQDLVLPTNPEEQFNGKPPTLAEIKKVVDKARAKSSPGPNGIPYQLYKKCPKVLEWLHRLLRSAWRNQKISGQWMTADGVYIPKEQNSSDISQFRPISLLNVEGKIFFSVMAARLTKYLMENKYLDVSVQKGGIPGVAGCVEHATMIWDAIQKAKTEKRDLDVVWLDLANAYGSVPHEMIQLALEMYHVPKNIRDMLKKYFNGFSMRFSTKEYTTDWINLEVGIAMGCAISPILFVLAMELILKAATNNARQTDLGDGYKMPPLKAFMDDTTVISSREDETRHVLERLDDIVASSRMKFKPKKSRSLSLRKGKVAESVVFSVANQAIPTVTEEPVKSLGRWYDDTLKDTQRAKETKQMAEEGLETIDQCGLPGKYKVWCLQFMLIPKLLWPLMIYDICTSTVEAMEAKINKFTRKWLGVPPCLTDIALYCRQAKLKLPLKSILEEYKAGKIRLQSMLEDSGDRVVEAIKPQLKTGRKWKVQEAMDSAKESLKIREITGHTQTNRQGLGVTKTEWWSKAKGKAKRDMMIQEMRKEEDQKRLQKAVQQSQQGQWTTWENALQRSLTWNDIWHMAPLRISFILRSAYDLLPSNANLVKWGKTDDPACPLCHKKQTVEHVLSSCKVALAQGRYTWRHNQVLKEIVQVVWASTNTTKGRIRTPKAPATFFTAGGSKSWPRTTVPLETCRQSLLDGADDWECTADLPEWKSHPEIISKSGMRPDIVVHSKSTKQLIMIELTVPYENRMEAAQIYKTEKYADLANSLRREGYQVKVLTAEIGARGFVGTSAYSLMKQLSVAGKEKNQSPESNGRSGREVLKLDLVKEEQK

SEQ ID NO: 25489 - protein, 1150 aa, Conus ventricosus
MLHPWTHLYLGCLSFKGSVGWLPLCLKHVATKYKRKRCSQDSPKGGENDESIGAQPITTANPKRTMNMDQMEYPCVCGKRFATTRGMKIHRTKMGCVKTHLNEQQRTASADKTSEDQGQDLNHSAKDIHAVGSDEEFTQTLDARRLKLNLPRANETEDWEKLDAKIVQRLDALIGKSTLEHKLATYGDIVYATCRDAYGVKLPKEKTPPKKSRRQEKMDKIRVQKNNLKKQMKTALPAEKQGLEKLWEDLKEKHSALSKAESARKRKSKKKKTQERFFRDPFQFARTLFEQPKSGTLSVDKGVLEQHLRKTYSDSQSKAPLDIQGLVWPTNPEEQFNGKPPTLAEIKKVVDKARAKSSPGPNGIPYQLYKKCPKVLEWLHRLLRSAWRNQKISGQWMTADGVYIPKEQNASDISQFRPISLLNVEGKIFFSVMAARLTKYLMENKYLDVSVQKGGIPGVAGCVEHATMIWDAIQKAKTEKRDLDVVWLDLANAYGSVPHEMIQLALEMYHVPKNIRDMLKKYFNGFSMRFSTKEYTTDWINLEVGIAMGCAISPILFVLAMELILKAATNNARQTDLGDGYKMPPLKAFMDDTTVISSREDETRHVLERLDDIVASSRMKFKPKKSRSLSLRKGKVAESVVFSVANQAIPTVTEEPVKSLGRWYDDTLKDTQRAKETKQMAEEGLETIDQCGLPGKYKVWCLQFMLIPKLLWPLMIYDICTSTVEAMEAKINKFTRKWLGVPPCLTDIALYCRQAKLKLPLKSILEEYKAGKIRLQSMLEDSGDKVVEAIKPQLKTGRKWKVQEAMDSAKESLKIREITGHTQTNRQGLGVTKTEWWSKAKGKAKRDMLIQEMRKEEDQKRLQKAVQQSQQGQWTTWENALQRSLTWNDIWHMAPLRISFILRSAYDLLPSNANLVKWGKTDDPACPLCHEKQTVEHVLSSCKVALAQGRYTWRHNQVLKEIVQVVWASTNTTKGRIRTPKAPATFFTAGGSKSWPRTTVPLKTCRQSLLDGADDWECTADLPEWKSHPEIISKSGMRPDIVVHSKSTKQLIMIELTVPYENRMEAAQIYKTEKYADLANSLRREGYQVKVLTAEIGARGFVGTSAYSLMKQLSVAGKEKTRALKAMAEAAERCSSWIWSRRNKSELHKA

SEQ ID NO: 25490 - protein, 919 aa, Conus ventricosus
MKTALPAEKQGLEKLWEDLKEKHSALSKAESARKRKSKKKKTQERFFRDPFQFVRTLFEQPKSGTLSVDKGVLEQHLRKTYSDSQSKAPLDIQDLVWPTNPEEQFNGKPPTLAEIKKVIDKARAKSSPGPNGIPYQLYKKCPKVLEWLHRLLRSAWRNQKISSQWMMADGVYIPKEQNSSDISQFRPISLLNVEGKIFFSVMAARLTKYLMENKYMDVSVQKGGIPGVAGCVEHATMIWDAIQKAKTEKRDLDVVWLDLANAYGSVPHEMIQLALEMYHVPKNIRDMLKKYFSGFSMRFSTKDYTTDWINLEVGIAMGCAISPILFVLAMELILKAATNNARQTDLGDGYKMPPLKAFMDDTTVISSREDETRHVLERLDDIVASSRMKFKPKKSRSLSLRKGKVAESVVFSVANQAIPTVTEEPVKSLGRWYDDTLKDTQRAKETKQMAEEGLETIDQCGLPGKYKVWCLQFMLIPKLLWPLMIYDICTSTVEAMEAKINKFTRKWLGVPPCLTDIALYCRQAKLKLPLKSILEEYKAGKIRLQSMLEDSGDKVVEAIKPQLKTGRKWKVQEAMDSAKESLKIREITGHTQTNRQGLGVTKTEWWSKAKGKAKRDMMIQEMRKEEDQKRLQKAVQQSQQGQWTTWENALQRSLTWNDIWHMAPLRISFILRSAYDLLPSNANLVKWGKTDDPACPLCHKKQTVEHVLSSCKVALAQGRYTWRHNQVLKEIVQVVWASTNTTKGRIRTPKAPATFFTAGGSKSWPRTSVPLETCRQSLLDGADDWECTADLPEWKSHPEIISKSGMRPDIVVHSKSTKQLIMIELTVPYENRMEAAQTYKTEKYADLANSLRREGYQVKVLTAEIGARGFVGTSAYSLMKQLSVAGKEKTRALKAMAEAAERCSSWIWSRRNKSELHKA

SEQ ID NO: 25491 - protein, 1057 aa, Conus ventricosus
MNMDQMEYPCVCGKRFATTRGMKIHRAKMGCVKTHLNEQQRTASADKTSEDQGQDLNHSAKDIHAVGSDEEFAQALDARRLKLNLPRANETEDWEKLDAKIVQRLDALIGKSTLEHKLATYGDIVYTTCRDAYGVKLPKEKTPPKKSRRQEKMDKIRVQKNNLKKQIKTALPAEKQGLEKLWEDLKEKHSALSKAESARKRKSKKKTQERFFRDPFQFARTLFEQPKSGTLSVDKGVLEQHLRKTYSDSQSKAPLDIQGLVWPTNPEEQFNGKPPTLAEIKKVVDKARAKSSPGPNGIPYQLYKKCPKVLEWVHRLLRSAWRNQKISGQWMTADGVYIPKEQNSSDISQFRPISLLNVEGKIFFSVMAARLTKYLMENKYLDVSVQKGGIKGVAGCVEHATMIWDAIQRAKTEKRDLDVVWLDLANAYGSVPHEMIQLALEMYHVPKNIRNMLKKYFNGFSMRFSTKDYTTDWINLEVGIAMGCAISPILFVLAMELILKAATNNARQTDLGDGYKMPPLKAFMDDTTVISSREDETRHVLERLDDIVASSRMKFKPKKSRSLSLRKGKVTESVVFSVANQAIPTVTEEPVKSLGRWYDDTLKDTQRAKETKQMAEEGLETIDQCGLPGKYKVWCLQFMLIPKLLWPLMIYDICTSTVEAMEAKINKFTRKWLGVPPCLTDIALYCRQAKLKLPLKSILEEYKAGKIRLQSMLEDSGDKVVEAIKPQLKTGRKWKVQEAMDSAKESLKIREITGHTQTNRQGLGVTKTEWWSKAKGKAKRDMIIQEMRKEEDQKRLQKAVQQSQQGQWTTWENALQRSLTWNDIWHMAPLRISFILRSAYDLLPSNANLVKWGKTDDPACPLCHEKQTVEHVLSSCKVALAQGRYTWRHNQVLKEIVQVVWASTNTTKGRIRTPKAPATFFTAGGSKSWPRTTVPLEACRQSLLDGANDWECTADLPEWKSHPEIISKSGMRPDIVVHSKSTKQLIMIELTVPYENRMEAAQIYKTEKYADLANSLRREGYLVKVLTAEIGARGFVGTSAYSLMKQLSVAGKEKTKP

SEQ ID NO: 25492 - protein, 1076 aa, Conus ventricosus
MCLWKAFRYHPWHEDPQNKMGCVKTHLNEQQRTASADKTSEDQGQDLNHSAKDIHAVGSDEEFTQALDARRLKLNLPRANETEDWEKLDAKIVQRLDALIGKSTLEHKLATYGDIVYATCRDAYGVKLPKEKTPPKKSRRQEKMDKIRVQKNNLKKQMKTALPAKKQSLEKLWEDLKEKHSALSKAESARKRKSKKKKTQERFFRDPFQFARTLFEQPKSGTLSVDKGVLEQHLRKTYSDSQSKAPLDIQDLVWPTNPEEQFNGKPPTLAEIKKVVDKARAKSSPGPNGIPYQLYKKCPKVLEWLHRLLRSAWRNQKISGQWMTADGVYIPKEQNSSDISQFRPISLLNVEGKIFFSVMAARLTKYLMENKYLDVSVQKGGIPGVAGCVEHATMIWDAIQKAKTEKRDLDVVWLDLANAYGSVPHEMIQLALEMYHVPKNIRDMLKKYFNGFSMRFSTKDYTTDWINLEVGIAMGCAISPILFVLAMELILKAATNNARQTDLGDGYKMPPLKAFMDDTTVISSREDETRHVLERLDDIVASSRMKFKPKKSRSLSLRKGKVAESVVFSVANQAIPTVTEEPVKSLGRWYDDTLKDTQRAKETKQMAEEGLETIDQCGLPGKYKVWCLQFMLIPKLLWPLMIYDICTSTVEAMEAKINKFTRKWLGVPPCLTDIALYCRQAKLKLPLKSILEEYKAGKIRLQSMLEDSGDKVVEAIKPQLKTGRKWKVQEAMDSAKESLKIREITGHTQTNRQGLGVTKTEWWSKAKGKAKRDMMIQEMRKEEDQKRLQKAVQQSQQGQWTTWENALQRSLTWNDIWHMAPLRISFILRSAYDLLPSNANLVKWGKTDDPACPLCHEKQTVEHVLSSCKVALAQGRYTWRHNQVLKEIVQVVWASTNTTKGRIRTPKAPATFFTAGGSKSWPRTTVPLETCRQSLLDGADDWECTADLPEWKSHPEIISKSGMRPDIVVHSKSTKQLIMIELTVPYENRMEAAQIYKTEKYADLANSLRREGYQVKVLTAEIGARGFVGTSAYSLMKQLSVAGKEKTRALKAMAEAAERCSSWIWSRRNKSELHKA

SEQ ID NO: 25493 - protein, 754 aa, Conus ventricosus
MTADGVYIPKEQNSSDISQFRPISLLNVEGKIFFSVMAARLTKYLMENKYLDVSVQKGGIPGVAGCIEHATMIWDAIQKAKTEKRDLDVVWLDLANAYGSVPHEMIQLALEMYHVPKNIRDMLKKYFNGFSMRFSTKEYTTDWINLEVGIAMGCAISPILFVLAMELILKAATNNARQTDLGDGYKMPPLKAFMDDTTVISSREDETRHVLERLDDIVASSRMKFKPKKSRSLSLRKGKVAESVVFSVANQAIPTVTEEPVKSLGRWYDDTLKDTQRAKETKQMAEEGLETIDQCGLPGKYKVWCLQFMLIPKLLWPLMIYDICTSTVEAMEAKINKFTRKWLGVPPCLTDIALYCRQAKLKLPLKSILEEYKAGKIRLQSMLEDSGDKVVEAIKPQLKTGRKWKVQEAMDSAKESLKIREITGHTQTNRQGLGVTKTEWWSKAKGKAKRDMMIQEMRKEEDQKRLQKAVQQSQQGQWTTWENALQRSLTWNDIWHMAPLRISFILRSAYDLLPSNANLVKWGKTDDPACPLCHEKQTVEHVLSSCKVALAQGRYTWRHNQVLKEIVQVVWASTNTTKGRIRTPKAPTTFFTAGGSKSWPRTTVPLETCRQSLLDGADDWECTADLPEWKSHPEIISKSGMRPDIVVHSKSTKQLIMIELTVPYENRMEAAQIYKTEKYADLANSLRREGYQVKVLTAEIGARGFVGTSAYSLMKQLSVAGKEKTRALKAMAEAAERCSSWIWSRRNKSELHKA

SEQ ID NO: 25494 - protein, 1085 aa, Conus ventricosus
MNMDQMEYPCVCGKRFATTRGMKIHRTKMGCVKTHLNEQQRTASADKTSEDQGQDLNHSAKDIHAVGSDEEFAQALDARRLKLNLPRANETEDWEKLDAKIVQRLDALIGKSTLEHKLATYGDIVYATCRDAYGVKLPKEKTPPKKSRRQEKMDKIRVQKNNLKKQMKTALPAEKQGLEKLWEDLKEKHSALSKAESARKRKSKKKKTQERFFRDPFQFARTLFEQPKSGTLSVDKGVLEQHLRKTYSDSQSKAPLDIQGLVWPTNPEEQFNGKPPTLAEIKKVVDKARAKSSPGPNGIPYQLYKKCPKVLEWLHRLLRSAWRNQKISGQWMTADGVYIPKEQNSSDISQFRPISLLNVEGKIFFSVMAARLTKYLMENKYLDVSVQKGGIPGVAGCVEHATMIWDAIQKAKTEKRDLDVVWLDLANAYGSVPHEMIQLALEMYHVPKNIRDMLKKYFNGFSMRFSTKEYTTDWINLEVGIAMGCAISPILFVLAMELILKAATNNARQTDLGDGYKMPPLKAFMDDTTVISSREDETRHVLERLDDIVASSRMQFKPKKSRSLSLRKGKVAESVVFSVANQAIPTVTEEPVKSLGRWYDDTLKDTQRAKETKQMAEEGLETIDQCGLPGKYKVWCLQFMLIPKLLWPLMIYDICTSTVEAMEAKINKFTRKWLGVPPCLTDIALYCRQAKLKLPLKSILEEYKAGKIRLQSMLEDSGDKVVEAIKPQLKTGRKWKVQEAMDSAKESLKIREITGHTQTNRQGLGVTKTEWWSKAKGKVKRDMMIQEMRKEEDQKRLQKAVQQSQQGQWTTWENALQRSLTWNDIWHMAPLRISFILRSAYDLLPSNANLVKWGKTDDPACPLCHEKQTVEHVLSSCKVALAQGRYTWRHNQVLKEIVQVVWASTNTTKGRIRTPKAPATFFTAGGSKSWPRTTVPLETCRQSLLDGADDWECTADLPEWKSHPEIISKSGMRPDIVVHSKSTKQLIMIELTVPYENRMEAAQIYKTEKYADLANSLRRKGYQAKVLTAEIGARGFVGTSAYSLMKQLSVAGKEKTRALKAMAEAAERCSSWIWSRRNKSELHKA

SEQ ID NO: 25495 - protein, 1085 aa, Conus ventricosus
MNMDQMEYPCVCGKRFATTRGMKIHRTKMGCVKTHLNEQQRTASADKTSEDQGQDLNHSAKDIHAVGSDEEFAQALDTRRLKLNLPRANETEDWEKLDAKIVQRLDALIGKSTLEHKLATYGDIVYATCRDAYGVKLPKEKTPPKKSRRQEKMDKIRVQKNNLKKQMKTALPAEKQGLEKLWEDLKGKHSALSKAEFARKRKSKKKKTQERFFRDPFQFARTLFEQPKSGTLSVDKGVLEQHLRKTYSDSQSKAPLDIQGLVWPTNPEEQFNGKPPTLAEIKKVVDKARAKSSPGPNGIPYQLYKKCPKVLEWLHRLLRSAWRNQKISGQWMTADGVYIPKEQNSSDISQFRPISLLNVEGKIFFSVMAARLTKYLMENKYLDVSVQKGGIPGVAGCVEHATMIWDAIQKAKTEKRDLDVVWLDLANAYGSVPHEMIQLALEMYHVPKNIRDMLKKYFNGFSMRFSTKEYTTDWINLEVGIAMGCAISPILFVLAMELILKAATNNARQTDLGDGYKMPPLKAFMDDTTVISSREDETRHVLERLDDIVASSRMKFKPKKSRSLSLRKGKVAESVVFSVANQAIPTVTEEPVKSLGRWYDDTLKDTQRAKETKQMAEEGLETIDQYGLPGKYKVWCLQFMLIPKLLWPLMIYDICTSTVEAMEAKINKFTRKWLGVPPCLTDITLYCRQAKLKLPLKSILEEYKAGKIRLQSMLEDSGDKVVEAIKPQLKTGRKWKVQEAMDSAKESLKIREITGHTQTNRQGLGVTKTEWWSKAKGKAKRDMIIQEMRKEEDQKRLQKAVQQSQQGQWTTWENALQRSLTWNDIWHMAPLRISFILRSAYDLLPSNANLVKWGKTDDPACPLCHEKQTVEHVLSSCKVALAQGRYTWRHNQVLKEIVQVVWASTNTTKGRIRTPKAPATFFTAGGSKSWPRTTVPLETCRQSLLDGADDWECTADLPEWKSHPEIISKSGMRPDIVVHSKSTKQLIMIELTVPYENRMEAAQIYKTEKYADLANSLRREGYQVKVLTAEIGARGFVGTSAYSLMKQLSVAGKEKTRALKAMAEAAERCSSWIWSRRNKSELHKA

SEQ ID NO: 25496 - protein, 1085 aa, Conus ventricosus
MNMDQMEYPCVCGKRFATTRGMKIHRTKMGCVKTHLNEQQRTASADKTSEDQGQDLNHSAKDIHAVGSDEEFAQALDARRLKLNLPRANETEDWEKLDAKIVQRLDALIGKSTLEHKLATYGDTVYATCRDAYGVKLPKEKTPPKKSRRQEKMDKIRVQKNNLKKQMKTALPAEKQGLEKLWEDLKEKHSALSKAESARKRKSKKKKTQERFFRDPFQFARTLFEQPKSGTLSVDKGVLEQHLRKTYSDSQSKAPLDIQGLVWPTNPEEQFNGKPPTLAEIKKVVDKARAKSSPGPNGIPYQLYKKCPKVLEWLHRLLRSAWRNQKISGQWMTADGVYIPKEQNSSDISQFRPISLLNVEGKIFFSVMAARLTKYLMENKYLDVSVQKGGIPGVAGCVEHATMIWDAIQKAKTEKRDLDVVWLDLANAYGSVPHEMIQLALEMYHVPKNIRDMLKKYFNGFSMRFSTKEYTTDWINLEVGIAMGCAISPILFVLAMELILKAATNNARQTDLGDGYKMPPLKAFMDDTTVISSREDETRHVLERLDDIVASSRMQFKPKKSRSLSLRKGKVAESVVFSVANQAIPTVTEEPVKSLGRWYDDTLKDTQRAKETKQMAEEGLETIDQCGLPGKYKVWCLQFMLIPKLLWPLMIYDICTSTVEAMEAKINKFTRKWLGVPPCLTDIALYCRQAKLKLPLKSILEEYKAGKIRLQSMLEDSGDKVVEAIKPQLKTGRKWKVQEAMDSAKESLKIREITGHTQTNRQGLGVTKIEWWSKAKGKVKRDMMIQEMRKEEDQKRLQKAVQQSQQGQWTTWENALQRSLTWNDIWHMAPLRISFILRSAYDLLPSNANLVKWGKTDDPACPLCHEKQTVEHVLSSCKVALAQGRYTWRHNQVLKEIVQVVWASTNTTKGRIRTPKAPATFFTAGGSKSWPRTTVPLETCRQSLLDGADDWECTADLPEWKSHPEIISKSGMRPDIVVHSKSTKQLIMIELTVPYENRMEAAQIYKTEKYADLANSLRREGYQAKVLTAEIGARGFVGTSAYSLMKQLSVAGKEKTRALKAMAEAAERCSSWIWSRRNKSELHKA

SEQ ID NO: 25497 - protein, 1085 aa, Conus ventricosus
MNMDQMEYPCVCGKRFATTRGMKIHRTKMGCVKTHLNEQQRTASADKTSEDQGQDLNHSAKDIHAVGSDEEFAQALDARCLKLNLPRANETEDWEKLDAKIIQRLDALIGKSTLEHKLATYGDIVYATCRDAYGVKLPKEKTPPKKSRRQEKMDKIRVQKNNLKKQMKTALPAEKQGLEKLWEDLKEKHSALSKAESARKRKSKKKKTQERFFRDPFQFARTLFEQPKSGTLSVDKGVLEQHLRKTYSDSQSKAPLDIQGLVWPTNPEEQFNGKPPTLAEIKKVVDKARAKSSPGPNGIPYQLYKKCPKVLEWLHRLLRSAWRNQKISGQWMTADGVYIPKEQNSSDISQFRPISLLNVEGKIFFSVMAARLTKYLMENKYLDVSVQKGGFPGVAGCVEHATMIWDAIQKAKTEKRDLDVVWLDLANAYGSVPHEMIQLALEMYHVPKNIRDMLKKYFDGFSMRFSTKEYTTDWINLEVGIAMGCAISPILFVLAMELILKAATNNARQTDLGDGYKMPPLKAFMDNTTVISSREDETRHVLERLDDIVASSRMKFKPKKSRSLSLRKGKVAESVVFSVANQAIPTVTEEPVKSLGRWYDDTLKDTQRAKETKQMAEEGLETIDQCGLPGKYKVWCLQFMLIPKLLWPLMIYDICTSTVEAMEAKINKFTRKWLGVPPCLTDIALYCRQAKLKLPLKSILEEYKAGKIRLQSMLEDSGDKVVEAIKPQLKTGRKWKVQEAIDSAKESLKIREITGHTQTNRQGLGVTKTEWWSKAKGKAKRDMLIQEMRKEEDQKRLQRAVQQSQQGQWTTWENALQRSLTWNDIWHMAPLRISFILRSAYDLLPSNANLVKWGKTDDPACPLCHEKQTVEHVLSSCKVALAQGRYTWRHNQVLKEIVQVVWASTNTTKGRIRTPKAPATFFTAGGSKSWPRTTVPLETCRQSLLDGADDWECTADLPEWKSHPEIISKSGMRPDIAVHSKSTKQLIMIELTVPYENRMEAAQIYKTEKYADLANSLRREGYQVKVLTAEIGAWGFVGTSAYSLMKQLSVAGKEKTRALKAMAEAAERCSSWIWSRRNKSELHKA

SEQ ID NO: 25498 - protein, 925 aa, Mormyrus iriodes
MKTASNAEQQGLQELWRDLKARHSALSKAEAARRKKSKRKKTHDRFFNGPFQFAKALFEQPKSGTLTVDKDTLEQHLRKTYSEQQKGTPLNIPGLVNPGRPTKPFNVNPPTFEEVEKVVKKARAKSSPGPNGIPYLLYKKCPKVLAWLHRMLRSAWRNKKISTHWMTADGVYIPKEQNSNTIDQFRPISLLNVEGKIFFSVMAARLTSYLLANTYLDVSIQKGGIPGVPGCLEHATMIWDAIQTAKAEKKNLDVIWLDLANAYGSVPHEMIQMSLQPYHVPPNIREMLKTYFDGFSMRFSTKEYTTSRINLDVGIAMGCAISPILFVLAMEVILKAASGNSRPADLGNGYQTPPLKAFMDDTTVISTNESYTREILDSLDEVVAAARMQFKPKKSRSLSLRKGKVDESVTFSIANQVIPTVSEEPVKSLGRWYDKSLKDTNRGKETKKMAEEGLETIEKCGLPGKYKVWCLQFMLIPKLLWPLLIYDICSSTVEAMEAKINKYTRKWLGVPPCLTDVALYCRQAKLKLPLKSILEEYKAGKARLLSMLEDSKDLVVRSVQPELKTGRKWKVKEAVESAKESLRIKEIIGHTQTNRQGLGSTKMEWWSKTKGKAKRDMVIQEIRREEDQRRLQKAVQQSQQGQWTDWESALQRSLSWNDLWHMAPLRISFILRSVYDLLPSNANLVKWGKSEDPSCPLCNGRQTVEHVLSSCNAALTQGRYTWRHNRVLKVLADAVQFNATVCNSIKNRTRHPEPGTVFHAAESKKTWPTTTTTNPLRRSCKQGLLGEADDWECTADLPECNPYPQIIRKTGLRPDIVLHSQKAKQILLIELTVPYESRIEEAHVYKTEKYADLVTGLREDGFQARVFAVEVGARGFIGSSAYDLMKHLSISGKSRTRTLRAMAEAAETSSSWIWSRRNKNQLHKA

SEQ ID NO: 25499 - protein, 1084 aa, Conus ventricosus
MNMDQMEYPCVCGKRFATTRSMKIHRTKMGCVKTHLNEQQRTASADKTSEDQGQDLNHSAKDIHAVGSDEEFAQALDARRLKLNLPRANETEDWEKLDAKIVQRLNALIGKSTLEHKLATYGDIVYATCRDAYGVKLPKEKTPPKKSRRQEKMDKIRVQKNNLKKQMKTAMPAEKQGLEKLWEDLKEKHSTLSKAESARKRKSKKKKTQERFFRDPFQFARTLFEQPKSGTLSVDKGVLEQHLRKTYSDSQSKAPLNIQGLVWPTNPEEQFNGKPPTLAEIKKVVDKARAKSSPGPNGIPYQLYKKCPKVLEWLHRLLRSAWRNQKISGQWMTADGVYIPKEQNSSDISQFRPISLLNVEGKIFFSVMAARLTKYLMENKYLDVSVQKGGIPGVAGCVEHATMIWDAIQKAKTEKRDLDVVWLDLANAYGSVPHEMIQLALEMYHVPKNIRDMLKKYFNGFSMRFSTKEYTTDWINLEVGIAMGCAISPILFVLAMELILKAATNNARQTDLGDGYKMPPLKAFMDDTTVISSREDETRHVLERLDDIVASSRMKFKPKKSRSLSLRKGKVAESVVFSVANQAIPTVTEPVKSLGRWYDDTLKDTQRAKETKQMAEEGLETIDQCGLPGKYKVWCLQFMLIPKLLWPLMIYDICTSTVEAMEAKINKFTRKWLGVPPCLTDIALYCRQAKLKLPLKSILEEYKAGKIRLQSMLEDSGDKVVEAIKPQLKTGRKWKVQEAMDSAKESLKIREITGHTQTNRQGLGVTKTEWWSKAKGKAKRDMLIQEMRKEEDQKRLQKAVQQSQQGQWTTWENALQRSLTWNDIWHMAPLRISFILRSAYDLLPSNANLVKWGKTDDPACLLCHEKQTVEHVLSSCKVALAQGRYTWRHNQVLKEIVQVVWASTNTTKGRIRTPKAPATFFTAGGSKSWPRTTVPLETCRQSLLDGADDWECTADLPEWKSHPEIISKSGMRPDIVVHSKSTKQLIMIELTVPYENRMEAAQIYKTEKYADLANSLRREGYQVKVLTAEIGARGFVGTSAYSLMKQLSVAGKEKTRALKAMAEAAERCSSWIWSRRNKSELHKA

SEQ ID NO: 25500 - protein, 1369 aa, Choaspes benjaminii
MRLRSSNTLPQAGTRNGESRPEQAVSGSPTYSGGGTVSLGPAQSETVVDRSTNTQSHPPSSFSPTHSPYHSPSSSSSYQPHPSSSISTTVSPISFDVAQEVTPVPIISIPNKRKKWSKEMNEYIMRTYFYLTNLEKDTNSYLESLHSQFTERFPNMTVSRQRLGDQRRAIVRNKLLSQDTINQIYNEVQLQHQSIQISSQQYTDNNLNTVKDQNKKRLRWTNEYNEAIMRAYYKITKLESNKTDYRKQLHQEFIATFPNLSHLSEQRIADQRRVIVNSNRIDKERLATIKQEVAEELHIRDNTLTENNDDREALVMNTDNTLTLNYDELNCLDRIDPDNTMNNIQDNAITPNKELNETFIQCLTFYKNTVPTNRHFIPKQKTSRKFSKILDYINAIILPKFINEETDFSTFQTVIYCAAWTAAKVNGARLELPPKRQGHNNVKKKTRWQIRLERKIEDLRVKIGRLTQYIHGNRSKNLTTHVQSILENYKIHTTHEEINTELYHFLDTLKQKLSVKASRLRRYNACTLRKTQNRQFLSNEQKFYRTLKNSKTVKEKPSEHVISVEKIKNFWSRIWEQRTSHDNNTEWIQNEMKRNSSLQQMEFETIPIDVVLGVINRLHNWKTPGSDQLHNFWYKKFTFIQPFLTNHINNFIKNPSDMPEYMTHGTTYLLPKASDDQLDPAKYRPITCLQTMYKILTGCLTDMIHKHIELNNILTEEQKGCRRQSQGCKEQLVIDSVVLQEAQKNKSDLYTMYIDYAKAYDSVPHTWLLKVLDIYKINPLIVTFLQNAMNKWATRLRLTLNNDTTETELIKIRRGIFQGDALSPLWFCLALNPLSIMLNLSDRGYSFNNVRADSYIDKGLKINHLLYMDDLKLYASTETDLNYLADVTERFSNDIRMKFGIDKCKINSFKAGHSHEHHYELQTGEHIDPLQEHNTYKYLGYNQSKCIHDKETKQTLTQEFKRRLTSIFKTQLNSRNTVKSINTYAIPILTYSFGIIKWTKSDLQNLQRLINTTMTKHRKHHPRSCIQRLTLPRTDGGRGIIDIHNLHNKQITKLRQYFHNRAEFSNLHNIVTHNDYKFTPLNLSSRSIQKNETIVNRQNKIDAWKQKALHGRHLLDLSQPHVDIKASNEWLKVGDLFPETEGFMQAIQDQVIETRNYQKYIMKVPNLPTDQCRKCNRTSETIQHITGACAAIVQNEYKYRHDQVVNILHQKLAVSYNLNTEPPVQYYKYKPKTVLENATYKLYFDRAILTDKTIHYNRPDITVVDKINKTAFIIDVAIPNTHNIQSTISEKLTKYTELKDEITRMWRLKKVTIVPIVLSTTGVIPKQLHQSLKTINIHPKTYTILQKAVILNTCRIVRKFLQNDISNHT

SEQ ID NO: 25501 - protein, 1144 aa, Ouleus salvina
MAELSSHVVNEGNVFFVYLPIAPDHGIQCPLCVRSGSFKGVRKIENFNRHCKDAHPTMSVTYKCCRCGFVAPEGKRYPRKIVTQHCVTCVPSVAPAPSGMDRERRLAIRRRLGTAPTDDVQAADSAQGPGESTTEGISSGTEVASVSDLPAQEGDSIDRGPAQESPNTLDPNPTHLDPLMPSARPREVGQRPVEPESGSGSREVSITPVVTESRLPTAILRGPTPEQKALVEELDAARDPEQLEALAIRVADFLGRLTEPRPDREESRRRHPRHAVPDGHQSDYVGEATRLQRLYRTNRKGAMRRILCGPPSSCNVRMAIVEEHFRTLASARNGLDEWPNVFDTSPPTESSSVRLCEPFTRRSVNQKIGSRTNSAPGPDRVTYRDLRRADPGSYVLTALYNAVWRIERVPEIWKTSHTILIHKKGDEAQLDNWRPIALGNTCPKLFAALLADRLKSWATANGRFSASQKGFRHFEGCHEHNFVLQEAIQDAKRNRKEAVFVWLDLANAFSSVPHSSIARALSGHGLPDKMKNIINCLTSGNRTFFKIGDQLSEPIDLQAGVRQGCPLSPDIFNLTLEVVLREIASVGEAYSFGGEKVPCLAYADDIVLLADSAEGMGRLLRAAEGAASALGLQFKPAKCAALHIVGGATLDTEFVVGDEPIRCLGPDDTYNHLGVPTGLQIRQTPIGDIAGVISEARKVDESLLAPWQKLDAVGTFILPCLDFIMRGGGIDREYLNEADRVVKKLAKKWMYLPQRASAEIVFLPPSQGGGGLLPLADLCDIHTVAHGYKMLHASDQVVSGIAKTELRRTVTERLKNPASNIDVARYLSGDLDFPRSSGGGTFWTNVRKSARRLHHKMGLRWTWCQASQCIQVSLKNRRPLGPDDKGQVYRQLRMGLTDVYAHRLVSKREQGKVIEATKESRPSNHFLRTGRNTRFCDWRFIHRARLGVLPLNAAKRWQSSADKRCRRCGHNLETLPHVLNHCGIHSAARQLRHNNVQDRLVKAAKCPGTITVNRTVEGTTGNPGTLRPDITVRDETNKTITIVDVAVPFENRKEAISAVRREKLQKYAPLAEQLTAQGYRVAVEAFLVGSLGAWDRGNERVMDRLRVGRRYAAMMRRFMVSDTIRWSRDIYVEHVSGHRQYERQ

SEQ ID NO: 25502 - protein, 870 aa, Papilio phestus
MLDVHNIQLTFICPSCYTERGSVREVTAHMRSRECNRTISITPLTENEFLNPPQVHTLPAEVLKPRLIAEIESLQESTFRRLAREALYSQQGSNNVTTIADHLTRLCKPKSQPRSRRRRQNRRNRSTNQVEVTFKRNQWLWHRSKSKCYSAIMNGDSDSNLDINEAEAYFQDLFNQSGTCSTDLLPTHTAESIPLTSFFIYKEEVEQYLRKKSRSAPGPDGLRTSDLIPKLGEWTILINLCLYHQRIPLSWHLSRTTLIPKCYSSNPADYRPISVGPIGYRALASVLSRRLLHSVDLHDSQRGFIEDDGLHQAITTVRFMAAQNKPMVSIDLRKAFDSVPHSTLLNACKANGLDRKSLRLITNIYTDASTILQVGGQRSGPIPLRRGVRQGDPLSPLLFNFVIDQTLRQLGRCNIGVQLGNRVLAALAYADDIILFADKHEDLQVLTNIANESLSSLGLTINWSKSFSNIPIDRLPTRKVFKYLGAYIDPTGDSRMNINEFTEKVAKLDQGVLRGNQKLFLLRSHLLPSFYHRLINECTTATALREMSTILRKYVRKWTKLPATTCSSFIHLAVRNGGLGIPHLRWKVPELTRNRLMKLQKCRVWFVQEIIKTGWYRAELFRVDALCPLGSTEKWLLHDISLSNPGHMAFPVGGSRFANRHLSGNSFVEGKKFYRLVQMRSAVDNTNTRRARPPLICQKCDSRLPATLQHILCQCKDNERSIRRRHDRVLDEIISHCKQHKLRFTKEPSLHGGLRPDLTVILPNGELLCLDVSVVFELSKDSLTKACKLKNTKYSPYLPEIADQMGHNFTQNSCFSYGLVFGARGSVAPQTLNVLEKSLKMPKWRIDKIINLIITFSLDLFEHSPLCSRA

SEQ ID NO: 25503 - protein, 883 aa, Graphium doson
MLDTHNIQLTFICPFCYTERGSVREVTAHMRKRECNRTVSITPLTEEELLNPPQLPVRLAEPLKPKLITDIESLENSTFRRLAREALYSQLGSNNVTTIADHLTRLCKPKSQPRSRRRRRNRKPTNQTEATFKRNQWLWYRSKSKCYSAIMNGDTDSSLDINEAETFFGDLFSQSGTCTVNLTPTRRAESIPLTSFYIYEEEIAAYLKKKNRSAPGPGGLRTGDLLPKLKEWTILINLCLYHQRIPLSWHSSRTTLIPKSNSNRPEDHRPISVGPIGYRALASVLSRRLIHAVDLHNSQRGFIEDDGLYQAATTVRFMASQGKPMVSIDLRKAFDSVPHATLLKACTANGLDRKSIRLITDIYTGATTTIQVGGQRSRAIPLCRGVRQGDPFSPLLFNLVIDQTLRQLDRCNLGVRFGNGTLSALAYADDIILCADNTQDLRTLTNIAADSLSSLGLTINWSKSFSNVPVLDRLPIRSTFKYLGAHIDPRGESRMTVNELNEIVATLDRGILRGNQKLFFLRFHLLPSIYHRLINENARGTILREMSTLLRNYVRKWTKLPATTCSSFIHLSTSNGGLGIPNLRWKIPELTRDRLVKLQKSRVWFIQEVIKSRWYRDELYRVDALCPIGSTEKWLIQDMALANPGHMAFLTGGAKFANRHLTGGSFVEGKRFYRLAQLRSMADNPNSRRARSPLVCNKCNDEVAATLQHILCHCEDNERNIRNRHDRVLKEVISHCNKAGLAYTKEPTLQDGLRPDLIVTMATGETLCLDVTIVFELNKNSLIQACQIKADKYKRCLPEIAATFAPDSSSKCDTFGLVFGARGSIAAQTLNVLTTKLKMPKWRIERMINLIITFSLEMFEHSPLCSRASANNSHSSPQSTGAL

SEQ ID NO: 25504 - protein, 1141 aa, Penaeus indicus
MSNYSISDNGVNETGSMCEGSSPGRCLMAQQHEPGRHQTTARRTTTRKWSQEENRIVIKCYFESVPSRKGYRKRMLAAWQEREMFIVTEQRLVDQANQIRKKKWLSDLEMEEIQKEVEEGQYREADESTDVLGSETQVDQEQANVALNGGECNAQASEQIEQDIDRPNIDPDGKFVLVEGCETSPEEICTIEKMESILRKEKVRLPPLRGIDRGKVMKAVQKVNAVLAKVVPKDISATNDLLYAGAAVVTEMVGMRNLASSNKREPWWKRRLEKQVRELNIDLGRVNTLIQNEKIKHKYKYDLERRYKVRQKGLKTIKEEIKQRISAKVSKIKRYSSRINQYQQNRVFQNNQKRFFSHLDGEGEQQNKAPDAEQAKEFWSAIWSKEVNHNKDAKWLKDFKKDFYQEEGQEKIEITTEKIRKILQKLPNWKAPGLDMVQGFWFKNFRSMHIHLKNNLSRCLIEGKVPSWMTKGRTVLIQKDKTKGNEASNYRPITCLPIAWKILTGILAEEIYCFMEKKAMLPEEQKGGRKGSMGTADLLYIDRMIMKEVKARKRSIAVAWIDYRKAYDMVPHSWTVECLESIGVNEEVIVFMKECMKSWRVELTSGSDVLGEVQINRGIFQGDSLSPLLFIIALLPLTSILRKSKPGYKFASGEKINHLLFMDDLKLYGESEKALDSLVQTVRIFTSDIRMEFGIEKCATMIQKRGKVVRSEGIKLPDEKVIKSLQDNKGYKYLGILQVDKVKGQEMKEKITKEYKRRVRKVLETKLNGENMIKGINIWAVSLIRYSAAFLDWTKEEKQGIDRKTRKLITMHKGLHPKSNTNRLYIPRKEGGRGLLSIEDTVDLAELGLKSYVRNSCERLLVAARQIEDCQGESVVDFKNRKKNERQKEWKDKTLHGQFLRQTDDEAGKERWMWLIGTGIKRETESLIMAAQEQAIRTNVIKAKIDNTQEESKCRMCGKVDETVNHIISECNMLAQREYKRRHDCVGRKIHWELCRKYGLAASERWYEHQPETVTENESCKLLWDFNVQTDHVIQARRPDVILIDKEKKECKIIDFAIPYDSRVNAKEMEKIEKYQDLAREVQKLWNMRTKVIPIIIGALGTTPKKLSKRLDDLGIGTRIVELQKTVIIHSARILRKVLEI

SEQ ID NO: 25505 - protein, 1117 aa, Asterias rubens
MLIMSAMEHQFNGERVTNSQRGSPSPDLVGMPEQVLPDRIQTAHNGIRGGTRRKWSKNDNKIAMDCYIKSEPDKRGYRRRMISLWQDKGMFEISEQRLADQISTIKRNQWLTNVEIEEMRRIVQAESDGTDIVNHQIPEEAAAASSQSEDEVNQPGLRNGQDDDGIDDEEGVEFTEEEVQIKARLQEVMEAAKGSNGWSIPALRRVPRTNRLIFAGAVVVGEKLGVEVSQQGNSTPWWKRRLEGQIKDLRRDLSRIEQMNKGLLNSSDLRNTIMTKYNVKRKGVSVVIEEIKQRVKAKAAKVKRYDDRVRQFHQNRLFNTNQRQLFKELDGKADSTQAVPRPTEANTFWGGIWDKPVKHNRQAEWLTDVKDELRGVQQQEGFQIDVDKVKRQIKKVPNWKAPGMDHVHGYWLKNFRSLHERMALQLQDCLVQGKVPSWMTEAKTVLIMKDVKKGNIASNYRPITCLPVMYKLLTSMIAEDLYRHMDDQQLFPEEQKGCKKRSRGTKDQVIIDKAVLKDCRSRKTNLAMAWIDYKKAYDMVSHTWIMECLDMVGVADAVKRLLGESMKTWRTNLTANDDNLGKVCIRRGIFQGDSLSPLLFVLAMMPLSMILRKVSAGYVMKKDGCKINHLLFMDDLKLFAKNEAEIDSLVQTVRIFSDDIGMQFGLEKCASMTMKRGKRVHSDGIALPDGAQLRALGEEESYRYLGVLESDHVLHKESKVRLKAEYIRRVKKCLKSKLNGGNMIKAINTWAVSLMRYSAGIVEWTKEDLDVTDRRTRKLMTMHRMLHPRSNVSRLYLPRSEGGRGLLSVADSVNIECRSLHCHVRRTEESLLKVAQRYTRADEVGPKEYKRERKEERHQDWRNKPLHGRFLRCTEEVASSKSWNWLKSGELKKETEGLITAAQDQSLRTNVMKARIEKANVSPMCRMCNKAEETVFHIVSECSKMAQTEYKGRHDKLAKVIHWDLCKKYGVKVLAKWYDHVPEKVVENDQVKILWDFNIQTDHVIQHRRPDVVLLDKTKKMCHLIDIAVPGDIRVASKEMEKIEKYQDLARELRKIWQVKVKVVPVVVGALGTIPKALGKHLDEIGTNVRVDLLQKAALLGTARILRKTLEILGYGT

SEQ ID NO: 25506 - protein, 1138 aa, Marthasterias glacialis
MIMTSAMEHQVNGEIVTNSQRGSPSPNLVGMPEQVPPDRIQTAQNRIRVATRRKWSKNDNKIAMECYIKSVPDKRGYRKRMFSLWQDKEMFDISEQRLADQISTIKRNRWLTNVEIEEMRRKVQAESNRTEIVNHHVPEDVTAASSQTEDEVDLPGLQDDQDDGGIDEDGCLELTEEEVQIKTRVQEVMRAAKGSNGWSIPALRRVPRKRLTDMSAVVSKVLGSVSTNNLLETNRLMFAGAVVVGEQLGVKASSPEHENSTPWWKRRLEGQIKDLRRDLSRLEQISKGLIKGSDWRNTIMTKYNVKGKGVSVVIEEIKQRIKAKAAKVKRYDDRVRQFHQNRLFNTNQRQLFKELDGKIDNTQAGPRTAEARTFWGGIWDRPVQHNRQADWLTDVKDELRGVQQQEGFQIDVDKVKRQVRKVPNWKAPGPDHVHGYWLKNFRSLHERMALQLQDCLVQGKVPTWMTEARTVLIMKDVKKGNIASNYRPITCLPVMYNLLTSMIAEDLYRHMDDHQLFPEEQKGCKKRSRGTKDQLIIDKAVLKDCRSRKTNLAMAWIDYKKAYDMVSHTWIMECLDMVGVADAVKRLLSESMKTWRTNLTANNDSLGKVCIRRGIFQGDSLSPLLFVLALMPLSMILRKVSAGYVMKRDGCKINHLLFMDDLKLFAKNEAEIDSLVQTVRIFSDDIGMQFGLEKCASMTMKRGKRVHSDGIALPDGAQMRALGEEESYRYLGVLESDHVLHEESKVRLRAEYIRRVRKCLKSKLNGGNMVKAINTWAVSLMRYSGGIIEWTKEDLDVTDRRTRKLMTMHGMLHPRANVSRLYLPRSEGGRGLLSVADSVNIERRSLHRHVRSTEENLLKIARMYTTADEAGPKEYKRERKEERHQDWRKKPLHGRFLRCTEEVASCKSWNWLKSGELKKETEGLITAAQDQSLRTNVMKARIEKTNVSRMCRMCNKAEETVFHIVSECSKMAQTEYKGRHDKLAKVIHWDLCKKYGVQVHAKWYDHVPEKVVETDAVKILWDFNIQTDHVIEHRRPDVVVLDKTKKMCHIIDIAVPGDIRVASKEKEKIEKYQDLARELRKIWQVKVKVVPVVVGALGTIPKALDKHLDQIGTTVRVDLLQKAALLGTARILRKTLEI

SEQ ID NO: 25507 - protein, 1136 aa, Asterias rubens
MLIMSAMEHQFNGERVTNSQRGSPSPDLVGMPEQVLPDRIQTAHNGIRGGTRRKWSKNDNKIAMDCYIKSEPDKRGYRRRMISLWQDQGMFEISEQRLADQISTIKRNQWLTNVEIEEMRRIVQAESDGTDIVNHQIPEEAAAASSQSEDEVNQPGLRNGQDDDGIDDEEGLEFTEEEVQIKARLQEVMEAAKGSNGWSIPALRRVPRKRLTEMSAVVSKVLGSVSTDNLSETNRLIFAGAVVVGEKLGVEVSQQGNSTPWWKRRMEGQIKDLRRDLSRIEQMNKGLLNSSDLRNTIMTKYNVKRKGVSVVIEEIKQRVKAKAAKVKRYDDRVRQFHQNRLFNTNQRQLFKELDGKADSTQAVPRPTEAKTFWGGIWDKPVKHNRQAEWLTDVKDELRGVQQQEGFQIDVDKVKRQIKKVPNWKAPGMDHVHGYWLKNFRSLHERMALQLQDCLVQGKVPSWMTEAKTVLIMKDVKKGNIASNYRPITCLPVMYKLLTSMIAEDLYRHMDDQQLFPEEQKGCKKRSRGTKDQLIIDKAVLKDCRSRKTNLAMAWIDYKKAYDMVSHTWIMECLDMVGVADAVKRLLGESMKTWRTNLTANDDNLGKVCIRRGIFQGDSLSPLLFVLAMMPLSMILRKVSAGYVMKKDGCKINHLLFMDDLKLFAKNEAEIDSLVQTVRIFSDDIVMQFGLEKCASMTMKRGKRVHSDGIALPDGAQLRALGEEESYRYLGVLESDHVLHKESKVRLKAEYIRRVKKCLKSKLNGGNMIKAINTWAVSLMRYSAGIVEWTKEDLDVTDRRTRKLMTMHGMLHPRSNVSRLYLPRSEGGRGLLSVADSVNIECRSLHCHVRRTEESLLKVAQRYTRADEVGPKEYKRERKEERHQDWRNKPLHGRFLRCTEEVASSKSWNWLKSGELKKETEGLITAAQDQSLRTNVMKARIEKANVSPMCRMCNKAEETVFHIVSECSKMAQTEYKGRHDKLAKVIHWDLCKKYGVKVLAKWYDHVPEKVVENDQVKILRDFNIQTDHVIQHRRPDVMLLDKTKKMCHLIDIAVPGDIRVASKEMEKIEKYQDLARELRKIWQVKVKVVPVVVGALGTIPKALGKHLDEIGTNVRVDLLQKAALLGTARILRKTLEI

SEQ ID NO: 25508 - protein, 1075 aa, Marthasterias glacialis
MECYIKSVPDKRGYRKRMFSLWQDKEMFDISEQRLADQISTIKRNRWLTNVEIEEMRRKVQAESNRTEIVNHHVPEDVTAASSQTEDEVDLPGLQDGQDDGGIDEDGCLELTEEEVQIKTRVQEVMRAAKESNGWSIPALRRVPRKRLTDMSAVVSKVLGSVSTNNLLETNRLMFAGAVVVGEKLGVKASSPENENSKPWWKRRLEGQIKDLRRDLSRLGQISKGLIKGSDWRNRIMTKYNVKGKGVSVVIEEIKQRVKAKAAKVKRYDDRVRQFHQNRLFNTNQRQLFKELDGNIDNTQAGPRPAEARTFWGGIWDRPVQHNRQADWLTDVKDELRGVQQQEGFQIDVDKVKRQVRKVPNWKAPSPDHVHGYWLKNFCSLHERMALQLQDCLVQGKVPTWMTEARTVLIMKDVKKGNIASNYRPITCLPVMYKLLTSMIAEDLYRHMDDHQLFPEEQKGCKKRSRGTKDQLIIDKAVLKDCRSRKTNLAMAWIDYKKAYDMVSHTWIMECLDMVGVADAVKRLLSESMKTWRTNLTANNDSLGKVCIRRGIFQGDSLSPLLFVLALMPLSMILRKVSAGYVMKRDGCKINHLLFMDDLKLFAKNEAEIDSLVQTVRIFSDDIGMQFGLEKCASMTMKRGKRVHSDGIALPDGAQMRALGEEESYRYLGVLESDHVLHEESKVRLRAEYIRRVKKCLKSKLNGGNMIKAINTWAVSLMRYSGGIIEWTKEDLDVTDRKTRKLMTMHGMLHPRANVSRLYLPRSEGGRGLLSVADSVNIERRSLHRHVRSTEENLLKIARMYTTADEAGPKEYKRERKEERHQDWRNKPLHGRFLRCTEEVASCKSWNWLKSGELKKETEGLITAAQDQSLRTNVMKARIEKTNVSPLCRMCNKAEETVFHIVSECSKMAQTEYKGRHDKLAKVIHWDLCKKYGVQVHAKWYDHVPEKVVETDEVKILWDFNIQTDHVIEHRRPDVVVLDKTKKICHIIDIAVPGDIRVASKEMEKIEKYQDLARELRKIWQVKVKVVPVVVGALGTIPKALENHLGQIGTTVRVDLLQKAALLGTARIMRKTLEI

SEQ ID NO: 25509 - protein, 1138 aa, Asterias rubens
MLIMSAMEHQFNGERVTNSQRGSPSPDLVGMPEQVLPDRIQTAHNGIRGGTRRKWSKNDNKIAMDCYIKSEPDKRGYRRRMISLWQDKGMFEISEQRLADQISTIKRNQWLTNVEIEEMRRIVQAESDGTDIVNHQIPDPEEAAAASSQSEDEVNQPGLRNGQDDDGIDDEEGVEFTEEEVQIKHRLQEVMEAAKGSNGWSIPALRRVPRKRLTEMSAVVSKVLGSVSTDNLSETNRLIFAGAVVVGEKLGVEVSQQGNSTPWWKRRLEGQIKDLRRDLSRIEQMNKGLLNSSDLRNTIMTKYNVKRKGVSVVIEEIKQRVKAKAAKVKRYDDRVRQFHQNRLFNTNQRQLFKELDGKADSTQASPRPTEAKTFWGGIWDKPVKHNRQAEWLTDVKDELRGVQQQEGFQIDVDKVRRQIKKVPNWKAPGMDHVHGYWLKNFRSLHERMALQLQDCLVQGKVPSWMTEAKTVLIMKDVKKGNVASNYRPITCLPVMYKLLTSMIAEDLYRHMDDQQLFPEEQKGCKKRSRGTKDQLIIDKAVLKDCRSRKTNLAMAWIDYKKAYDMVSHTWIMECLDMVGVADAVKRLLGESMKTWRTNLTANDDNLGKVCIRRGIFQGDSLSPLLFVLALMPLSMILRKVSAGYVMKKDGCKINHLLFMDDLKLFAKNEAEIDSLVQTVRIFSDDIGMQFGLEKCASMTMKRGKRVHSDGIALPDGTQLRALGEEESYRYLGVLESDHVLHKESKVRLKAEYIRRVKKCLKSKLNGGNMIKAINTWAVSLMRYSAGIVEWTKEDLDVTDRRTRKLMTMHGMLHPRSNVSRLYLPRSEGGRGLLSVADSVNIERRSLHCHVRRTEESLLKVAQRFTRADEVGPKEYKRERKEERHQDWRNKPLHGRFLRCTEEVASSKSWNWLKSGELKKETEGLITAAQDQSLRTNVMKARIEKANVSPMCRMCNKAEETVFHIVSECSKMAQTEYKGRHDKLSKVIHWDLCKKYGVKVLAKWYNHVPEKVVETDQVKILWDFNIQTDHVIQHRRPDVVLLDKTKKMCHLIDIAVPGDTRVASKEMEKIEKYQDLARELRKIWQVKVKVVPVVVGALGTIPKALGKHLDEIGTNVRVDLLQKAALLGTARILRKTLEI

SEQ ID NO: 25510 - protein, 1138 aa, Marthasterias glacialis
MIMTSAMEHQVNGEIVTNSQRGSPSPDLVGMPEQVPPDRIQTAQNRIRVATRRKWSKNDNKIAMECYIKSVPDKRGYRKRMVSLWQDKEMFDISEQRLADQISTIKRNRWLTNVEIEEMRRKVQAESSRTEIVNHHVPEDVTAASSQTEDEVDLPGLQDGQDDGGIDEDGCLELTEEEVQIKTRVQEVMRAAKGSNGWSIPALRRVPRKRLTDMSAVVSKVLGSVSTNNLLETNRLMFAGAVVVGEKLGVKASSPEHENSTPWWKRRLEGQIKDLRRDLSRLEQISKGLIKGSDWRNTIMTKYNVKGKGVSVVIEEIKQRVKAKAAKVKRYDDRVRQFHQNRLFNTNQRQLFKELDGKIDNTQAGPRPAEARTFWGGIWDRPVQHNRQADWLTDVKDELRGVQQQEGFQIDVDKVKRQVRKVPNWKAPGPDHVHGYWLKNFRSLHERMALQLQDCLVHGKVPTWMTEARTVLIMKDVKKGNIASNYRPITCLPVMYKLLTSMIAEDLYRHMDDHQLFPEEQKGCKKRSRGTKDQLIIDKAVLKDCRSRKTNLAMAWIDYKKAYDMVSHTWIMECLDMVGVADAVKRLLSESMKTWRTNLTANNDSLGKVCIRRGIFQGDSLSPLLFVLALMPLSMILRKVSAGYVMKRDGCKINHLLFMDDLKLFAKNEAEIDSLVQTVRIFSDDIGMQFGLEKCASMTMKRGKRVHSDGIALPDGAQMRALGEEESYRYLGVLESDHVLHEESKVRLRAEYIRRVRKCLKSKLNGGNMVKAINTWAVSLMRYSGGIIEWTKEDLDVTDRRTRKLMTMHGMLHPRANVSRLYLPRSEGGRGLLSVADSVNIERRSLHRHVRSTEENLLKIARMYTTADEAGPKEYKRERKEERHQDWRNKPLHGRFLRCTEEVASCKSWNWLKSGELKKETEGLITAAQDQSLRTNVMKARIEKTNVSPMCRMCNKAEETVFHIVSECSKMAQTEYKGRHDKLAKVIHWDLCKKYGVQVHAKWYDHVPEKVVETDAVKILWDFNIQTDHVIEHRRPDVVVLDKTKKMCHIIDIAVPGDIRVASKEKEKIEKYQDLARELRKIWQVKVKVVPVVVGALGTIPKALDKHLDQIGTTVRVDLLQKAALLGTARILRKTLEI

SEQ ID NO: 25511 - protein, 1141 aa, Marthasterias glacialis
MIMTSAMEHQVNGEIVTNSQRGSPSPDLVGMPEQVPPDRIQTAQNRIRVATRRKWSKNDNKIAMECYIKSVPDKRGYRKRMFSLWQDKEMFDISEQRLADQISTIKRNRWLTNVEIEEMRRKVQAESNRTEIVNHHVPEDVTAASSQTEDEVDLPGLQDGQDDGGIDEDGCLELTEEEVQIKTRVQEVMRAAKGSNGWSIPALRRVPRKRLTDMSAVVSKVLGSVSTNNLLETNRLMFAGAVVVGEKLGVKASSPEHENSTPWWKRRLEGQIKDLRRDLSRLEQISKGLIKGSDWRNTIMTKYNVKGKGVSVVIEEIKQRVKAKAAKVKRYDDRVRQFHQNRLFNTNQRQLFKELDGKIDNTQAGPRPAEARTFWGGIWDRPVQHNRQADWLTDVKDELRGVQQQEGFQIDVDKVKRQVRKVPNWKAPGPDHVHGYWLKNFRSLHERMALQLQDCLVQGKVPTWMTEARTVLIMKDVKKGNIASNYRPITCLPVMYKLLTSMIAEDLYRHMDDHQLFPEEQKGCKKRSRGTKDQLIIDKAVLKDCRSRKTNLAMAWIDYKKAYDMVSHTWIMECLDMVGVADAVKRLLSESMKTWRTNLTANNDSLGKVCIRRGIFQGDSLSPLLFVLALMPLSMILRKVSAGYVMKRDGCKINHLLFMDDLKLFAKNEVEIDSLVQTVRIFSDDIGMQFGLEKCASMTMKRGKRVHSDGIALPDGAQMRALGEEESYRYLGVLESDHVLHEESKVRLRAEYIRRVRKCLKSKLNGGNMVKAINTWAVSLMRYSGGIIEWTKEDLDVTDRRTRKLMTMHGMLHPRANVSRLYLPRSEGGRGLLSVADSVNIERRSLHRHVRSTEENLLKIARMYTTADEAGPKEYKRERKEERHQDWRNKPLHGRFLRCTEEVASCKSWNWLKSGELKKETEGLITAAQDQSLRTNVMKARIEKTNVSPMCRMCNKAEETVFHIVSECSKMAQTEYKGRHDKLAKVIHWDLCKKYGVQVHAKWYDHVPEKVVETVEVKILWDFNIQTDHVIEHRRPDVVVLDKTKKMCHIIDIAVPGDIRVASKEMEKIEKYQDLARELRKIWQVKVKVVPVVVGALGTIPKALEKHLDQIGTTVRVDLLQKAALLGTARILRKTLEIICH

SEQ ID NO: 25512 - protein, 1138 aa, Asterias rubens
MLIMSAMEHQFNGERVTNSQRGSPSPDLVGMPEQVLPDRIQTAHNGIRGGTRRKWSKNDNKIAMDCYIKSEPDKRGYRRRMISLWQDKGMFEISEQRLADQISTIKRNQWLTNVEIEEMRRIVQAESDGTDIVNHQVPDPEEAAAASSQSEDEVNQPGLRNGQDDDGIDDEEGVEFTEEEVQIKHRLQEVMEAAKGSNGWSIPALRRVPRKRLTEMSAVVSKVLGSVSTDNLSETNRLIFAGAVVVGEKLGVEVSQQGNSTPWWKRRLEGQIKDLRRDLSRIEQMNKGLLNSSDLRNTIMTKYNVKRKGVSVVIEEIKQRVKAKAAKVKRYDDRVRQFHQNRLFNTNQRQLFKELDGEADSTQASPRPTEAKTFWGGVWDKPVKHNRQAEWLTDVKDELRGVQQQEGFQIDVDKVRRQIKKVPNWKAPGMDHVHGYWLKNFRSLHERMALQLQDCLVQGKVPSWMTEAKTVLIMKDVKKGNVASNYRPITCLPVMYKLLTSMIAEDLYRHMDDQQLFPEEQKGCKKRSRGTKDQLIIDKAVLKDCRSRKTNLAMAWIDYKKAYDMVSHTWIMECLDMVGVADAVKRLLGESMKTWRTNLTANDDNLGKVCIRRGIFQGDSLSPLLFVLALMPLSMILRKVSAGYVMKKDGCKINHLLFMDDLKLFAKNEAEIDSLVQTVRIFSDDIGMQFGLEKCASMTMKRGKRVHSDGIALPDGTQLRALGEEESYRYLGVLESDHVLHKESKVRLKAEYIRRVKKCLKSKLNGGNMIKAINTWAVSLMRYSAGIVEWTKEDLDVTDRRTRKLMTMHGMLHPRSNVSRLYLPRSEGGRGLLSVADSVNIERRSLHCHVRRTEESLLKVAQRYTRADEVGPKEYKRERKEERHQDWRNKPLHGRFLRCTEEVASSKSWNWLKSGELKKETEGLITAAQDQSLRTNVMKARIEKANVSPMCRMCNKAEETVFHIVSECSKMAQTEYKGRHDKLTKVIHWDLCKKYGVKVLAKWYNHVPEKVVETDQVKILWDFNIQTDHVIQHRRPDVVLLDKTKKMCHLIDIAVPGDTRVASKEMEKIEKYQDLARELRKIWQVKVKVVPVVVGALGTIPKALGKHLDEIGTNVRVDLLQKAALLGTARILRKTLEI

SEQ ID NO: 25513 - protein, 1138 aa, Marthasterias glacialis
MIMTSAMEHQVNGEIVTNSQRGSPSPDLVGMPEQVPPDRIQTAQNRIRVATRRKWSKNDNKIAMECYIKSVPDKRGYRKRMFSLWQDKEMFDISEQRLADQISTIKRNRWLTNVEIEEMRRKVQAESNRTEIVNHHVPEDVTAASSRTEDEVDLPGLQDGQDDGGIDEDGCLELTEEEVQIKTRVQEVMRAAKGSNGWSIPALRRVPGKRLTDMSAVVSKVLGSVSTNNLLETNRLMFAGAVVVGEKLGVKASSPEHENSTPWWKRRLEGQIKDLRRDLSRLEQISKGLIKGSDWRNRIMTKYNVKGKGVSVVIEEIKQRVKAKAAKVKRYDDRVRQFHQNRLFNTNQRQLFKELDGNIDNTQAGPRPAEARTFWGGIWDRPVQHNRQADWLTDVKDELRGVQQQEGFQIDVDKVKRQVRKVPNWKAPGPDHVHGYWLKNFRSLHERMALQLQDCLVQGKVPTWMTEARTVLIMKDVKKGNIASNYRPITCLPVMYKLLTSMIAEDLYRHMDDHQLFPEEQKGCKKRSRGTKDQLIIDKAVLKDCRSRKTNLAMAWIDYRKAYDMVSHTWIMECLDMVGVADAVKRLLSESMKTWRTNLTANSDSLGKVCIRRGIFQGDSLSPLLFVLALMPLSMILRKVSAGYVMKRDGCKINHLLFMDDLKLFAKNEAEIDSLVQTVRIFSDDIGMQFGLEKCASMTMKRGKRVHSDGIALPDGAQMRALGEEESYRYLGVLESDHVLHEESKVRLRALYIRRVKKCLQSKLNGGNMIKAINTWAVSLMRYSGGIIEWTKEDLDVTDRRTRKLMTMHGMLHPRANVSRLYLPRSEGGRGLLSVADSVNIERRSLHRHVRSTEENLLKIARMYTTADEAGPKEYKRERKEERHQDWRNKPLHGRFLRCTEEVASFKSWNWLKSGELKKETEGLITAAQDQSLRTNVMKARIEKTNVSPMCRMCNKAEETVFHIVSECSKMAQTEYKGRHDKLAKVIHWDLCKKYGVQVHAKWYDHVPEKVVETDEVKILWDFNIQTDHVIEHRRPDVVVLDKTKKMCHIIDIAVPGDIRVASKEMEKIEKYQDLARELRKIWQVKVKVVPVVVGALGTIPKALEKHLDQIGTTVRVDLLQKAALLGTARILRKTLEI

SEQ ID NO: 25514 - protein, 1136 aa, Asterias rubens
MLIMSAMEHQFNGERVTNSQRGSPSPDLVGMPEQVLPDRIQTAHNGIRGGTRRKWSKNDNKIAMDCYIKSEPDKRGYRRRMISLWQDKGMFEISEQRLADQISTIKRNQWLTNVEIEEMRRIVQAESDGTDIVNHQIPEEAAAASSQSEDEVNQPGLRNGQDDDGIDDEEGVEFTEEEVQIKARLQEVMEAAKGSNGWSIPALRRVPRKRLTEMSAVVSKVLGSVSTDNLSETNRLIFAGAVVVGEKLGVEVSQQGNSTPWWKRRLEGQIKDLRRDLSRIEQMNKGLLNSSDLRNTIMTKYNVKRKGVSVVIEEIKQRVKAKAAKVKRYDDRVRQFHQNRLFNTNQRQLFKELDGKADSTQAVPRPTEAKTFWGGIWDKPVKHNRQAEWLTDVKDELRGVQQQEGFQIDVDKVKRQIKKVPNWKAPGMDHVHGYWLKNFRSLHERMALQLQDCLVQGKVPSWMTEAKTVLIMKDVKKGNIASNYRPITCLPVMYKLLTSMIAEDLYRHMDDQQLFPEEQKGCKKRSRGTKDQLIIDKAVLKDCRSRKTNLAMAWIDYKKAYDMVSHTWIMECLDMVGVADAVKRLLGESMKTWRTNLTANDDNLGKVCIRRGIFQGDSLSPLLFVLAMMPLSMILRKVSAGYVMKKDGCKINHLLFMDDLKLFAKNEAEIDSLVQTVRIFSDDIGMQFGLEKCASITMKRGKRVHSDGIALPDGAQLRALGEEESYRYLGVLESDHVLHKESKVRLKAEYIRRVKKCLKSKLNGGNMIKAINTWAVSLMRYSAGIVEWTKEDLDVTDRRTRKLMTMHGMLHPRSNVSRLYLPRSEGGRGLLSVADSVNIERRSLHCHVRRTEESLLKVAQRYTRADEVGPKEYKRERKEERHQDWRNKPLHGRFLRCTEEVASSKSWNWLKSGELKKETEGLITAAQDQSLRTNVMKARIEKANVSPMCRMCNKAEETVFHIVSECSKMAQTEYKGRHDKLAKVIHWDLCKKYGVKVLAKWYDHVPEKVVENDQVKILWDFNIQTDHVIQHRRPDVVLLDKTKKMCHLIDIAVPGDIRVASKEMEKIEKYQDLARELRKIWQVKVKVVPVVVGALGTIPKALGKHLDEIGTNVRVDLLQKAALLGTARILRKTLEI

SEQ ID NO: 25515 - protein, 1136 aa, Marthasterias glacialis
MIMTSAMEHQVNGEIVTNSQRGSPSPDLVGMPEQVPPDRIQTAQNRIRVATRRKWSKNDNKIAMECYIKSVPDKRGYRKKMFSLWQDLEMFDISEQRLADQISTIKRNRWLTNVEIEEMRRKVQAESNRTEIVNHHVPEDVTAASSQTEDEVDLPGLQDGQDDGGIDEDGCLELTEEEVQIKTRVQEVMRAAKGSNGWSIPALRRVPRKRLTDMSAVVSKVLGSVSTNNLLETNRLMFAGAVVVGEKLGVKASSPEHENSTPWWKRRLEGQIKDLRRDLSRLEQISKGLIKGSDWRNTIMTKYNVKCKGVSVVIEEIKQRVKAKAAKVKRYDDRVRQFHQNRLFNTNQRQLFKELDGKIDNTQAGPRPAEARTFWGGIWDQPVQHNRQADWLTDVKDELRGVQQQEGFQIDVDKVKRQVRKVPNWKAPGPDHVHGYWLKNFRSLHERMALQLQDCLVQGKVPTWMTEARTVLIMKDVKKGNIASNYRPITCLPVMYKLLTSMIAEDLYRHMDDHQLFPEEQKGCKKRSRGTKDQLIIDKAVLKDCRSRKTNLAMAWIDYKKAYDMVSHTWIMECLDMVGVADAVKRLLSESMKTWRTNLTANNDSLGKVCIKRGIFQGDSLSPLLFVLALMPLSMILRKVSAGYVMKRDGCKINHLLFMDDLKLFAKNEAEIDSLVQTVRISSDDIGMQFGLEKCASMTMKRGKRVHSDGIALPDGAQMRALGEEESYRYLGVLESDHVLHEESKVRLRAEYIRRVKKCLKSKLNGGNMIKAINTWAVSLMRYSGGIIEWTKEDLDVTDRRTRKLMTMHGMLHPRANVSRLYLPRSEGGRGLLSVADSVNIERRSLHRHVRSTEENLLKIARMYTTADEAGPKEYKRERKEERHQDWRNKPLHGRFLRCTEEVASRKSWNWLKSGELKKETEGLITAAQDQSLRTNVMKARIEKTNVSPMCRMCNKAEETVFHIVSECSKMAQTEYKGRHDKLAKVIHWDLCKKYGVQVHAKWYDHVPEKVVETDEVKILWDFNIQTDHVIEHRRPDVVVLDRTKKMCHIIDIAVPGDIRVASKEMEKIEKYQDLARELRKIWQVKVKVVPVVVGALGTISKALEKHLDQIGTTVRVDLLQKAALLGTARILRKTL

SEQ ID NO: 25516 - protein, 1215 aa, Asterias rubens
MLIIIIIIIIIIIIIIIIIIIIIIIIIIIIIIIIIIIIIIIIIIIIIIIIIIIIIIIIIIIIIIIIIIIIIIIIIMSAMEHQFNGERVTNSQRGSPSPDLVGMPEQVLPDRIQTAHNGIRGGTRRKWSKNDNKIAMDCYIKSEPDKRGYRRRMISLWQDQGMFEISEQRLADQISTIKRNQWLTNVETEEMRRIVQAESDGTDIVNHQIPEEAAAASSQSEDEVNQPGLRNGQNDDGIDDEEGVEFTEEEVQIKARLQEVMEAAKGSNGWSIPALRRVPRKRLTEMSAVVSKVLGSVSTDNLSETNRLIFAGAVVVGEKLRVEVSQQGNSTPWWKRRLEGQIKDLRRDLSRIEQMNKGLLNSSDLRNTIMTKYNVKRKGVSVVIEEIKQRVKAKAAKVKRYDDRVRQFHQNRLFNTNQRQLFKELDGKADSTQAVPRPTEAKTFWGGIWDKPVKHNRQAEWLTDVKDELTDVKDELRGVQQQEGFQIDVDKVKREIKKVPNWKAPGMDHVHGYWLKNFRSLHERMALQLQDCLVQGKVPSWMTEAKTVLIMKDVKKGNIASNYRPITCLPVMYKLLTSMIAEDLYRHMDDQQSFPEEQKGCKKRSRGTKDQLIIDKAVLKDCRSRKTNLAMAWIDYKKAYDMVSHTWIMECLDMVGVADAVKRLLGESMKTWRTNLTANDDNLGKVCIRRGIFQGDSLSPLLFVLAMMPLSMILRKVSAGYVMKKDGCKINHLLFMDDLKLFAKNEAEIDSLVQTVRIFSDDIGMQFGLEKCASMTMKRGKRVHSDGIALPDGAQLRALGEEESYRYLGVLESDHVLHKESKVRLKAEYIRRVKKCLKSKLNGGNMIKAINTWAVSLMRYSAGIVEWTKEDLDVTDRRTRKLMTMHGMLHPRSNVSRLYLPRSEGGRGLLSVADSVNIERRSLHCHVRRTEESLLKVAQRYTRADEVGPKEYKRERKEERHQDWRNKPLHGRFLRCTEEVASSKSWNWLKSGELKKETEGLITAAQDQSLRTNVMKARIEKANVSPMCRMCNKAEETVFHIVSECSKMAQTEYKGRHDKLAKVIHWDLCKKYGVKVLAKWYDHVPEKVVENDQVKILWDFNIQTDHVIQHRRPDVVLLDKTKKMCHLIDIAVPGDIRVASKEMEKIEKYQDLARELRKIWQVKVKVVPVVVGALGTIPKALGKHLDEIGTNVRVDLLQKAALLGTARILRKTLEI

SEQ ID NO: 25517 - protein, 1138 aa, Marthasterias glacialis
MIMTSAMEHQVNGEIVTNSQRGSPSPDLVGMPEQVPPDRIQTAQNRIRVATRRKWSKNDNKIAMECYIKSVPDKRGYRKRMFSLWQDKEMFDISEQRLADQISRVKRNRWLTNVEIEEMRRKVQAESNRTEIVSHHVPEDVTAASSQTEDEVDLPGLQDGQDDGGIDEDGCLELTEEEVQIKTRVQEVMRAAKGSNGWSIPALRRVPRKRLTDMSAVVSKVLGSVSTNNLLETNRLMFAGAVVVGEKLGVKASSPEHENSTPWWKRRLEGQIKDLRRDLSRLEQISKGLIKGSDWRNTIMTKYNVKGKGVSVVIEEIKQKVKAKAAKVKRYDDRVRQFHQNRLFNTNQRQLFKELDGKIDNTQAGPRPAEARTFWGGIWDRPVQHNRQADWLTDVKDELRGVQQQEGFQIDVDKVKRQVRKVPNWKAPGPDHVHGYWLKNFRSLHERMALQLQDCLVQGKVPTWMTEARTVLIMKDVKKGNIASNYRPITCLPVMYKLLTSMIAEDLYRHMDDHQLFPEEQKGCKKRSRGTKDQLIIDKAVLKDCRSRKTNLAMAWIDYKKAYDMVSHTWIMECLDMVGVADAVKRLLSESMKTWRTNLTANNDSLGKVCIRRGIFQGDSLSPLLFVLALMPLSMILRKVSAGYVMKRDGCKIKHLLFMDDLKLFAKNEAEIDSLVQTVRIFSDDIGMQFGLEKCASMTMKRGKRVHSDGIALPDGAQMRALGEEESYRYLGVLESDHVLHEELKVRLRAEYIRRVRKCLKSKLNGGNMVKAINTWAVSLMRYSGGIIEWTKEDLDVTDRKTRKLMTMHGMLHPRANVSRLYLPRSEGGRGLLSMADSVNIERRSLNCHVRSTEENLLKIARMYTTADEAGPKEYKRERKEERHQDWRNKPLHGRFLRCTEEVASCKSWNWLKSGELKKETEGLITAAQDQSLRTNVMKARIEKTNVSPMCRMCNKAEETVFHIVSECSKMAQTEYKGRHDKLAKVIHWDLCKKYGVQVHAKWYDHVPEKVVESDVVKILRDFNIQTDHVIEHRRPDVVVLDKTKKMCHIIDIAVPGDIRVASKEKEKIEKYQDLARELRKIWQVKVKVVPVVVGALGTIPKALDKHLDQIGTTVRVDLLQKAALLGTARILRKTLEI

SEQ ID NO: 25518 - protein, 1138 aa, Marthasterias glacialis
MIMTSAMEHQVNGEIVTNSQRGSPSPDLVGMPEQVPPDRIQTAQNRIRVATRRKWSKNDNKIAMECYIKSVPDKRGYRKRMFSLWQDKEMFDISEQRLADQISTIKRNRWLTNVEIEEMRRKVQAESNRTEIVNHHVPEDVTAASSQTEDEVDLPGLQDGQDDGGIDEEEGLEATEEGVQIKTRVQEVMRAAKGSNGWSIPALRRVPRKRLTDMSAVVSKVLGSVSTNNILETNRLMFAGAVVVGEKLGVKASSPEHENSTPWWKRRLEGQIKDLRRDLSRLEQISKGLIKGSDWRNTIMTKYNVKGKGVSVVIEEIKQRVKAKAAKVKRYDERVRQFHQNRLFNTNQRQLFKELDGKIDNTQAGPRPAEARTFWGGIWDRPVQHNRQADWLTDVKDELRGVQQQEGFQIDVDKVKRQVRKVPNWKAPGPDHVHGYWLKNFRSLHERMALQLQDCLVQGKVPTWMTEARTVLIMKDVKKGNIASNYRPITCLPVMYKLLTSMIAEDLYRHMDDHQLFPEEQKGCKKRSRGTKDQLIIDKAVLKDCRSRKTNLAMAWIDYKKAYDMVSHTWIMECLDMVGVADVVKRLLSESMKTWRTNLTANNDSLGKVCIRRGIFQGDSLSPLLFVLALMPLSMILRKVSAGYVMKRDGCKINHLLFMDDLKLFAKNEAEIDSLVQTVRIFSDDIGMQFGLEKCASMTTKRGKRVHSDGIALPDGAQMRALGEEESYRYLGVLESDHVLHEESKVRLRAEYIRRVRKCLKSKLNGGNMVKAINTWAVSLMRYSGGIIEWTKEDLDVTDRRARKLMTMHGMLHPRANVSRLYFPRSEGGRGLLSVADSVNIERRSLHRHVRSTEENLLKIARMYTTADEAGPKEYKRERKEERHQDWRSKPLHGRFLRCTEEVASCKSWNWLKSGELKKETEGLITAAQDQSLRTNVMKARIEKTNVSPMCRMCNKAEETVFHIVSECSKMAQTEYEGRHDKLAKVIHWDLCKKYGVQVHAKWYDHVPEKVVETDAVKILWDFNIQTDHVIEHRRPDVVVLDKTKKMCHIIDIAVPGDIRVASKEKEKIEKYQDLARELRKIWQVKVKVVPVVVGALGTIPKALDKHVDQIGTTVRVDLLQKAALLGTARILRKTLEI

SEQ ID NO: 25519 - protein, 709 aa, Asterias rubens
MDHVHGYWLKNFRSLHERMALQLQDCLVQGKVPSWMTEAKTVLIMKDVKKGNVASNYRPITCLPVMYKLLTSMIAEDLYRHMDDQQLFPEEQKGCKKRYRGTKDQLIIDKAVLKDCRSRKTNLAMAWIDYKKAYDMVSHTWIMECLDMVGVADAVKRLLGESMKTWRTNLTANDDNLGKVCIRRGIFQGDSLSPLLFVLALMPLSMILRKVSAGYVMKKDGCKINHLLFMDDLKLFAKNEAEIDSLVQTVRIFSDDIGMQFGLEKCASMTMKRGKRVHSDGIALPDGTQLRALGEEESYRYLGVLESDHVLHKESKVRLKAEYIRRVKKCLKSKLNGGNMIKAINTWAVSLMRYSAGIVEWTKEDLDVTDRRTRKLMTMHGMLHPRSNVSRLYLPRSEGGRGLLSVADSVNIERRSLHCHVRRTEESLLKVAQRYTRADEVGPKEYKRERKEERHQDWRNKPLHGRFLRCTEEVASSKSWNWLKSGELKKETEGLITAAQDQSLRTNVMKARIEKANVSPMCRMCNKAEETVFHIVSECSKMAQTEYKGRHDKLAKVIHWDLCKKYGVKVLAKWYNHVPEKVVETDQVKILWDFNIQTDLVIQHRRPDVVLLDKTKKMCHLIDIAVPGDTRVASKEMEKIEKYQDLARELRKIWQVKVKVVPVVVGALGTIPKALGKHLDEIGTNVRVDLLQKAALLGTARILRKTLEI

SEQ ID NO: 25520 - protein, 1138 aa, Marthasterias glacialis
MIMTSAMEHQVNGEIVTNSQRGSPSPDLVGMPEQVPPDRIQTAQNRIRVATRRKWSKNDNKIAMECYIKSVPDKRGYRKRMFSLWQDKEMFDISEQRLADQISTIKRNRWLTNVEIEEMRRKVQAESNRTEIVNHHVPEDVTAASSQTEDEVDLPGLQDGQDDGGIDEDGCLELTEEEVQIKTRVQEVMRAAKGSNGWSIPALRRVPRKRLTDMSAVVSKVLGSVSTNNLLETNRLMFAGAVVVGEKLGVKASSPEHENSTPWWKRRLEGQIKDLRRDLSRLEQISKVLIKGSDWRNRIMTKYNVKGKGVSVVIEEIKQRVKAKAAKVKRYDDRVRQFHQNRLFNTNQRQLFKELDGNIDNTQAGPRPAEARTFWGGIWDRPVQHNRRADWLTDVKDELRGVQQQEGFQIDVDKVKRQVRKVPNWKAPGPDHVHGYWLKNFRSLHERMALQLQDCLVQGKVPTWMTEARTVLIMKDVKKGNIASNYRPITCLPVMYKLLTSMIAEDLYRHMDDHQLFPEEQKGCKKRSRGTKDQLIIDKAVLKDCRSRKTNLAMAWIDYRKAYDMVSHTWIMECLDMVGVADAVKRLLSESMKTWRTNLTANNDSLGKVCIRRGIFQGDSLSPLLFVLALMPLSMILRKVSAGYVMKRDGCKINHLLFMDDLKLFAKNEAEIDSLVQTVRIFSDDIGMQFGLEKCASMTMKRGKRVHSDGIALPDGAQMRALGEEESYRYLGVLESDHVLHEESKVRLRAEYIRRVKKCLKSKLNGGNMIKAINTWAVSLMRYSGGIIEWTKEDLDVTDRRTRKLMTMHGMLHPRANVSRLYLPRSEGGRGLLSVADSVNIERRSLHRHVRSTEENLLKIARMYTTADEAGPKEYKRERKEERHQDWRNKPLHGRFLRCTEEVASCKSWNWLKSGELKKETEGLITAAQDQSLRTNVMKARIEKTNVSPMCRMCNKAEETIFHIVSECSKMAQTEYKGRHDKLAKVIHWDLCKKYGVQVHAKWYDHVPEKVVETDEVKILWDFNIQTDHVIEHRRPDVVVLDWTKKMCHIIDIAVPGDIRVASKEMEKIEKYQDLARELRKIWQVKVKVVPVVVGALGTIPKALEKHLDQIGTTVRVDLLQKAALLGTARILRKTLEI

SEQ ID NO: 25521 - protein, 1138 aa, Marthasterias glacialis
MIMTSAMEHQVNGEIVTNSQRGSPSPDLVGMPEQVPPDRIQTAQNRIRVATRRKWSKNDNKIAMECYIKSVPDKRGYRKRMFSLWQDKEMFDISEQRLADQISTIKRNRWLTNVEIEEMRRKVQAESNRTEIVNHHVPEDVTAASSQTEDEVDLPGLQDGQDDGGIDEDGCLELTEEEVQIKTRVQEVMRAAKGSNGWSIPALRRVPRKRLTDMSAMVSKVLGSVSTNNLLETNRLMFAGAVVVGEKLGVKASSPEHENSTPWWKRRLEGQIKDLRRDLSRLEQISKGLIKGSDWRNTIMTKYNVKGKGVSVVIEEIKQRVKAKAAKVKRYDDRVRQFHQNRLFNTNQRQLFKELDGKIDNTQAGPRPAEARTFWGGIWDRPVQHNRQADWLTDVKDELRGVQQQEGFQIDVDKVKRQVRKVPNWKAPGPDHVHGYWLKNFRSLHERMALQLQDCLVQGKVPTWMTEARTVLIMKDVKKGNIASNYRPITCLPVMYKLLTSMIAEDLYRHMDDHQLFPEEQKGCKKRSRGTKDQLIIDKAVLKDCRSRKTNLAMAWIDYRKAYDMVSHTWIMECLDMVGVTDAVKRLLSESMKTWRTNLTANNDSLGKVCIRRGIFQGDSLSPLLFVLALMPLSMILRKVSAGYVMKRDGCKINHLLFMDDLKLFAKNEAEIDSLVQTVRIFSDDIGMQFGLEKCASMTMKRGKRVHSDGIALPDGAQMRALGEEESYRYLGVLESDHVLHEESKVRLRAEYIRRVRKCLKSKLNGGNMVKAINTWAVSLMRYSGGIIEWTKEDLDVTDRRTRKLMTMHGMLHPRANVSRLYLPRSEGGRGLLSVADSVNIERRSLHRHVRSTEENLLKIARMYTTADEAGPKEYKRERKEERHQDWRNKPLHGRFLRCTEEVASCKSWNWLKSGELKKETEGLITAAQDQSLRTNVMKARIEKTNVSPMCRMCNKAEETVFHIVSECSKMAQTEYKGRHDKLAKVIHWDLCKKYGVQVHAKWYDHVPEKVVETDAVKILWDFNIQTDHVIEHRRPDVVVLDKTKKMCHIIDIAVPGDIRVASKEKEKIEKYQDLARELRKIWQVKVKVVPVVVGALGTIPKALDKYLDQIGTTVRVDLLQKAALLGTARILRKTLEI

SEQ ID NO: 25522 - protein, 1075 aa, Marthasterias glacialis
MECYIKSVPDKRGYRKRMFSLWQDKEMFDISEQRLADQISTIKRNRWLTNVEIEEMRRKVQAESNRTEIVNHQVPEDVTAVSSQTEDEVDLPGLQDGQDDGGIDEEDGLELTEEEVQIKTRVQEVMRAAKGSNGWSIPALRRVPRKRLTDMSAVVSKVLGSVSTNNLLETNRLMFAGAVVVGEKLGVKASSPEHENSTPWWKRRLEGQIKDLRRDLSRLEQISKGLIKGSDWRNRIMTKYNVKGKGVSVVIEEIKQRVKAKAAKVKRYDDRVRQFHQNRLFNTNQRQLFKELDGKIDNTQAGPRPAEARTFWGGIWDRPVQHNRQADWLTDVKDELRGVQQQEGFQIDVDKVKRQVRKVPNWKAPGPDHVHGYWLKNFRSLHERMALQLQDCLVQGKVPTWMTEARTVLIMKDVKKGNIASNYRPITCLPVMYKLLTSMIAEDLYRHMDDHQLFPEEQKGCKKRSRGTKDQLIIDKAVLKDCRSRKTNLAMAWIDYRKAYDMVSHTWIMECLDMVGVADAVKRLLSESMKTWRTNLTANNDSLGKVCIRRGIFQGDSLSPLLFVLALMPLSMILRKVSAGYVMKRDGCKINHLLFMDDLKLFAKNEAEIDSLVQTVRIFSDDIGMQFGLEKCASMTMKRGKRVHSDGIALPDGAQMRALGEEESYRYLGVLESDHVLHEESKVRLRAEYIRRVKKCLKSKLNGGNMIKAINTWAVSLMRYSGGIIEWTKEDLDVTDRRTRKLMTMHGMLHPRANVSRLYLPRSEGGRGLLSVADSVNIERRSLHRHVRSTEENLLKIARMYTTADEAGPKEYKRERKEERHQDWRNKPLHGRFLRCTEEVASCKSWNWLKNGELKKETEGLITAAQDQSLRTNVMKARIEKTNVSPMCRMCNKAEETVFHIVSECSKMAQTEYKGRHDKLAKVIHWDLCKKYGVQVHAKWYDHVPEKVVETDEVKILWDFNIQTDHVIEHRRPDVVVLDRTKKMCHIIDIAVPGDIRVASKEMEKIEKYQDLARELRKIWQVKVKVVPVVVGALGTIPKALEKHLDQIGTTVRVDLLQKAALLGTARILRKTLEI

SEQ ID NO: 25523 - protein, 1138 aa, Marthasterias glacialis
MIMTSAMEHQVNGEIVTNSQRGSPSPDLVGMPEQVPPDRIQTAQNRIRVATRRKWSKNDNKIAMECYIKSVPDKRGYRKRMFSLWQDKEMFDISEQRLADQISTIKRNRWLTNVEIEEMRRKVQAESNRTEIVNHHVPEDVTAASSQIEDEVDLPGLQDGQDDGGIDEDGCLELTEEEVQIKTRVQEVMRAAKGSNGWSIPALRRVPRKRLTDMSAVVSKVLGSVSTNNLLETNRLMFAGAVVVGEKLGVKASSPEHENSTPWWKRRLEGQIKDLRRDLSRLEQISKGLIKGSDLRNTIMTKYNVKCKGVSVVIEEIKQRVKAKAAKVKRYDDRVRQFHQNRLFNTNQRQLFKELDGKIDNTQAGPRPAEARTFWGGIWDRPVQHNRQADWLTDVKDELRGVQQQEGFQIDVDKVKRQVRKVPNWKAPGPDHVHGYWLKNFRSLHERMALQLQDCLVQGKVPTWMTEARTVLIMKDVKKGNIASNYRPITCLPVMYKLLTSMIAEDLYRHMDDHQLFPEEQKGCKKRSRGTKDQLIIDKAVLKDCRSRKTNLAMAWIDYKKAYDMVSHTWIMECLDMVGVADAVKRLLSESMKTWRTNLTANNDSLGKVCIRRGIFQGDSLSPLLFVLALMPLSMILRKVSAGYVVKRDGCKINHLLFMDDLKLFAKNEVEIDSLVQTVRIFSDDIGMQFGLEKCASMTMKRGKRVHSDGIALPDGAQMRALGEEESYRYLGVLESDHVLHEESKVRLRAEYIRRVKKCLKSNLNGGNMIKAINTWAVSLMRYSGGIIEWTKEDLDVTDRRTRKLMTMHGMLHPRANVSRLYLPRSEGGRGLLSVTDSVNTERRSLHRHVRSTEENLLKIARMYTTADEAGPKEYKRERKEERHQDWRNKPLHGRFLRCTEEVASCKSWNWLKSGELKKETEGLITAAQDQSLRTNVMKARIEKTNVSPMCRMCNKAEETVFHIVSECSKMAQTEYKGRHDKLAKVIHWDLCKKYGVQVYAKWYDHVPEKVVETDEVKILWDFNIQTDHVIEHRRPDVVVLDKTKKMCHIIDIAVPGDIRVASKEMEKIEKYQDLARELRKIWQVKVKVVPVVVGALGTIPKALEKHLDQIGTTVRVDLLQKAALLGTARILRKTLEI

SEQ ID NO: 25524 - protein, 1138 aa, Marthasterias glacialis
MIMTSAMEHQVNGEIVTNSQRGSPSPDLVGMPEQVPPDRIQTAQNRIRVATRRKWSKIDNKIAMECYIKSVPDKRGYRKRMFSLWQDKEMFDISEQRLADQISTIKRNRWLTNVEIEEMRRKVQAESNRTEIVNHHVPEDVAAASSQTEDEVDLPGLQDGQDDGGIYEEEGLELTEEEVQIKTRVQEVMRAAKGSNGWSIPALRRVPRKRLTDMSAVVSKVLGSVSTNNLLETNRLMFAGAVVVGEKLGVKASSPEHENSTPWWKRRLEGQIKDLRRDLGRLGQISKGLIKGSDWRNTIMTKYNVKGKGVSVVIEEIKQRVKAKAAKVKRYDDRVRQFHQNRLFNTNQRQLFKELDGKIDSTQSGPRPAEARTFWGGIWDRPVQHNRQADWLTGVRDELRGVQQQEGFQIDVDKVKRQVRKVPNWKGPGPDHVHGYWLKNFRSLHERMALQLQDCLVQGKVPTWMTEARTVLIMKDVKKGNIASNYRPITCLPVMYKLLTSMIAEDLYRHMDDHQLFPEEQKGCKKQSRGTKDQLIIDKAVLKDCRSRKTNLAMAWIDYKKAYDMVSHTWIMECLDMVGVADAVKRLLSESMKTWRTNLTANNDSLGKVCIRRGIFQGDSLSPLLFVLALMPLSMILRKVSAGYVMKRDGCKINHLLFMDDLKLFAKNEAEIDSLVQTVRIFSDDIGMQFGLEKCASMTMKRGKRVHSDGIALPDGAQMRALGEEESYRYLGVLESDHVLHEESKVRLRAEYIRRVKKCLKSKLNGGNMIKAINTWAVSLMRYSGGIIEWTKEDLDITDRRTRKLMTMHGMLHPRANVSRLYLPRSEGGRGLLSVADSVNIEQRSLHRHVRSTEENLLKIARMYTTADEAGPKEYKRERKEERHQDWRNKPLHGRFLRCTEEVASCKSWNWLKSGELKKETEGLITAAQDQSLRTNVMKARIEKTNVSPMCRMCNKAEETVFHIVSECSKMAQTEYKGRHDKLAKVIHWDLCKKYGVQVHAKWYDHVPEKVVETDEVKILWDFNIQTDHVIEHRRPDVVVLDKTKKMCHIIDIAVPGDIRVASKEMEKIEKYQDLARELRKIWQVKVKVVPVVVGALGTIPKALEKHLDQIGTTVRVDLLQKAALLGTARILRKTLEI

SEQ ID NO: 25525 - protein, 1080 aa, Marthasterias glacialis
MIMTSAMEHQVNGEIVTNSQRGSPSPDLVGMPEQVPPDRIQTAQNRIRVATRRKWSKNDNKIAMECYIKSVPDKRGYRKRMFSLWQDKEMFDISEQRLADQISTIKRNRWLTNVEIEEMRRKVQAESNRTETVNHHVPEDVTAASSQTEDEVDLPGLQDGQDDGGIDEDGCLELTEEEVQTKTRVQEVMRAAKGSNGWSIPALRRVPRKRLTDMSAVVSKVLGSVSTNNLLETNRLMFAGAVVVGEKLGVKASSPEHENSTPWWKRRLEGQIKDLRRDLSRLEQISKGLIKGSDWRNTIMTKYNVKGKGVSVVIEEIKQRVKAKAAKVKRYDDRVRQFHQNRLFNTNQRQLFKELDGKIDNTQAGPRPAEARTFWGGIWDRPVQHNRQADWLTDVKDELRGVQQQKGFQIDVDKVKRQVRKVPNWKAPGPDHVHGYWLKNFRSLHERMALQLQDCLVQGKVPTWMTEARTVLIMKDVKKGNIASNYRPITCLPVMYKLLTSMIAEDLYRHMDDHQLFPEEQKGCKKRSRGTKDQLIIDKAVLKDCRSRKTNLAMAWIDYKKAYDMVSHTWIMECLDMVGVADAVKRLLSESMKTWRTNLTANNDSLGKVCIRRGIFQGDSLSPLLFVLALMPLSMILRKVSAGYVMKRDGCKINHLLFMDDLKLFAKNEAEIDSLVQTVRIFSDDIGMQFGLEKCASMTMKRGKRVHSDGIALPDGAQMRALGEEESYRYLGVLESDHVLHEESKVRLRAEYIRRVRKCLKSKLNGGNMVKAINTWAVSLMRYSGGIIEWTKEDLDVTDRRTRKLMTMHGMLHPRANVSRLYLPRSEGGRGLLSVADSVNIERRSLHRHVRSTEENLLKIARMYTTADEAGPKEYKRERKEERHQDMRNKPLHGQFLRCTEEVASCKSWNWLKSGELKKETEGLITAAQDQSLRTNVMKARIEKTNVSPMCRMCNKAEETVFHIVSECSKMAQTEYKGRHDKLAKVIHWDLCKKYGFQVHAKWYDHVPEKVVETDAVKILWDFNIQTDHVIEHRRPDVVVLDKTKKMCHIIDIAVPGDIRVASKEKEKDREVPGLGQGTS

SEQ ID NO: 25526 - protein, 1138 aa, Marthasterias glacialis
MIMTSAMEHQVNGEIVTNSQRGSPSPDLVGMPEQVPPDRIQTAQNRIRVATRRKWSKNDNKIAMECYIKSVPDKRGYRKRMFSLWQDKEMFDISEQRLADQISTIKRNRWLTNVEIEEMRRKVQAESNRTEIVNHHVPEDVTAASSQTEDEVDLPGLQDGQDDGGIDEDGCLELTEEEVQIKTRVQEVMRAAKGSNGWSIPALRRVPRKRLADMSAVVSKVLGSVSTNNLLETNRLIFAGAVVVGEKLGVKASSPEHENSTPWWKRRLEGQIKDLRRDLSRLEQISKGLIKGSDWRNRIMTKYNVKGKGVSVVIEEIKQRVKAKAAKVKRYDDRVRQFHQNRLFNTNQRQLFKELDGNIDNTQAGPRPAEARTFWGGIWDRPVQHNRQADWLTDVKDELRGVQQQEGFQIDVDKVKRQVRKVPNWKAPGPDHVHGYWLKNFRSLHERMALQLQDCLVQGKVPTWMTEARTVLIMKDVKKGNIASNYRPITCLPVMYKLLTSMIAEDLYRHMDDHQLFPEEQKGCKKRSRGTKDQLIIDKAVLKDCRSRKTNLAMAWIDYRKAYDMVSHTWIMECLDMVGVADAVKRLLSESMKTWRTNLTANNDSLGKVCIRRGIFQGDSLSPLLFVLALMPLSMILRKVSAGYVMKRDGCKINHLLFMDDLKLFAKNEAEIDSLVQTVRIFSDDIGMQFGLEKCASMTMKRGKRVHSDGIALPDGAQMRALGEEESYRYLGVLESDHVLHEESKVRLRAEYIRRVKKCLQSKLNGGNMIKAINTWAVSLMRYSGGIIEWTKEDLDVTDRRTRKLMTMHGMLHPRANVSRLYLPRSEGGRGLLSVADSVNIERRSLHRHVRSTEENLLKIARMYTTADEAGPKEYKRERKEERHQDWRNKPLHGRFLRCTEEVASCKSWNWLKSGELKKETEGLIAAAQDQSLRTNVMKARIEKTNVSPMCRMCNKAEETVFHIVSECSKMAQTEYKGRHDKLAKVIHWDLCKKYGVQVHAKWYDHVPEKVVETDEVKILWDFNIQTDHVIEHRRPDVVVLDKTKKMCHIIDIAVPGDIRVASKEMEKIEKYQDLARELRKIWQVKVKVVPVVVGALGTIPKALEKHLDQIGTTVRVDLLQKAALLGTARILRKTLEI

SEQ ID NO: 25527 - protein, 948 aa, Asterias rubens
MEAAKGSNGWSIPALRRVPRKRLTEMSAVVSKVLGSVSKDNLSETNRLIFAGAVVVGEKLGVEVSQQGNSTPWWKRRLEGQIKDLRRDLSRIEQMNKGLLNSSDLRNTIMTKYNVKRKGVSVVIEEIKQRVKAKAAKVKRYDDRVRQFHQNRLFNTNQRQLFKELDGKADSTQAVPRPTEAKTLWGGIWDKPVKHNRQAEWLTDVKDELRGVQQQEGFQIDVDKVKRQIKKVPNWKAPGMDHVHGYWLKNFRSLHERMALQLQDCLVQGKVPSWMTEAKTVLIMKDVKKGNIASNYRPITCLPVMYKLLTSMIAEDLYRHMDDQQLFPEEQKGCKKRSRGTKDQLIIDKAVLKDCRSRKTNLAMAWIDYKKAYDMVSHTWIMECLDMVGVADTVKRLLGESMKTWRTNLTANDDNLGKVCIRRGISQGDSLSPLLFVLAMMPLSMILRKVSAGYVMKKDGCKINHLLFMDDLKLFAKNEAEIDSLVQTFRIFSDDIGMQFGLEKCASMTMKRGKRVHSDGIALPDGAQLRALGEEESYRYLGVLESDHVLHKESKVRLKAEYIRRVKKCLKSKLNGGNMIKAINTWAVSLMRYSAGIVEWTKEGLDVTDRRTRKLMTMHGMLHPRSNVSRLYLPRSEGGRGLLSVADSVNIERRSLHCHVRRTEESLLKVAQRYTRADEVGPKEYKRERKEERHQDWRNKPLHGRFLRCTEEVASSKSWNWLKSGELKKETEGLITAAQDQSLRTNVMKARIEKANVSPMCRMCNKAEETVFHIVSECSKMAQTEYKGRHDKLAKVIHWDLCKKYGVKVLAKWYDHVPEKVVENDQVKILWDFNIQTDHVIQHRRPDVVLLDKTKKMCHLIDIAVPGDVRVASKEMEKIEKYQDLARELRKIWQVKVKVVPVVVGALGTIPKALGKHLDEIGTNVRVDLLQKAALLGTARILRKTLEI

SEQ ID NO: 25528 - protein, 1122 aa, Marthasterias glacialis
MIRTSAMEHQVNGERVTNSQRGSPSPAQNRIRVATRRKWSKNDNKIAMECYIKSVPDKRGYRKRMFSLWQDKEMFDISEQRLADQISTIKRNRWLTNVEIEEMRRKVQAESNRTEIVNHHVPEDVTAASSQTEDEVDLPGLQDGQDDGGIDEDGCLELTEEEVQIKTRVQEVMRAAKGPNGWSIPALRRVPRKRLTDMSAVVSKVLGSVSTNNLLDTNRLMFAGAVVVGEKLGVKASSPEHENSTPWWKRRLEGQIKDLRRDLSRLEQISKGLIKGSDWRNTIMTKYNVKGKGVSVVIEEIKQRVKAKAAKVKRYDDRVRQFHQNRLFNTNQRQLFKELDGKIDSTQAGPRPAEARTFWGGIWDRPVQHNRQADWLTDVKDELRGVQQQEGFQIDVDKVKRQVRKVPNWKAPGPDHVHGYWIKNFRSLHERMALQLQDCLVQGKVPTWMTEARTVLIMKDVKKGNIASNYRPITCLPVMYKLLTSMIAEDLYRHMDDHQLFPEEQKGCKKRSRGTKDQLIIDKAVLKDCRSRKTNLAMAWIDYKKAYDMVSHTWIMECLDMVGVADAVKRLLSESMKTWRTNLTANNDSLGKVCIRRGIFQGDSLSLLLFVLALMPLSMILRKVSAGYVVKRDGCRINHLLFMDDLKLFAKNEAEIDSLVQTVRIFSDDIGMQFGLEKCASMTMKRGKRVHSDGIALPDGAQMRALGEEESYRYLGVLESDHVLHEESKVRLRAEYIRRVKKCLKSKLNGGNMIKAINTWAVSLMRYSGGIIEWTKEDLDVTDRRTRKLMTMHGMLHPRANVSRLYLPRSEGGRGLLSVADSVNIERRSLHRHVRSTEENLLKIARKYTTADEAGPKEYKRERKEERHQDWRNKPLHGRFLRCTEEVASCKSWNWLKSGELKKETEGLITAAQDQSLRTNVMKARIEKTNVSPLCRMCNKAEETVFHIVSECSKMAQTEYKGRHDKLAKVIHWDLCKKYGVQVHAKWYDHVPEKVVETDEVKILWDFNIQTDHVIEHRRPDVVVLDKTKKICHIIDIAVPGDIRVASKEMEKIEKYQDLARELRKIWQVKVKVVPVVVGALGTIPKALENHLDQIGTTVRVDLLQKAALLGTARILRKTLEI

SEQ ID NO: 25529 - protein, 1136 aa, Asterias rubens
MLIMSAMEHQFNGERVTNSQRGSPSPDLVGMPEQVLPDRIQTAHNGIRGGTRRKWSKNDNKIAMDCYIKSEPDKRGYRRRMISLWQDQGMFEISEQRLADQISTIKRNQWLTNVEIEEMRRIVQAESDGTDIVNHQIPEEAAAASSQSEDEVNQPGLRNGQDDDGIDDEEGVEFTEEEVQIKARLQEVMEAAKGSNGWSIPALRRVPRKRLTEMSAVVSKVLGSVSTDNLSETNRLIFAGAVVVGEKLGVEVSQQGNSTPWWKRRLEGQIKDLRRDLSRIEQMNKGLLNSSDLRNTIMTKYNVKRKGVSVVIEEIKQRVKAKAAKVKRYDDRVRQFHQNRLFNTNQRQLFKELDGKADSTQAVPRPTEAKTFWGGIWDKPVKHNRQAEWLTDVKDELRGVQQQEGFQIDVDKVKRQIKKVPNWKAPGMDHVHGYWLKNFRSLHERMALQLQDCLVQGKVPSWMTEAKTVLIMKDVKKGNIASNYRPITCLPVMYKLLTSMIAEDLYRHMDDQQLFPEEQKGCKKRSRGTKDQLIIDKAVLKDCRSRKTNLAMAWIDYKKAYDMVSHTWIMECLDMVGVADAVKRLLGESMKTWRTNLTANDDNLGKVCIRRGIFQGDSLSPLLFVLAMMPLSMILRKVSAGYVMKKDGCKINHLLFMDDLKLFAKNEAEIDSLVQTVRIFSDDIGMQFGLEKCASMTMKRGKRVHSDGIALPDGAQLRALGEEESYRYLGVLESDHVLHKESKVRLKAEYIRRVKKCLKSKLNGGNMIKAINTWAVSLMRYSAGIVEWTKEDLDVTDRRTIKLMTMHGMLHPRSNVSRLYLPRSEGGRGLLSVADSVNIECRSLHCHVRRTEESLLKVAQRYTRADEVGPKEYKRERKEERHQDWRNKPLHGRFLRCTEEVASSKSWNWLKSGELKKETEGLITAAQDQSLRTNVMKARIEKANVSPMCRMCNKAEETVFHIVSECSKMAQTEYKGRHDKLAKVIHWDLCKKYGVKVLAKWYDHVPEKVVENDQVKILWDFNIQTDHVIQHRRPDVVLLDKTKKMCHLIDIAVPGDIRVASKEMEKIEKYQDLARELRKIWQVKVKVVPVVVGALGTIPKALGKHLDEIGTNVWVDLLQKAALLGTARILRKTLEI

SEQ ID NO: 25530 - protein, 1138 aa, Marthasterias glacialis
MIMTSAIEHQVNGEIGTNSQRGSPSPDLVGMPEQVPPDRIQTAQNRIRVATRRKWSKNDNKIAMECYIKSVPDKRGYRKRMFSLWQDKEMFDISEQRLADQISTIKRNRWLTNVEIEEMRRKVQAESNRTEIVNHQVPEDVTAASSQTEDEVDLPGLQDGQDDGGIDEEDGLELTEEEVQIKTRVQEVMRAAKGSNGWSIPALRRVSRKRLTDMSAVVSKVLGSVSTNNLLETNRLMFAGAVVVGEKLGVKASSPEHENSTPWWKRRLEGQIKDLRRDLSRLEQISKGLIKGSDWRNRIMTKYNVKGKGVSVVIEEIKQRVKAKAAKVKRYDDRVRQFHQNRLFNTNQRQLFKELDGNIDNTQAGPRPAEARTFWGGIWDRPVQHNRQADWLTDVKDELRGVQQQEGFQIDVDKVKRQVRKVPNWKAPGPDHVHGYWLKNFRSLHERMALQLQDCLVQGKVPTWMTEARTVLIMKDVKKGNIASNYRPITCLPVMYKLLTSMIAEDLYRHMDDHQLFPEEQKGCKKRSRGTKDQLIIDKAVLKDCRSRKTNLAMAWIDYRKAYDMVSHTWIMECLDMVGVADAVKRLLSESMKTWRTNLTANNDSLGKVCIRRGIFQGDSLSPLLFVLALMPLSMILRKVSAGYVMKRDGCKINHLLFMDDLKLFAKNEAEIDSLVQTVRIFSDDIGMQFGLEKCASMTMKRGKRVHSDGIALPDGAQMRALGEEESYRYLGVLESDHVLHEESKVRLRAEYIRRVKKCLKSKLNGGNMIKAINTWAVSLMRYSGGIIEWTKEDLDVTDRRTRKLMTMHGMLHPRANVSRLYLPRSEGGRGLLSVADSVNIERRSLHRHVRSTEENLLKIARMYTTADEAGPKEYKRERKEERHQDWRNKPLHGRFLRCTEEVASCKSWNWLKSGELKKETEGLITAAQDQSLRTNVMKARIEKTNVSPMCRMCNKAEETVFHIVSECSKMAQTEYKGRHDKLAKVIHWDLCKKYGVQVHAKWYDHVPEKVVETDEVKILWDFNIQTDHVIEHRRPDVVVLDRTKKMCHIIDIAVPGDIRVASKEMEKIEKYQDLARELRKIWQVKVKVVPVVVGALGTIPKALEKHLDQIGTTVRVDLLQKAALLGTARILRKTLEI

SEQ ID NO: 25531 - protein, 1138 aa, Asterias rubens
MLIMSAMEHQFNGERVTNSQRGSPSPDLVGMPEQVLPDRIQTAHNGIRGGTRRKWSKNDNKIAMDCYIKSEPDKRGYRRRMISLWQDKGMFEISEQRLADQISTIKRNQWLTNVEIEEMRRIVQAESDGTDIVNHQIPDPEEAAAASSQSEDEVNQPGLRNGQDDDGIDDEEGVEFTEEEVQIKHRLQEVMEAAKGSNGWSIPALRRVPRKRLTEMSAVVSKVLGSVSTDNLSETNRLIFAGAVVVGEKLGVEVSQQGNSTPWWKRRLEGQIKDLRRDLSRIEQMNKGLLNSLDLRNTIMTKYNVKRKGVSVVIEEIKQRVKAKAAKVKRYDDRVRQFHQNRLFNTNQRQLFKELDGKADSTQASPRPTEPKTFWGGIWDKPVKHNRQAEWLTDVKDELRGVQQQEGFQIDVDKVRRQIKKVPNWKAPGMDHVHGYWLKNFRSLHERMALQLQDCLVQGKVPSWMTEAKTVLIMKDVKKGNVASNYRPITCLPVMYKLLTSMIAEDLYRHMDDQQLFPEEQKGCKKRSRGTKDQLIIDKAVLKDCRSRKTNLAMAWIDYKKAYDMVSHTWIMECLDMVGVADAVKRLLGESMKTWRTNLTANDDNLGKVCIRRGIFQGDSLSPLLFVLALMPLSMILRKVSAGYVMKKDGCKINHLLFMDDLKLFAKNEAEIDSLVQTVRIFSDDIGMQFGLEKCASMTMKRGKRVHSDGIALPDGAQLRALGEEESYRYLGVLESDHVLHKESKVRLKAEYIRRVKKCLKSKLNGGNMIKAINTWAVSLMRYSAGIVEWTKEGLDVTDRRTRKLMTMHGMLHPRSNVSRLYLPRSEGGRGLLSVADSVNIERRSLHCHVRRTEESLLKVAQRYTRADEVGPKEYKRERKEERHQDWRNKPLHGRFLRCTEEVASSKSWNWLKSGELKKETEGLITAAQDQSLRTNVMKARIEKANVSPMCRMCNKAEETVFHIVSECSKMAQTEYKGRHDKLAKVIHWDLCKKYGVKVLAKWYNHVPEKVVETDQVKILWDFNIQTDHVIQHRRPDVVLLDKTKKMCHLIDIAVPGDTRVASKEMEKIEKYQDLARELRKIWQVKVKVVPVVVGALGTIPKALGKHLDEIGTNVRVDLLQKAALLGTARILRKTLEI

SEQ ID NO: 25532 - protein, 1138 aa, Marthasterias glacialis
MIMTSAIEHQVNGEIGTNSQRGSPSPDLVGMPEQVPPDRIQTAQNRIRVATRRKWSKNDNKIAMKCYIKSVPDKRGYRKRMFSLWQDKEMFDISEQRLADQISTIKRNRWLTNVEIEEMRRKVQAESNRTEIVNHQVPEDVTAASSQTEDEVDLPGLQDGQDDGGIDEEDGLELTEEEVQIKTRVQEVMRAAKGSNGWSIPALRRVPRKRLTDMSAVVSKVLGSVSTNNLLETNRLMFAGAVVVGEKLGVKASSPEHENSTPWWKRRLEGQIKDLRRDLSRLEQISKGLIKGSDWRNRIMKKYNVKGKGVSVVIEEIKQRVKAKAAKVKRYDDRVRQFHQNRLFNTNQRQLFKELDGNIDNTQAGPRPAEARTFWGGIWDRPVQHNRQADWLTDVKDELRGVQQQEGFQIDVDKVKRQVRKVPNWKAPGPDHVHGYWLKNFPSLHERMALQLQDCLVQGKVPTWMTEARTVLIMKDVKKGNIASNYRPITCLPVMYKLLTSMIAEDLYRHIDGHQLFPEEQKGCKKRSRGTKDQLIIDKAVLKDCRSRKTNLAMAWIDYRKAYDMVSHTWIMECLDMVGVADAVKRLLSESMKTWRTNLTANNDSLGKVCIRRGIFQGDSLSPLLFVLALMPLSMILRKVSAGYVMKKDGCKINHLLFMDDLKLFAKNEAEIDSLVQTVRIFSDDIGMQFGLEKCASMTMKRGKRVHSDGIALPDGAQMRALGEEESYRYLGVLESDHVLHEESKVRLRAEYIRRVRKCLKSKLNGGNMVKAINTWAVSLMRYSGGIIEWTKEDLDVTDRRTRKLMTMHGMLHPRANVSRLYLPRSEGGRGLLSVADSVNIERRSLHRHVRSTEEKLLKIARMYTTADEAGPKEYKRERKEERHQDWRNKPLHGRFLRCTEEVASCKSWNWLKSGELKKENEGLITAAQDQSLRTNVMKARIEKTNVSPMCRMCNKAEETVFHIVSECSKMAQTEYKGRHDKLAKVIHWDLCKKYGVQVHAKWYDHVPEKVVETDAVKILWDFNIQTDHVIEHRRPDVVVLDKTNKMCHIIDIAVPGDIRVASKEKEKIEKYQDLARELRKIWQVKVKVVPVVVGALGTIPKALEKHLDQIGTTVRVDLLQKAALLGTARILRKTLEI

SEQ ID NO: 25533 - protein, 1136 aa, Asterias rubens
MLIMSAMEHQFNGERVTNSQRGSPSPDLVGMPEQVLPDRIQTAHNGIHGGTRRKWSKNDNKIAMDCYIKSEPDKRGYRRRMISLWQDKGMFEISEQRLADQISTIKRNQWLTNVEIEEMRRIVQAESDGTDIVNHQIQEEAAAASSQSEDEVNQPGLRNGQDDDGIDDEEGVEFREEEVQIKARLQEVMEAAKGSNGWSIPALRRVPRKRLTEMSAVVSKVLGSVSTDNLSETNRLIFAGAVVVGEKLGVEVSQQGNSTPWWKRRLEGQIKDLRRDLSRIEQMNKSLLNSSDLRNTIMTKYNVKQKGVSVVIEEIKQRVKAKAAKVKRYDDRVRQFHQNRLFNTNQRQLFKELDGKADSTQAVPTPTEAKTFWGGIWDKPVKHNRQAEWLTDVKDELRGVQQQEGFQIDVDKVKRQIKKVPNWKAPGMDHVHGYWLKNFRSLHERMALQLQDCLVQGKVPSWMTEAKTVLIMKDVKKGNIASNYRPITCLPVMYKLLTSMIAEDLYRHMDDQQLFPEEQKGCKKRSRGTKDQLIIDKAVLKDCRSRKTNLAMAWIDYKKAYDMVSHTWIMECLDMVGVADAVKRLLGESMKTWRTNLTANDDNLGKVCIRRGIFQGDSLSPLLFVLAMMPLSMILRKVSAGYVMKKDGCKINHLLFMDDLKLFAKTEAEIDSLVQTVRIFSDDIGMQFGLEKCASMTMKRGKRVHSDGIALPDGAQLRALGEEESYRYLGVLESDHVLHKESKVRLKAEYIRRVKKCLKSKLNGGNMIKAINTWAVSLMRYSAGIVEWTKEDLDVTDRRTRKLMTMHGMLHPRSNVSRLYLPRSEGGRGLLSVADSVNIERRSLHCHVRRTEESLLKVAQRYTRADEVGPKEYKRERKEERHQDWRNKPLHGRFLRCTDEVASSKSWNWLKSGELKKETEGLITAAQDQSLRTNVMKARIEKANISPMCRMCNKAEETVFHIVSECSKMAQTEYKGRHDKLAKVIHWDLCKKYGVKVLAKWYDHVPEKVVENDQVKILWDFNIQTDHVIQHRRPDVVLLDKTKKMCHLIDIAVPGDIRVASKEMEKIEKYQDLARELRKIWQVKVKVVPVVVGALGTIPKALGKHLDEIGTNVRVDLLQKAALLGTARILRKTLEI

SEQ ID NO: 25534 - protein, 1138 aa, Marthasterias glacialis
MIMTSAMEHQVNGEIVTNSQRGSPSPDLVGMPEQVPPNRIQTAQNRIRVATRRKWSKNDNKIAMECYIKSEPDKRGYRKRMFSLWQDKEMFDISEQRLADQISTIKRNRWLTNVEIEEMRRKVQAESNRTEIVNHHVPEDVAAASSQTEDEVDLPGLHDGQDDGGIDEEEGLELTEEEAQIKTRVQEVMRAAKGSNGWSIPALRRVPRKRLTDMSAVVSKVLGSVSTNNLLETNPLMFAGAVVVGEKLGVKASSPQHEKSTPWWKRRLEGQIKDLRRDLSRLEQISKGLIKGSDWRNTIMTKYNVKGKGVSVVIEEIKQRVKAKAAKVKRYDDRVRQFHQNRLFNTNQRQLFKELDGKIDNTQAGPRPAEARTFWGGIWDRPVQHNRQADWLTDVKDELRGVQQQEGFQIDVDKVKRQVRKVPNWKAPGPDHVHGYWLKNFRSLHERMALQLQDCLVQGKVPTWMTEARTVLIMKDVKKGNIASNYRPITCLPVMYKLLTSMIAEDLYRHMDDHQLFPEEQKGCKKRSRGTKDQLIIDKAVLKDCRSRKTNLAMAWIDYKKAYDMVSHTWIMECLDMVGVADAVKRLLSESMKTWRTNLTANNDSLGKVCIRRGIFQGDSLSPLLFVLALMPLSMILRKVSAGYVMKRDGCKINHILFMDDLKLFAKNEAEIDSLVQTVRIFSDDIGMQFGLEKCASMTIKRGKRVHSDGIALPDGAQMRALGEEESYRYLGVLESDHVLHEESKVRLRAEYIRRVKKCLKSKLNGGNMIKAINTWAVSLMRYSGGIIEWTKEDLDVTDRKTRKLMTMHGMLHPRANVSRLYLPRSEGGRGLLSVADSVNIELRSLHRHVRSTEENLLKIARMYTTADEAGPKEYKRERKEERHQDWRNKPLHGRFLRCTEEVASCKSWNWLKSGELKKETEGLITAAQDQSLRTNVMKARIEKTNVSPMCRMCNKAEETVFHIVSECSKMAQTEYKGRHDKLAKVIHWDLCKKYGVQVYAKWYDHVPEKVVETDEVKILWDFNIQTDHVIEHRRPDVVVLDKTKKMCHIIDIAVPGDIRVASKEMEKIEKYQDLARELRKIWQVKVKVVPVVVGALGTIPKALEKHLDQIGTTVRVDLLQKAALLGTARILRKALEI

SEQ ID NO: 25535 - protein, 1136 aa, Asterias rubens
MLIMSAMEHQFNGERVTNSQRGSPSPDLVGMPEQVLPDRIQTAHNGIRGGTRRKWSKNDNKIAMDCYIKSEPDKRGYRRRMISLWQDKGMFEISEQRLADQISTIKRNQWLTNVEIEEMRRIVQSESDGTDIVNHQIPEEAAAASSQSEDEVNQPGLRNGQDDDGIDDEEGVEFTEEEVQIKARLQEVMEAAKGSNGWSIPALRRVPRKRLTEMQAVVSKVLGSVSTDNLSETNRLIFAGAVVVGEKLGVEVSQQGNSTPWWKRRLEGQIKDLRRDLSRIEQMNKGLLNSSDLRNTIMTKYNVKRKGVSVVIEEIKQRVKAKAAKVKRYDDRVRQFHQNRLFNTNQRQLFKELDGKADSTQAVPRPTEAKTFWGGIWDKPVKHNRQAEWLTDVKDELRGVQQQEGFQIDVDKVKRQIKKVPNWKAPGMDHVHGYWLKNFRSLHERMALQLQDCLVQGKVPSWMTEAKTVLIMKDVKKGNIASNYRPITCLPVMYKLLTSMIAEDLYRHMDDQQLFPEEQKGCKKRSRGTKDQLIIDKAVLKDCRSRKTNLAMAWIDYKKAYDMVSHTWIMECLDMVGVADAVKRLLGESMKTWRTNLTANDDNLGKVCIRRGIFQGDSLSPLLFVLAMMPLSMILRKVSAGYVMKKDGCKINHLLFMDDLKLFAKNEAEIDSLVQTVRIFSDDIGMQFGLEKCASMTMKRGKRVHSDGIALPDGAQLRALGEEESYRYLGVLESDHVLHKESKVRLKAEYIRRVKKCLKSKLNGGNMIKAINTWAVSLMRYSAGIVEWTKEDLDVTDRRTRKLMTMHGMLHPRSNVSRLYLPRSEGGRGLLSVADSVNIERRSLHCHVRRTEESLLKVAQRYTRADEVGPKEYKRERKEERHQDWRNKPLHGRFLRCTEEVASSKSWNWLKSGELKKETEGLITAAQDQSLRTNVMKARIEKANVSPMCRMCNKAEETVFHIISECSKMAQTEYKGRHDKLAKVIHWDLCKKYGVKVLAKWYDHVPEKVVENDQVKILWDFNIQTDHVIQHRRPDVVLLDKTKKMCHLIDIAVPGDIRVASKEMEKIEKYQDLARELRKIWQVKVKVVPVVVGALGTIPKALGKHLDEIGTNVRVDLLQKAALLGTARILRKTLEI

SEQ ID NO: 25536 - protein, 1108 aa, Asterias rubens
MPEQVLPDRIQTAHNGIRGGTRRKWSKNDNKIAMDCYIKSEPDKRGYRRRMISLWQDKGMFEISEQRLADQISTIKRNQWLTNVEIEEMRRIVQAESDGTDIVNHQIPDPEEAAAASSQSEDEVNQPGLRNGQDDDGIDDEEGVEFTEEEVQIKHRLQEVMEAAKGSNGWSIPALRRVPRKRLTEMSAVVSKVLGSVSTDNLSETNRLIFAGAVVVGEKLGVEVSQQGNSTPWWKRRLEGQIKDLRRDLSRIEQMNKGLLNSSDFRNTIMTKYNVKRKGVSVVIEEIKQRVKAKAAKVKRYDDRVRQFHQNRLFNTNQRQLFKELDGKADSTQASPRPTEAKTFWGGIWDKPVKHNRQAEWLTDVKDELRGVQQQEGFQIDVDKVRRQIKKVPNWKAPGLDHVHGYWLKNFRSLHERMALQLQDCLVQGKVPSWMTEAKTVLIMKDVKKGNIASNYRPITCLPVMYKLLTSMIAEDLYRHMDDQQLFPEEQKGCKKRSRGTKDQLIIDKAVLKDCRSRKTNLAMAWIDYKKAYDMVSHTWIMECLDMVGVADAVKRLLGESMKTWRTNLTANDDNLGKVCIRRGIFQGDSLSPLLFVLALMPLSMILRKVSAGYVMKKDGCKINHLLFMDDLKLFAKNEAEIDSLVQTVRIFSDDIGMQFGLEKCASMTMKRGKRVHSDGIALPDGAQLRALGEEESYRYLGVLESDHVLHKESKVRLKAEYIRRVKKCLKSKLNGGNMIKAINTWAVSLMRYSAGIVEWTKEDLDVTDRRTRKLMTMHGMLHPRSNVSRLYLPRSEGGRGLLSVADSVNIERRSLHCHVRRTEESLLKVAQRYTRADEVGPKEYKRERKEERHQDWRNKPLHGRFLRCTEEVASSKSWNWLKSGELKKETEGLITAAQDQSLRTNVMKARIEKANVSPMCRMCNKAEETVFHIVSECSKMAQTEYKGRHDKLAKVIHWDLCKKYGVKVLAKWYDHVPEKVVETDQVKILWDFNIQTDHVIQHRRPDVVLLDKTKKMCHLIDIAVPGDTRVASKEMEKIEKYQDLARELRKIWQVKVKVVPVVVGALGTIPKALGKHLDEIGTNVRVDLLQKAALLGTARILRKTLEI

SEQ ID NO: 25537 - protein, 854 aa, Asterias rubens
MNKGLLNSSDLTNTIMTKYNVKRKGVSVVIEEIKQRVKAKAAKVKRYDDRVRQFHQNRLFNTNQRQLFKELDGKAHSTQAVPRPTEAKTFWGGIWDKPVKHNRQAEWLTDVKDELRGVQQQEGFQIDVDKVKRQIKKVPNWKAPGMDHVHGYWLKNFRSLHERMALQLQDCLVQGKVPSWMTEAKTVLIMKDVKKGNIASNYRPITCLPVMYKLLTSMIAEDLYRHMDDQQLFPEEQKGCKKRSRGTKDQLIIDKAVLKDCRSRKTNLAMAWIDYKKAYDMVSHTWIMECLDMVGVADAVKRLLGESMKTWRTNLTANDDNLGKVCIRRGIFQGDSLSPLLFVLAMMPLSMILRKVSAGYVMKKDGCKINHLLFMDDLKLFAKNEAEIDSLVQTVRIFSDDIGMQFGLEKCASMTMKRGKRVHSDGIALPDGAQLRALGEEESYRYLGVLESDHVLHKESKVRLKAEYIRRVKKCLKSKLNGGNMIKAINTWAVSLMRYSAGIVEWTKEDLDVTDRRTRKLMTMHGMLHPRSNVSRLYLPRSEGGRGLLSVADSVNIERRSLHCHVRRTEESLLKVAQRYTRADEVGPKEYKRERKEERHQDWRNKPLHGRFLRCTEEVASSKSWNWLKSGELKKETEGLITAAQDQSLRTNVMKARIEKANVSPMCRMCNKAEETVFHIVSECSKMAQTEYKGRHDKLAKVIHWDLCKKYGVKVLAKWYDHVPEKVVENDQVKILWDFNIQTDHVIQHRRPDVVLLDKTKKMCHLIDIAVPGDIRVASKEMEKIEKYQDLARELRKIWQVKVKVVPVVVGALGTIPKALGKHLDEIGTNVRVDLLQKAALLGTARILRKTLEI

SEQ ID NO: 25538 - protein, 1136 aa, Asterias rubens
MLIMSAMEHQFNGERVTNSQRGSPSPDLVGMPEQVLPDRIQTAHNGIRGGTRRKWSKNDNKIAMDCYIKSEPDKRGYRRRMISLWQDKGMFEISEQRLADQISTIKRNQWLTNVEIEEMRRIVQAESDGTDIVNHQIPEEAAAASSQSEDEVNQPGLRNGQDDDGIDDEEGVEFTEEEVQIKARLQEVMEAAKGSNGWSIPALRRVPRKRLTEMSAVVSKVLGSVSTDNLSETNRLIFAGAVVVGEKLGVEVSQQGNSTPWWKRRLEGQIKDLRRDLSRIEQMNKGLLNSSDLRNTIMTKYNVKRKGVSVVIEEIKQRVKAKAAKVKRYDDRVRQFHQNRLFNTNQRQLFKELDGKADSTQAVPRPTEAKTFWGGIWDKPVKHNRQAEWLTDVKDELRGVQQQEGFQIDVDKVKRQIKKVPNWKAPGMDHVHGYWLKNFRSLHERMALQLQDCLVQGKVPSWMTEAKTVLIMKDVKKGNIASNYRPITCLPVMYKLLTSMIAEDLYRHMDDQQLFPEEQKGCKKRSRGTKDQLIIDKAVLKDCRSRKTNLAMAWIDYKKAYDMVSHTWIMECLDMVGVADAVKRLLGESMKTWRTNLTANDDNLGKVCIRRGIFQGDSLSPLLFVLAMMPLSMILRKVSAGYVMKKDGCKINHLLFMDDLKLFAKNEAEIDSLVQTVRIFSDDIGMQFGLEKCASMSMKRGKRVHSDGIALPDGAQLRALGEEESYRYLGVLESDHVLHKESKVRLKAEYIRRVKKCLKSKLNGGNMIKAINTWAVSLMRYSAGIVEWTKEDLDVTDRRTRKLMTMHGMLHPRSNVSRLYLPRSEGGRGLLSVADSVNIERRSLHCHVRRTEESLLKVAQRYTRADEVGPKEYKRERKEERHQDWRNKPLHGRFLRCTEEVASSKSWNWLKSGELKKETEGLITAAQDQSLRTNVMKARIEKANVSPMCRMCNKAEETVFHIVSECSKMAQTEYKGRHDKLAKVIHWDLCKKYGVKVLAKWYDHVPEKVVENDQVKILWDFNIQTDHVIQHRRPDVVLLDKTKKMCHLIDIAVPGDIRVASKEMEKIEKYQDLARELRKIWQVKVKVVPVVVGALGTIPKALGKHLDEIGTNVRVDLLQKAALLGTARILRKTLEI

SEQ ID NO: 25539 - protein, 1136 aa, Asterias rubens
MLIMSAMEHQFNGERVTNSQRGSPSPDLVGMPEQVLPDRIQTAHNGIRGGTRRKWSKNDNKIAMDCYIKSEPDKRGYRRRMRSLWQDQGMFEISEQRLADQISTIKRNQWLTNVEIEEMRRIVQAESDGTDIVNHQIPEEAAAASSQSEDEVNQPGLRNGQDDDGIDDEEGVEFTEEEVQIKARLQEVMEAAKGSNGWSIPALRRVPRKRLTEMSAVVSKVLGSVSTDNLSETNRLIFAGAVVVGEKLGVEVSQQGNSTPWWKRRLEGQIKDLRRDLSRIEQMNKGLLNSSDLRNTIMTKYNVKRKGVSVVIEEIKQRVKAKAAKVKRYDDRVRQFHQNRLFNTNQRQLFKELDGKADSTQAVPRPTEAKTFWGGIWDKPVKHNRQAEWLTDVKDELREVQQQEGFQIDVDKVKRQIKKVPNWKAPGMDHVHGYWLKNFRSLHERMALQLQDCLVQGKVPSWMTEAKTVLIMKDVKKGNIASNYRPITCLPVMYKLLTSMIAEDLYRHMDDQQLFPEEQKGCKKRSRGTKDQLIIDKAVLKDCRSRKTNLAMAWIDYKKAYDMVSHTWIMECLDMVGVADAVKRLLGESMKTWRTNLTANDDNLGKVCIRRGIFQGDSLSPLLFVLAMMPLSMILRKVSAGYVMKKDGCKINHLLFMDDLKLFAKNEAEIDSLVQTVRIFSDDIGMQFGLEKCASMTMKRGKRVHSDGIALPDGAQLRALGEEESYRYLGILESDHVLHKESKVRLKAEYIRRVKKCLKSKLNGGNMIKAINTWAVSLMRYSAGIVEWTKEDLDVTDRRTRKLMTMHGMLHPRSNVSRLYLPRSEGGRGLLSVADSVNIECRSLHCHVRRTEESLLKVAQRYTRADEVGPKEYKRERKEERHQDWRNKPLHGRFLRCTEEVASSKSWNWLKSGELKKETEGLITAAQDQSLRTNVMKARIEKANVSPMCRMCNKAEETVFHIVSECSKMAQTEYKGRHDKLAKVIHWDLCKKYGVKVLAKWYDHVPAKVVENDQVKILWDFNIQTDHVIQHRRPDVVLLDKTKKMCHLIDIAVPGDIRVASKEMEKIEKYQDLARELRKIWQVKVKVVPVVVGALGTIPKALGKHLDEIGTNVRVDLLQKAALLGTARILRKTLEI

SEQ ID NO: 25540 - protein, 1138 aa, Marthasterias glacialis
MIMTSAMEHQVNGEIVTNSQRGSPSPDLVGMPEQVPPDRIQTAQNRIRVAARRKWSKNDNKIAMECYIKSVPDKRGYRKRMFSLWQDKEMFDISEQRLADQISTIKRNRWLTNVEIEEMRRKVQAESNRTEIVNHHVPEDVTAASSQTEDEVDLPGLQDDQDDGGIDEDGCLELTEEEVQIKTRVQEVMRAAKGSNGWSIPALRRVPRKRLTDMSAVVSKVLGSVSTNNLLETNRLMFAGAVIVGEKLGVKASSPEHENSTPWWKRRLEGQIKDLRRDLSRLEQISKGLIKGSDWRNTIMTKYNVKGKGVSVVIEEIKQRVKAKAAKVKRYDDRVRQFHQNRLFNTNQRQLFKELDGKIDNTQAGPRPAEARTFWGGIWDRPVQHNRQADWLTDVKDELRGVQQQEGFQIDVDKVKRQVRKVPNWKAPGPDHVHGYWLKNFRSLHERMALQLQDCLVQGKVPTWMTEARTVLIMKDVKKGNIASNYRPVTCLPVMYKLLTSMIAEDLYRHMDDHQLFPEEQKGCKKRSRGTKDQLIIDKAVLKDCRSRKTNLAMAWIDYKKAYDMVSHTWIMECLDMVGVADAVKRLLSESMKTWRTNLTANNDSLGKVCIRRGIFQGDSLSPLLFVLALMPLSMILRKVSAGYVMKRDGCKINHLLFMDDLKLFAKNEAEIDSLVQTVRIFSDDIGMQFGLEKCASMTMKRGKRVHSDGIALPDGAQMRALGEEESYRYLGVLESDHVLHEESKVRLRAEYIRRVRKCLKSKLNGGNMVKAINTWAVSLMRYSGGIIEWTKEDLDVTDRRTRKLMTMHGMLHPRANVSRLYLPRSEGGRGLLSVADSVNIERRSLHRHVRSTEENLLKIARMYTTADEAGPKEYKRERKEERHQDWRNKPLHGRFLRCTEEVASCKSWNWLKSGELKKETEGLITAAQDQSLRTNVMKARIEKTNVSPMCRMCNKAEETVFHIVSECSKMAQTEYKGRHDKLAKVIHWDLCKKYGVQVHAKWYDHVPEKVVETDAVKILWDFNIQTDHVIEHRRPDVVVLDKTKKMCHIIDIAVPGDIRVASKEKEKIEKYQDLARELRKIWQVKVKVVPVVVGALGTIPKALDKHLDQIGTTVRVYLLQKAALLGTARILRKTLEI

SEQ ID NO: 25541 - protein, 1136 aa, Asterias rubens
MLIMSAMEHQFNGERVTNSQRGSPSPDLVGMPEQVLPDRIQTAHNGIRGGTRRKWSKNDNKIAMDCYIKSEPDKRGYRRRMISLWQDQGMFEISEQRLADQISTIKRNQWLTNVETEEMRRIVQAESDGTDIVNHQIREEAAAASSQSEDEVNQPGLRNGQDDDGIDDEEGVEFTEEEVQIKARLQEVMEAAKGSNGWSIPALRRVPRKRLTEMSAVVSKVLGSVSTDNLSETNRLIFAGAVVVGEKLRVEVSQQGNSTPWWKRRLEGQIKDLRRDLSRIEQMNKGLLNSSDLRNTIMTKYNVKRKGVSVVIEEIKQRVKAKAAKVKRYDDRVRQFHQNRLFNTNQRQLFKELDGKADSTQAVPRPTEAKTFWGGIWDKPVKHNRQAEWLTDVKDELRGVQQQEGFQIDVDKVKRQIKKVPNWKAPGMDHVHGYWLKNFRSLHERMALQLQDCLVQGKVPSWMTEAKTVLIMKDVKKGNIASNYRPITCLPVMYKLLTSMIAEDLYRHMDDQQLFPEEQKGCKKRSRGTKDQLIIDKAVLKDCRSRKTNLAMAWIDYKKAYDMVSHTWIMECLDMVGVADAVKRLLGESMKTWRTNLTANDDNLGKVCIRRGIFQGDSLSPLLFVLAMMPLSMILRKVSAGYVMKKDGCKINHLLFMDDLKLFAKNEAEIDSLVQTVRIFSDDIGMQFGLEKCASMTMKRGKRVHSDGIALPDGAQLRALGEEESYRYLGVLESDHVLHKESKVRLKAEYIRRVKKCLKSKLNGGNMIKAINKWAVSLMRYSAGIVEWTKEDLDVTDRRTRKLMTMHGMLHPRSNVSRLYLPRSEGGRGLLSVADSVNIERRSLHCHVRRTEESLLKVAQRYTRADEVGPKEYKRERKEERHQDWRNKPLHGRFLRCTEEVASSKSWNWLKSGELKKETEGLITAAQDQSLRTNVMKARIEKANVSPMCRMCNKAEETVFHIVSECSKMAQTEYKGRHDKLAKVIHWDLCKKYGVKVLAKWYDHVPEKVVENDQVKILWDFNIQTDHVIPHRRPDVVLLDKTKKMCHLIDIAVPGDIRVASKEMEKIEKYQDLARELRKIWQVKVKVVPVVVGALGTIPKALGKHLDEIGTNVRVDLLQKAALLGTARILRKTLEI

SEQ ID NO: 25542 - protein, 1136 aa, Marthasterias glacialis
MIMTSAMEHQVNGEIVTNSQRGSPSPDLVGMPEQVPPNRIQTAQNRVRVATRRKWSKNDNKIAMECYIKSEPDKRGYRKRMFSLWQDKEMFDISEQRLADQISTIKRNRWLTNVEIEEMRRKVQAESNRTEIVNHHVPEDVAAASSQTEDEVDLPGLQDGQDDGGIDEEEGLELTEEEAQIKTRVQEVMRAAKGSNGWSIPALRRVPRKRLTDMSAVVSKVLGSVSTNNLLETNRLMFAGAVVVGEKLGVKASSPEHENSTPWWKRRLEGQIKDLRRDLSRLEQISKGLIKGSDLRNTIMTKYNVKGKGVSVVIEEIKQRVKAKAAKVKRYDDRVRQFHQNRLFNTNQRQLFKELDGKIDNTQAGPRPAEARTFWGGIWDRPVQHNRQADWLTDVKDELRGVQQQEGFQIDVDKVKRQVKKVPNWKAPGPDHVHRYWLKNFRSLHERMALQLQDCLVQGKVPTWMTEARTVLIMKDVKKGNIASNYRPITCLPVMYKLLTSMIAEDLYRHMDDHQLFPEEQKGCKKRSRGTKDQLIIDKAVLKDCRSRKTNLAMAWIDYKKAYDMVSHTWIMECLDMVGMADAVKRLLSESMKTWRTNLTANNDSLGKVCIRRGIFQGDSLSPLLFVLALMPLSMILRKVSAGYVMKRDGCKINHLLFMDDLKLFAKNEAEIDSLVQTVRIFSDDIGMQFGLEKCASMTMKRGKRVHSDGIALPDGAQMRALGEEESYRYLGVLESDHVLHEESKVRLRAEYIRRVKKCLKSKLNGGNMIKAINTWAVSLMRYSGGIIEWTKEDLDVTDRRTRKLMTVHGMLHSRANVSRLYLPRSEGGRGLLSVADSVNIERRSLHRHVRSTEENLLKIARMYTTADEAGPKEYKRERKEERHQDWRNKPLHGRFLRCTEEVASCKSWNWLKSGELKKETEGLITAAQDQSLRTNVMKARIEKTNVSPMCRMCNKAEETVFHIVSECSKMAQTEYKGRHDKLAKVIHWDLCKKYGVQVHANDHVPEKVVETDEVKILWDFNIQTDHVIEHRRPDVVVLDKTKKMCHIIDIAVPGDIRVASKEMEKIEKYQDLARELRKIWQVKVKVVPVVVGALGTIPKALEKHLDQIGTTVRVDLLQKAALLGTARILRKTLEI

SEQ ID NO: 25543 - protein, 1136 aa, Asterias rubens
MLIMSAVEHQFNGERVTNSQRGSPSPDLVGMPEQVLPDRIQTAHNGIRGGTRRKWSKNDNKIAMDCYIKSEPDKRGYRRRMISLWQDKGMFEISEQRLADQISTIKRNQWLTNVEIEEMRRIVQAESDGTDIVNHQIPEEAAAASSQSEDEVNQPGLRNGQDDDGIDDEGGVEFTEEEVQIKARLQEVMEAAKGSNGWSIPALRRVPRKRLTEMSAVVSKVLGSVSTDNLSETNRLIFAGAVVVGEKLGVEVSQQGNSTPWWKRRLEGQIKDLRRDLSRIEQMNKGLLNSSDLRNTIMTKYNVKRKGVSVVIEEIKQRVKAKAAKVKRYDDRVRQFHQNRLFNTNQRQLFKELDGKADSTQAVPRPTEAKTFWGGIWDKPVKHNRQAEWLTDVKDELRGVQQQEGFQIDVDKVKRQIKKVPNWKAPGMDHVHGYWLKNFRSLHERMALQLQDCLVQGKVPSWMTEAKTVLIMKDVKKGNIASNYRPITCLPVMYKLLTSMIAEDLYRHMDDQQLFPEEQKGCKKRSRGTKDQLIIDKAVLKDCRSRKTNLAMAWIDYKKAYDMVSHTWIMECLDMVGVADAVKRLLGESMKTWRTNLTANDDNLGKVCIRRGIFQGDSLSPLLFVLAMMPLSMILRKVSAGYVMKKDGCKINHLLFMDDLKLFAKNEAEIDSLVQTVRIFSDDIGMQFGLEKCASMTMKRGKRVHSDGIALPDGAQLRALGEEESYRYLGVLEPDHVLHKESKVRLKAEYIRRVKKCLKSKLNGGNMIKAINTWAVSLMRYSAGIVEWTKEDLDVTDRRTRKLMTMHRMLHPRSNVSRLYLPRSEGGRGLLSVADSVNIECRSLHCHVRRTEESLLKVAQRYTRADEVGPKEYNREKKEERHQDWRNKPLHGRFLRCTEEVASSKSWNWLKSGELKKETEGLITAAQDQSLRTNVMKARIEKANVSPMCRMCNKAEETVFHIVSECSKMAQTEYKGRHDKLAKVIHWDLCKKYGVKVLAKWYDHVPEKVVENDQVKILWDFNIQTDHVIQHRRPDVVLLDKTKKMCHLIDIAVPGDIRVASKEMEKIEKYQDLARELRKIWQVKVKVVPVVVGALGTIPKALGKHLDEIGTNVRVDLLQKAALLGTARILRKTLEI

SEQ ID NO: 25544 - protein, 962 aa, Marthasterias glacialis
MRRKVQAESNRTEIVNHHVPEDGTAASSQTEDEVDLPGLQDGQDDGGIDEEEGLELTEEEVQIKTRVQEVMRAAKGSNGWSIPALRRVPRKRLTDMSAVVSKVLGSVSTNNLLETNRLMFAGAVVVGEKLGVKASSPEHENSTPWWKRRLEGQIKDLRRDLSRLEQISKGLIEGSDWRNTIMTKYNVKGKRVSVVIEEIKQRVKAKAAKVKRYDDRVRQFHQNRLFNTNQRQLFKELDGKIDNTQAGPRPAEARTFWGGIWDRPVQHNRQADWLTDVKDELRGVQQQEGFQIDVDKVKRQVRKVPSWKAPGPDHVHGYWLKNFRSLHERMALQLQDCLVQGKVPTWMTEARTVLIMKDVKKGNIASNYRPITCLPVMYKLLTSMIAEDLYRHMDDHQLFPEEQKGCKKRSRGTKDQLIIDKAVLKDCMSRKTNLAMAWIDYKKAYDMVSHTWIMECLDMVGVADAVKRLLSESMKTWRTNLTANNDSLGKVCIRRGIFQGDSLSPLLFVLALMPLSMILRKVSAGYVMKRDGCKINHLLFMDDLKLFAKNKAEIDSLVQTVRIFSDDIGMQFGLEKCASMTMKRGKRVHSDGIALPDGAKMRALGEEESYRYLGVLESDRVLHEESKVRLRAEYIRRVKKCLKSKLNGGNMIKAINTWAVSLMRYSGGIIEWTKEDLDVTDRKTRKLMTMHGMLHPRANVSRLYLPRSEGGRGLLSVADSVNIERRSLHRHVRSTEENLLTIARMYTKADEAGPKEYKRERKEERHQDWRNKPLHGRFLRCTEEVTSCKSWNWLKSGELKKETEGLITAAQDQSLRTNVMKARIEKTNVSPMCRMCNKAEETVFHIVSECSKMAQTEYKGRHDKLAKVIHWDLCKKYGVQVYAKWYDHVPEKVVETDEVKILWDFNIQTDHVIEHRRPDVVVLDKTKKMCHIIDIAVPGDIRVASKGDGKDREVPGLGQGTS

SEQ ID NO: 25545 - protein, 1136 aa, Asterias rubens
MLIMSAVEHQFNGERVTNSQRGSPSPDLVGMPEQVLPDRIQTAHNGIRGGTRRKWSKNDNKIAMDCYIKSEPDKRGYRRRMISLWQDKGMFEISEQRLADQISTIKRNQWLTNVEIEEMRRIVQAESDGTDIVNHQIPEEAAAASSQSEDEVNQPGLRNGQDDDGIDDEGGVEFTEEEVQIKARLQEVMEAAKGSNGWSIPALRRVPRKRLTEMSAVVSKVLGSVSTDNLSETNRLIFAGAVVVGEKLGVEVSQQGNSTPWWKRRLEGQIKDLRRDLSRIEQMNKGLLNSSDLRNTIMTKYNVKRKGVSVVIEEIKQRVKAKAAKVKRYDDRVRQFHQNRLFNTNQRQLFKELDGKADSTQAVPRPTEAKTFWGGIWDKPVKHNRQAEWLTDVKDELRGVQQQEGFQIDVDKVKRQIKKVPNWKAPGMDHVHGYWLKNFRSLHERMALQLQDCLVQGKVPSWMTEAKTVLIMKDVKKGNIASNYRPITCLPVMYKLLTSMIAEDLYRHMDDQQLFPEEQKGCKKRSRGTKDQLIIDKAVLKDCRSRKTNLAMAWIDYKKAYDMVSHTWIMECLDMVGVADAVKRLLGESMKTWRTNLTANDDNLGKVCIRRGIFQGDSLSPLLFVLAMMPLSMILRKVSAGYVMKKDGCKINHLLFMDDLKLFAKNEAEIDSLVQTVRIFSDDIGMQFGLEKCASMTMKRGKRVHSDGIALPDGAQLRALGEEESYRYLGVLEPDHVLHKESKVRLKAEYIRRVKKCLKSKLNGGNMIKAINTWAVSLMRYSAGIVEWTKEDLDVTDRRTRKLMTMHRMLHPRSNVSRLYLPRSEGGRGLLSVADSVNIECRSLHCHVRRTEESLLKVAQRYTRADEVGPKEYKRERKEERHQDWRNKPLHGRFLRCTEEVASSKSWNWLKSGELKKETEGLITAAQDQSLRTNVMKARIEKANVSPMCRMCNKAEETVFHIVSECSKMAQTEYKGRHDKLAKVIHWDLCKKYGVKVLAKWYDHVPEKVVENDQVKILWDFNIQTDHVIQHRRPDVVLLDKTKKMCHLIDIAVPGDIRVASKEMEKIEKYQDLARELRKIWQVKVKVVPVVVGALGTIPKALGKHLDEIGTNVRVDLLQKAALLGTARILRKTLEI

SEQ ID NO: 25546 - protein, 1138 aa, Marthasterias glacialis
MIMTSAMEHQVNGEIVTNSQRGSPSPDLVGMPEQVPPDRIQTAQNRIRVATRRKWSKNDNKIAMECYIKSVPDKRGYRKRMFSLWQDKEMFDISEQRLADQISTIKRNRWLTNVEIEEMRRKVQAESNRTEIVNHHVPEDVTAASSQTEDEVDLPGLQDGQDDGGIDEDGCLELTEEEVQIKTRVQEVMRAAKGSNGWSIPALRRVPRKRLTDMSAVVSKVLGSVSTNNLLETNRLMFAGAVVVGEKLGVKASSPEHKNSTPWWKRRLEGQIKDLRRDLSRLEQISKGSIKGSDWRNTIMTKYNVKGKGVSVVIEEIKQRVKAKAAKVKRYDDRVRQFHQNRLFNTNQRQLFKELDGKIDNTQAGPRPAEARTFWGGIWDRPVQHNRQADWLTDVKDELRGVQQQEGFQIDVDKVKRQVRKVPNWKAPGPDHVHGYWLKNFRSLHERMALQLQDCLVQGKVPTWMTEARTVLIMKDVKKGNIASNYRPITCLPVMYKLLTSMIAEDLYRHMDDHQLFPEEQKGCKKRSRGTKDQLIIDKAVLKDCRSRKTNLAMAWIDYKKAYDMVSHTWIMECLDMVGVADAVKRLLSESMKTWRTNLTANNDSLGKVCIRRGIFQGDSLSPLLFVLALMPLSMILRKVSAGYVMKRDGCKINHLLFMDDLKLFAKNEAEIDSLVQTVRIFSDDIGMQFGLEKCASMTMKRGKRVHSDGIALPDGAQMRALGEEESYRYLGVLESDHVLHEESKVRLRAEYIRRVRKCLKSKLNGGNMVKAINTWAVSLMRYSGGIIEWTKEDLDVTDRRTRKLMTMHGMLHPRANVSRLYLPRSEGGRGLLSVADSVNIERRSLHRHVRSTEENLLKIARMYTTADEAGPKEYKRERKEERHQDWRNKPLHGRFLRCTEEVASCKSWNWLKSGELKKETEGLITAAQDQSLRTNVMKARIEKTNVSPMCRMCNKAEETVFHIVSECSKMAQTEYKGRHDKLAKVIHWDLCKKYGVQVHAKWYDHVPEKVVETDAVKILWDFNIQTDHVIEHRRPDVVVLDKTKKMCHIIDIAVPGDIRVASKEKEKIEKYQDLARELRKIWQVKVKVVPVVVGALGTIPKALDKHLDQIGTTVRVDLLQKAALLGTARILRKTLEI

SEQ ID NO: 25547 - protein, 1136 aa, Asterias rubens
MLIMSAMEHQFNGERVTNSQRGSPSPDLVGMPEQVLPDRIQTAHNGIRGGTRRKWSKNDNKIAMDCYIKSEPDKRGYRRRMISLWQDQGMFEISEQCLADQISTIKRNQWLTNVEIEEMRRIVQAESDGTDIVNHQIPEEAAAASSQSEDEVNQPGLRNGQDDDGIDDEEGVEFTEEEVQIKARLQEVMEAAKGSNGWSIPALRRVPRKRLTEMSAVVSKVLGSVSTDNLSETNRLIFAGAVVVGEKLGVEVSQQGNSTPWWKRRLEGQIKDLRRDLSRIEQMNKGLLNSSDLRNTIMTKYNVKRKGVSVVIEEIKQRVKAKAAKVKRYDDRVRQFHQNRLFNTNQRQLFKELDGKADSTQAVPRPTEAKTFWGGIWDKPVKHNRQAEWLTDVKDELRGVQQQEGFQIDVDKVKRQIKKVPNWKAPGMDHVHGYWLKNFRSLHERMALQLQDCLVQGKVPSWMTEAKTVLIMKDVKKGNIASNYRPITCLPVMYKLLTSMIAEDLYRHMDDQQLFPEEQKGCKKRSRGTKDQLIIDKAVLKDCRSRKTNLAMAWIDYKKAYDMVSHTWIMECLDMVGVADAVKRLLGESMKTWRTNLTANDDNLGKVCIRRGIFQGDSLSPLLFVLAMMPLSMILRKVSAGYVMKKDGCKINHLLFMDDLKLFAKNEAEIDSLVQTVRIFSDDIGMQFGLEKCASMTMKRGKRVHSDGIALPDGAQLRALGEEESYRYLGVLESDHVLHKESKVRLKAEYIRRVKKCLKSKLNGGNMIKAINTWAVSLMRYSAGIVEWTKEDLDVTDRRTRKLMTMHGMLHPRSNVSRLYLPRSEGGRGLLSVADSVNIECRSLHCHVRRTEESLLKVAQRYTRADEVGPKEYNRERKEERHQDWRNKPLHGRFLRCTEEVASSKSWNWLKSGELKKETEGLITAAQDQSLRTNVMKARIEKANVSPMCRMCNKAEETVFHIVSECSKMAQTEYKGRHDKLAKVIHWDLCKKYGVKVLAKWYDHVPEKVVENDQVKILWDFNIQTDHVIQHRRPDVVLLDKTKKMCHLIDIAVPGDIRVASKEMEKIEKYQDLARELRKIWQVKVKVVPVVVGALGTIPKALGKHLDEIGTNVRVDLLQKAALLGTARILRKTLEI

SEQ ID NO: 25548 - protein, 1138 aa, Marthasterias glacialis
MIMTSAMEHQVNGEIVTNSQRGSPSPDLVGMPEQVPPDRIQTAQNRIRVATRRKWSKNDNKIAMECYIKSVPDKRGYRKRMFSLWQDKEMFDISEQRLADQISTIKRNRWLTNVEIEEMRRKVQAESNRTEIVNHHVPEDVTAASSQTEDEVDLPGLQDGQDDGGIDEDGCLELTEEEVQIKTRVQEVMRAAKGSNGWSIPALRRVPRKRLTDMSAVVSKVLGSVSTNNLLETNRLMFAGAVVVGEKLGVKASSPEHENSTPWWKRRLEGQIKDLRRDLSRLEQISKGLIKGSDWRNTIMTKYNVKGKGVSVVIEEIKQRVKAKAAKVKRYDDRVRQFHQNRLFNTNQRQLFKELDGKIDNTQAGPRPAEARTFWGGIWDRPVQHNRQADWLTDVKDELRGVQQQEGFQIDVDKVKRQVRKVPNWKAPGPDHVHGYWLKNFRSLHERMALQLQDCLVQGKVPTWMTEARTVLIMKDVKKGNIASNYRPITCLPVMYKLLTSMIAEDLYRHMDDHQLFPEEQKGCKKRSRGTKDQLIIDKAVLKDCRSRKTNLAMAWIDYKKAYDMVSHTWIMECLDMVGVADAVKRLLSESMKTWRTNLTANNDSLGKVCIRRGIFQGDSLSPLLFVLALMPLSMILRKVSAGYVMKRDGCKINHLLFMDDLKLFAKNEVEIDSLVQTVRIFSDDIGMQFGLEKCASMTMKRGKRVHSDGIALPDGAQMRALGEEESYRYLGVLESDHVLHEESKVRLRAEYIRRVRKCLKSKLNGGNMVKAINTWAVSLMRYSGGIIEWTKEDLDVTDRRTRKLMTMHGMLHPRANVSRLYLPRSEGGRGLLSVADSVNIERRSLHRHVRSTEENLLKIARMYTTADEAGPKEYKRERKEERHQDWRNKPLHGRFLRCTEEVASCKSWNWLKSGELKKETEGLITAAQDQSLRTNVMKARIEKTNVSPMCRMCNKAEETVFHIVSECSKMAQTEYKGRHDKLAKVIHWDLCKKYGVQVHAKWYDHVPEKVVETVEVKILWDFNIQTDHVIEHRRPDVVVLDKTKKMCHIIDIAVPGDIRVASKEMEKIEKYQDLARELRKIWQVKVKVVPVVVGALGTIPKALEKHLDQIGTTVRVDLLQKAALLGTARILRKTLEI

SEQ ID NO: 25549 - protein, 1136 aa, Asterias rubens
MLIMSAVEHQFNGERVTNSQRGSPSPDLVGMPEQVLPDRIQTAHNGIRGGTRRKWSKNDNKIAMDCYIKSEPDKRGYRRRMISLWQDKGMFEISEQRLADQISTIKRNQWLTNVEIEEMRRIVQAESDGTDIVNHQIPEEAAAASSQSEDEVNQPGLRNGQDDDGIDDEGGVEFTEEEVQIKARLQEVMEAAKGSNGWSIPALRRVPRKRLTEMSAVVSKVLGSVSTDNLSETNRLIFAGAVVVGEKLGVEVSQQGNSTPWWKRRLEGQIKDLRRDLSRIEQMNKGLLNSSDLRNTIMTKYNVKRKGVSVVIEEIKQRVKAKAAKVKRYDDRVRQFHQNRLFNTNQRQLFKELDGKADSTQAVPRPTEAKTFWGGIWDKPVKHNRQAEWLTDVKDELRGVQQQEGFQIDVDKVKRQIKKVPNWKAPGMDHVHGYWLKNFRSLHERMALQLQDCLVQGKVPSWMTEAKTVLIMKDVKKGNIASNYRPITCLPVMYKLLTSMIAEDLYRHMDDQQLFPEEQKGCKKRSRGTKDQLIIDKAVLKDCRSRKTNLAMAWIDYKKAYDMVSHTWIMECLDMVGVADAVKRLLGESMKTWRTNLTANDDNLGKVCIRRGIFQGDSLSPLLFVLAMMPLSMILRKVSAGYVMKKDGCKINHLLFMDDLKLFAKNEAEIDSLVQTVRIFSDDIGMQFGLEKCASMTMKRGKRVHSDGIALPDGAQLRALGEEESYRYLGVLEPDHVLHKESKVRLKAEYIRRVKKCLKSKLNGGNMIKAINTWAVSLMRYSAGIVEWTKEDLDVTDRRTRKLMTMHRMLHPRSNVSRLYLPRSEGGRGLLSVADSVNIECRSLHCHVRRTEESLLKVAQRYTRADEVGPKEYNRERKEERHQDWRNKPLHGRFLRCTEEVASSKSWNWLKSGELKKETEGLITAAQDQSLRTNVMKARIEKANVSPMCRMCNKAEETVFHIVSECSKMAQTEYKGRHDKLAKVIHWDLCKKYGVKVLAKWYDHVPEKVVENDQVKILWDFNIQTDHVIQHRRPDVVLLDKTKKMCHLIDIAVPGDIRVASKEMEKIEKYQDLARELRKIWQVKVKVVPVVVGALGTIPKALGKHLDEIGTNVRVDLLQKAALLGTARILRKTLEI

SEQ ID NO: 25550 - protein, 944 aa, Marthasterias glacialis
MRAVKGSNGWSIPALCRVPRKRLTDMSAVVSKVLGSVSTNNLLETNRLKFAGAVVVGEKLGVKASSPEHENSTPWWERRLGGQIKDLRRDLSRLEQISKGLIKGSDWKNTIMTKYNVKGKGVSVVIKEIKQRVKAKAAKVKRYDDRVRQFHQNRLFNTNQHQLFKQLDGKIDSTQAGPRPAEARTFWGGIWDRPVQHNQQADWLTDVKDELRGVQQQDGFQIDVDKVKRQVRKVPNWKAPGPDHVHGYWLKNFRSLHERMALQLQDCLVQGKVPTWMTKARTVLIMKDVKKGNIASNYRPITCLPVMYKLLTSMIAEDLYRHMDDHQLFPEEQKGCKRQSRGTKDQLIIDKAVLKDCRSRKTNLAMAWIDYKKAYDMVSHTWIMECLDMVGVADAVKRLLSESMKTWRTNLTANNDSLGKVCIRRGIFQGDSLSPQLFVLALMPLSMILRKVSAGYVMKRDGCKINHLLFMDDLKLFAKNEAEIDSLVQTVRIFSDDIGMQFGLEKCASMTMKRGKRVHSDGIALPDGAQMRALGEEESYRYLGVLESDHVLHEESKVRLRAEYIRRVKKCLKSKLNGGNMIKAINTWAVSLMRYSGGIIEWTKEHLDVTDRTRKLMTMHGMLHPRANVSRLYLPRSEGGRGLLSVADSVNIERRSLLRHVRSTEENLLKIARKYTTADEGVQEGKERGKTPRLEEQATPWPVPEMYRRSGEMQILEVKERRTEEGNRGLDYCGARPGSQDKCHEARIEKTNVSPMCRMCNKAEETVFHIVSECSKMAQTEYKGRHDKLAKVIHWDLCKKYGVQVHAKWYDHVPEKVVETDEVKILWDFNIQTDHVIEHRRPDVLVLDKTKKMCHIIDIAVPGDIRVASKEMEKIEKYQDLARELRKIWQVKVKVVPVVVGAFGTIPKALEKHLDQIGTTVRVDLLQKAALLGTARILRKILEI

SEQ ID NO: 25551 - protein, 952 aa, Asterias rubens
MEAAKGSNGWSISALRRVPRKRLTEMSAVVSKVLGSVSTDNLSETNRLIFAGAVVVGEKLGVEVSQQGNSTPWWKRRLEGQIKDLRRDLIRIEQMNKGLLNSSDLRNTIMTKYNVKRKGVSVVIEEIKQRVEAKAAKVKRYDDRVRQFHQNRLFNTNQRQLFKELDGKADSTQAVPRPTEAKTFWGGIWDKPVKHNRQAEWLTDVKDELRGVQQQEGFQIDVDKVKRQIKKVPNWKAPGMDHVHGYWLKNFRSLHERMALQLQDCLVQGKVPSWMTEAKTVLIMKDVKKGNIASNYRPITCLPVMYKLLTSMIAEDLYRHMDDQQLFPEEQKGCKKRSRGTKDQLIIDKAVLKDCRSRKTNLAMAWIDFKKAYDMVSHTWIMECLDMVGVADAVKRLLGESMKTWRTNLTANDDNLGKVCIRRGIFQGDSLSPLLFVLAMMPLSMILRKVSAGYVMKKDGCKINHLLFMDDLKLFAKNEAEIDSLVQTVRIFSDDIGMQFGLEKCASMTMKRGKRVHSDGIALPDGAQLRDLGEEDTDNSSYRYLGVLESDHVLHKESKVRLKAEYIRRVKKCLKSKLNGGNMIKAINTWAVSLMRYSAGIVEWTKEDLDVTDRRTRKLMTMHGMLHPRSNVSRLYLPRSEGGRGLLSVADSVNIERRSLHCHVRRTEESLLKVAQRYTRADEVGPKEYKRERKEERHQDWRNKPLHGRFLRCTEEVASSKSWNWLKSGELKKETEGLITAAQDQSLRTNVMKARIEKANVSPMCRTCNKAEETVFHIVSECSKMAQTEYKGRHDKLAKVIHWDLCEKYGVKVLAKWYDHVPEKVVENDQVKILWDFNIQTDHVIQHRRPDVVLLDKTKKMCHLIDIAVPGDIRVASKEMEKIEKYQDLARELRKIWQVKVKVVPVVVGALGTIPKALGKHLDEIGTNVRVDLLQKAALLGTARILRKTLEI

SEQ ID NO: 25552 - protein, 1092 aa, Phalangium opilio
MASQSKGAAAQAIFIYGVNNGHHCPNCKGTVFADHVTWKNHINNHNLSSTYQCAICKEFKPSIASVATHYTHCKKKSARLPSSSHSMSDTSDLPATEDFPCRWCDARFRTFPGSRKHEQYAHRTEYEASLPRTKNIRWSTEENLILATLEANIDADDPSINKKLMALHPSRGYDAIKSHRKQPAHRELVARLRSKTHSTDSSSSEDVFVPEKEKIKTTSPNIIPNTYPDESSDSDGEVRHTSGATIHPENTGVEKLRLFFVQHSEDENPLVSMICSGVLDGTFQLESVRNLLPDSTLASENKPPRRPRVFKNRRAELRARYRYLQKLFNVNRKRLSAELFDNIDEVSVKPSVEDINATFGDLFSKQSKPDQEPYQFRARKEDTYLPIELSETSEALRKCGSSTPGPDGLTLRWLKSYNIKALTCIFNVFLYFKDLPTHLKRSRTVLLPKKGDLSQAANWRPISISSIIIRLFHGILARRLTRAVDLHYAQQAFLPYDGISVNTLLLDYMLTHSKRNMQEICAVSIDLAKAFDSVSHQSIFRALRAAGIEDQLIEYVANSYHGCSTTISCGEARTQEIILTNGVKQGDPLSPLLFNCVMDELARSLPSHIGFKFGDRLCNILCFADDIILVSSSKPGMNILLNELEKFLNLRGLALNTRKCKALVLTKLGKKKKILHDTKYKFYLSDQALENITKENLLSYLGIQFSPSGKHRPDLSAFFALISKLRDAKIKPHQKIVMLRDFLLPRFVHLLTLSNYTKSDLIKVDKSVKIFVRQFLRLPNYSPEGFLYVGLRDGGLGLPCFVTHTPLNSLSRLLNLKSSGNPLIKFLISTPYFGTLLNRLRNFTLRIGETKDDIKSFWRDKFFGTVYGAGLQEAVDSPISNAFLMDTKRAKTCKQYCEWVKLRLNLLPCRGSPANQGNKNCRAGCPRVESLSHISNSCPLSKSKYTSRHDKIVKLIKSSSKKPGVEIALEPRLVDTKNNVHKPDLVIVSDKELMVCDVYCPWETPRSLNNAYQSKLDTYDKPEVIEALNKIWPARTIQFSAFVVSARGIWCQRNNLICDYLNLGAGFRRLVCQVALEQTIRVYKSFMSAAHY

SEQ ID NO: 25553 - protein, 1089 aa, Phalangium opilio
MASTKKGAAVQAVFIYGVNNGHHCPQCKGTVFADHVTWKKHINSHNLSSTYQCAICKEFKPSMASVSTHYTHCKKKSANLPSSTHSMSDPPATTDFSCRWCDSRFRTFPGTRKHEQYAHRTEYEASLPRTKNVRWTAEEDLILATLDAKIDANDPSINKKLAALHPLRGYDAIKSHRRQPAYRALVARLRSETASTASTTSEDDSVPQRETFINTTIPNTYPDESPDSDGENRSNAMEAIITPESSGIEKLRLFFVEHSEDEDPLASLICSGVLDGTFVLESVRNLLPDPIVHGLDGNQPPRRPRVYKNRRAEIRARYRYLQKLYNVNRKRLSAEIFDNIDEIAAKPALEDINATFGDLFSQASIEDREPIKCRARKCDTYFPIEITETTEALRKCGSSTPGPDGLTLQWLKNYSVKALTCIFNVFLYFKDLPSHLKKSRTVLLPKKGDLSQAANWRPISISSILVRLFHGILARRLTRAVEFHHAQQAFLPYDGISVNTLLLDYILTHSKKNMTEVCAVSIDLAKAFDSVSHQSIFRSLRAAGIEDHLIEYVANSYLNSSTTISCGEVRTQEIVITNGVKQGDPLSPLLFNCVMDELARTLPSHIGFKLEDRLCNILCFADDIILVSSSKPGMNVLLSELEKFLELRGLALNTRKCKALVLTKLGKRKKLIHDSKFKFYLSDQALDSINKDNLLSYLGIQFSPSGKNRPELSSIFGLISKLRNAKIKPHQKIVMMRDFLLPRFVHLLTLSNYTKSDLIKVDKSVKIFVRQFLRLPNYSPEGFFYVGLRDGGLGLPCFATHTPLNSLSRLLNLKSSNHPLIKLLINTPYFETLLNRLRMFTLQIGETKEDVKSYWRERLFETVYGAGLREALDSPISNAFLMETKRAKSCKQFCEWIKLRLNLLPCRGAPSNQGNKNCRVGCPRVESLSHISNSCPLSKTKYISRHDKIVSLIKSSCKKPGVEIALEPRLVDALGNIHKPDLVIVSEEELMVCDAYCPWETPRSLDSAYQSKLDTYDKPEVIAALNTVWPGRTVQFSAFVVSARGVWCKRNNIICDYLGLGAGFRRLVCQVALEQTMRIYKSFMSAAHY

SEQ ID NO: 25554 - protein, 982 aa, Listronotus oregonensis
MEKYAGMDPTTRPTIRKIRVDRKAKSRVAEINTIIKSEVSTCNNITDLHELVYCAAQAIVQLCGYSVPQSRGDSNGTRKPGWETRLMKKINNIRKEIGILTEDQKANGKNKRVNRKAQEILKTYKDKNNSSPIEIIDLLKQRLKVFASRLNRYKEAYQRRIDNRTFSQSQRSFYKNLSNNQNDNRHAKHPTAEAIKDFWGGIWEKPVRHRSAANWIREETKIRNKIPMMTSQRISIEELNQVLSNISNWKAPGPDKIQNFWYKRLTSIRPKLLSLLNEIVTDPTKTPSFLMKGVTYLIPKTDQPSEDPSKYRPITCLPTLYKILSGIICNKIYKHLIDHNLLAEEQKGCRKQAQGCREQLIIDNTITKHVIKTKNDLHTAFIDYQKAFDSVPHSWLLQCLSVYKVNPSIVALLRAMMEQWETQITMGTPRDEHTKIRIMRGIFQGDALSALWFCIAINPLSTALNELRCGYEMENNVQLSHLMYMDDIKIFSSTQNGLKRELRCIENFSNDIRMRFGLDKCKTNCIRKGKWHDTEGHKLTSTSGGGTIAHMQKDDTYEYLGFAQSLGIQEGKVKQQLKDKLKKRTTAILKTKLSAQNTAMAINTYAIPAVAYSFGVVNWTETDLDDLNRTIRVCFTKNRKHHPKACKERFHLLEKGGRGIADMRIKHKKQIELMRKYFQERAARSTLHQAIINLDRNLTPLKLRDREYTCNPRFSDSSLMDQWRGKELHGRYPNMLDNPHLDKDASIAWLNKGNIFPETEGFMCAIQDQVVPTRSYLKYIAKEKNVTSTQCRMCGEKHENIEHLISGCKTLAPKEYTNRHNNVAKIIHTELAQKLKLIQQKVPYYKYTPEHVLENENHVLYWDRDIQTDRPVQHNRPDIVLFNKTEKEIFLIDIAIPAPANTQKKQVEKIDKYLPLSEDLKQTWQARRVKTIPIVIGATGEIPKELKHCLNTLGLQEDLFLELQKAVILSTCNIMRKALNKS

SEQ ID NO: 25555 - protein, 1163 aa, Venturia canescens
MNDNEDQASEAVEHGSAEAVVDLSTFDHENQYEDQGPQRLNEWKIGVPLVGLTECEPCRILGRNVSYLELKDLWGHLGDQHRETTISLRCDLCAKEFPGPRNWYSHKPRCRGPQHRPRLAHACEQCDATFSTVIGRSQHERSAHPEARNAKRQAALTRQGVPGRRNYVWSEEETESLKTLSELYHGTPNINVALAPFFPGKTLKQISDKRRVIASAIERGAQRGQAQIPNEEPSSEESSDDEWQDAQQELPENRDEDGRVAEEGAGPQQYDWVEALEMAINGANPNGEGEIAQWENELRQIWREHKENPAQLDEWINNHIISLINILVPQEEQTHGPRARTGPGRNDSPNDRAPRRQRRRRQAPANAARRRRFAYARCQELYDECPRKLAEMAVQGDFTFALTKLESPKTEDIDRLYSNLWSIEGPGLTERVHQDLRLAADVFPPIKEEEVAVRIAKLKGSSAAGIDNIKRAHLQKKGVAGALAMLFNILLREQIFPAEWKKNRTTLIPKEGKDLNEVKNWRPITIGSMMVRTFSAIIDQRLRAFVEQSPRQKGFTAENGCSMNILLLNEALVEMKGRGGVVTVLDVSKAFDTLPHSSIKPALERKKVPPELSAYIVNMYDGCTTTIKGRNGAVNIELKRGVKQGDPLSPLLFNLAIEDIIERVDGGDGGISIGNQEVSVLAFADDIVLLAANEKAAKKQLGTVYRGLSRLGMSLAAAKCSAFQYVAKAKTWYVKDPTLKLNGARIPHVNADETLKYLGVKMGPWRGLIKGTEVPTIVNTIKNVRQLKLKPHQKMELIQTFILPKFIHSLANNRPCKGTLKMLDQMIRQEVKEILHLVQSTPKALFYTAKASGGLGILNFERTIELAKIRLSLKLGNSQDPVIREIHQSGKVMEEARKAASSLGFLQPRSEEEFRNMKRKIGQKSIDEWEGLVTQHGVKDFKNDRLGNQWLRHPDLLRGSRFLDAIKLRTNTFGVKDVLSRTNPRMDATCRRCQAGRETLGHVLGLCIHTKAARIKRHNEIRDLVANGVSKRHTVMIEPTINELGELKKPDLVIMTEDEALVADVTVRYERGTYLKDAAKEKVDKYKMTAEMVKITANKIKCEVLPIVVGSRGAIPKDTRLNLKRLGLTNAEIITISMIALRSSIEIACKFLDYDREAREQRE

SEQ ID NO: 25556 - protein, 1193 aa, Venturia canescens
MAQIDMVTTMALRGIEWNRPTGRQNKPGIIMNDNDDQASEAAEHGSAEAVVDMPTIDQENQYDDQGLQRLNEWKIGVPLAGLTECEPCRIRGRYVAYLELKDLWGHLSDQHRQITISLRCDLCAREFPGPRNWYSHKPRCRGPQDRPRLAHACDLCDATFSTVVGRSQHERSAHPEARNAKRQAPLTKQGVPGRRNYVWSEEETESLKTLSELYNGIPNINVTLAPFFPGKTLKQISDKRRVIASAAERAVQRGRAQIPMEEPSSEGSSDDEWQDAQQELPDNNENEGDRAAAEGADPRQNDWAEALEMAINGANTNGEGEIAQWENELRQIWREQRENPAQLDEWVNNHILRLINILVPQEERTNGPRANTGPRGNDLPNDRAPRRQRRRRQAPANAARRRFAYARCQELYDECPRKLAEMAVQGDFTFALTKIEPPKTEDINRLYSNLWSTEGPVLTERVYQDLRLATDVFPPIREEEVAARIAKLKGSSAAGIDDVKRAHLQKKGVAGALAMLFNVLLRERIFPAEWKKNRTTLIPKEGKDSNDVKNWRPITIGSMMVRTFSAILDQRLRAFIEQSPRQKGFTAENGCSMNILLLNEALAEMKGRGGVVTVLDVSKAFDTLPHSSIKPALGRKKVPQELSEYILNMYNGCTTTIKGRNGAVNIELKRGVKQGDPLSPLLFNLAIEDIIERVDEGNGGILIGNEEVSILAFADDIVLLAANEKVAKKQLETVHRGLSRLGMSLAAAKCSAFQYVAKAKTWYVKDPILELNGARIPHVNVDETLKYLGVKMGPGRGLIKGTEVPTIVETIKNVRQLKLKPHQKMELIQVYILPKFIHSLANNRPCKGTLKMLDQMIRQEVKEILHLAQSTPKALFYTAKASGGLGVLNFERTIELAKINLSLKLGKSQDPVMREIHQSGKINEEARKAASSLGFLQPRSEEEFRNIKKRICQKSIDEWESLITQHGVRDFKNDRLGNQWLRNPDLLKGSRYLDAIRLRTNTFGVKDVLSRTNPRMDATCRRCQVGRETLGHVLGLCIHTKAARIKRHNEIRDLVANSVSKRHTVMVEPTINELGELKKPDLVIMTDDEALVADVTVRYERGTYLKDAAKEKVDKYKMTAEMVKITTNKLKSEVLPIVVGSRGAIPKDTRLNLKRLGLTNAEIITISMIALRSSIEITCKFLDYDRGAREQRE

SEQ ID NO: 25557 - protein, 1174 aa, Venturia canescens
MEDNEDQASEAAEHGSAEAVVDLSTSDHENQYDDQGPQRLNEWVIGVPLVGLTECEPCRVQGRNVAYLELKDLWGHLSDQHRQITVSLRCDLCARVFPGPRNWYSHKPRCRGPQHRPRLAHACEICDATFSTVVGRSQHERSAHPEARNAKRQAALTKQGVPGRRVYVWTEEETETLETLSNLYHGTPNINVVLAPFFPGKTLKQISDKRRVIAQAAEREARRQVRAQVNDVLSEVSSEDEAEEEEAPELMPNRDDRPIPGENRDEQQAAEVGAGPVPNDWAEALNRAIGVTDSEDSDEIAQWEKELRRLWRDNKDNVLQLDEYVNQHIIKLTNILVPQEEQTIGPMADARPSRSDVPNDPPRRQRRRRQAPANSARRRRFAYARCQELYDECPRKLAEMAVQGDLTFAHTKREPPKTEDIRRLYSGLWSTEGPVLARHGRYDLEKAYDVFPPITEEEVVARIKKLKGSSAAGIDNIKRAHLQKKGVASALTLLFNVLLREGIYPAEWRKNRTTLIPKEGKDPNEIKNWRPITIGSMMVRTFSAIIDQRLRAFIEQTPRQKGFTADDGCSMNILLLNEAITQMKGKGGVVTVLDVSKAFDTLPHSCLEPALSRKKVPKEISAYIIKMYDRCTTTIKGRNGAVDIDLKRGVKQGDPLSPLLFNLAIEDIIEKVDGREGGIVVGEQEVSVLAFADDIVLLATNEKAAKKQLDTVHRGLSRLGMSLAATKCSAFQYVAKSKTWYVKDPMLELNSTRTPHVNVDETLKYLGVKMGPWRGLVKGTEVPTIVQTIRNVRCLKLKPHQKMELIQTYILPKFIHSLANNRPCKGTLKMLDQMIRQEVEEILHLAQSTPKAMFYTAKACGGLGILNFERVIELAKIRLSLKLGETKDPVLKEVDRIGKVNEEARKAASSLGFLRPRSEEEFRQMKQKICQKTVDEWEGLVTQHGVKDFKNDRLGNQWLRNPDLLKGSRYLDAIRLRTNTFGVRDVLGRTNPRLDATCRRCHVGRETLGHVLGLCIHTKAARIKRHNEIRDLVANSVSRRHTVMIEPTINELGELKKPDLVILTEEEALVADVTVRYEKGTYLRDAAKEKEDKYRLTAEMVKITTNKIRSEVIPIVVGSRGAIPRNTRLNLKRLGLTNGEIITISMIALRSSIEMACKFLDYDREARERGDERQ

SEQ ID NO: 25558 - protein, 1279 aa, Trichonephila clavata
MRWHEKELPSPKTRVFRAKTDTAIQRTRVFTQSGSSASTALQANERGTVRSPTHADDSSVTPTCVKCGATTRTRKGMTYHMLQVHGVPVHKKQGPDSSRPDRGNAPLEDRTPAQISRHTCSASELEPGVSLIGETLRYTFPIPFVIACPVGNCTHTFATRAWFNTNHSLKRHMTAVHRMPSRSVEYWCSICRMRIAKNPAGHACLMSAGLTQHSTSVGGWPCDSCEFKATTKNGLLNHKKLHKKQAIADKMVALQVPAGPKIRKKMKKAKLAPLAVGEPGDLSLAPPPETPSELPPAEDTSRDNDGPRGRIDVQQPELLLSFNEPLDTLLEVEDLEDRKSHFEAIVEGITTSVQQNFNLSEPAPRTGSNSTNNGGLDTRDPQKVQKMYRWNRRKCIRALTQAASNRCPVSMQDTTSHFKNVWEEVSYPAERPLPEPPTRPPIVESFSQSFVASCLQSAENSAPGPDMISYRHWREVDPACLVLTKVFNVCLRFSDIPTCWKKSKTILIHKKGDPGDLNNWRPIALSDTIYKLFSKCLTKKIGEWCETHAVLSQAQKGFTPYDGVLEHNFLVAQHMEEARRRKKDKFFAWLDISNAFGSVPRQVVIDALIAVGADQDFIALIVNIYEDSTTQVLTEEGPTPPIALRSGVKQGCPLSGILFNLAIDQVLHAVQEGREHRAILAFADDLVLLADSAEELQEMVQTTADELHALCLHLNVRKCASLHLAGTTPVAARATTFTINNEQLKALQDGEYYSYLGKPVGFFLQRTYGSVNEALQLLVRISSSHLAPWQKIDALKSFFFPSLSFAMRTAQIDKTSWAEVDSAARKELKNLLSLPSMAANQYLHGSRKFGGCGLPSAAHDSDYYLVDSAFKLLTSKDEEVAVQALGQLTRTVRHRVQRSPTDGDLSSYLSGSMEDEFAETSNMLSNTWTLARQASRRQEVAWSFCDGLPTLSFGDECLTAGKRRTVMRAFHGKFQLDQTTDLLKAPSQGKAMDCVAMSPASSHFIAEGKYTRFADWRFIHKARLNLTALNGSKHWLPADQKRCRKCGKWEETLPHVINHCPAYSAAWQMRHNSVLSRIQKAVAFKGTVLHSNQVVGSNGLRPDLVALIDNKIYIIDVTIPFENRRVAFQQARWRKIEKYTPLLQHFASLGFAQAQIVPIVVGALGAWDPENDSFLKLVATRSYTNVLRKLCVSDCIRWSRDIYVQHLTGARQYSVDAAETSDEPKAVCEATKLNSDIGSPADSNDTTHDSQSSVAMQIVSQGSNAVTNSPHAVGQTADL

SEQ ID NO: 25559 - protein, 1768 aa, Trichonephila clavata
MDTVSTISPSPVAERTRAAVSAIDNATRNIACIICGDTFNSLYILKTHLKRRMRCGRRNKAIRNVDKLLGPRCTPTPPERATEDKFRELFPEEFRDLSNQGGQSTDTDASPIGGDVNSPQSTSLQDENVLGENVGATSTPKISSVFAPAKHWTVEFTPTHRSPQENSGTVEMTAAPPTTAANQVTTEQEAQPSQGEINILDLLLGSQEETLLEPEPPAGLQSQTMSIGHRSQEAQPRSSQREGEAAPLCKAPQDRKRKNLFRCTNCNLGFYTDTKLQEHLAEEKELQAVIDDIPQAVDPVPTTTGKQDKTVHKRKNKGARGKRKPQRLNLLDQGGKTCSTCGVSFLCDSDLERHRSEHHQTHKNTVRTRKVGTRGLDKKSDIPCQWCAHCANYVQITNGMAQHIKEAHNFQVEKAGRSPTHTKIVQVDPGDITDAAVPHGSATVHVTNDGKASPHKEVCLFCEKTFASEWGLIKHMEWLHLTDTPHPGHVTKDLRDHVSGASGARLDPMLPAPGYLPAKRARADKQQGSPSTAGPSSVIDARNTSCPRCTFVAKTRKGLTYHLLQVHGVQVHKRDSGKASQQTEERRHTPPQPQEVTQEQVTRQQHSTAACAPGISLLGDTVRYAFPIPRVVACPVRSCRHTFATRAWYTTNTSVKRHMTTVHRMPNKQVEFWCTVCSRRIAKKPANHKCLIEIGLTHHRGDHGEWPCPECDFVATTKNGLQNHAKSHRRREVEDKMVPLRLPVRPRTRKAIKKKKLEPLSTGEPGEMPLAPPPDSPQAVTHTTGEEDADTARGERIDIRHPQLLTPFVEALDTLLEIDEIQGRKDHFESLVANITRDVREHFHLAQPPVRKEIGNAGTSGLDVHDPQKVQKMYRWNRRKCIRALTHANSTTCPVSQEATQAYFKGVWETSNCPAERPMPEPPVRPPIVDSLSPAFVAACLQSAENSAPGPDLISYRHWREIDPSCKILCKIFNICIRLSDIPTCWKTSRTVLIHKKKDTGDIKNWRPISLSDTIYKLFTKCLTKKVNDWCEDHEVLSPAQKGFTPHDGVLEHNFLIAQHMEEARRLKKDKYLAWLDISNAFGSVPRQVIIDALVSVGADQDFITLVFNIYEDSTTQVLTEEGPTAPIALQSGVKQGCPLSGILFNIAIDQVLRSVQEDRSHRAVLAFADDLVLLADSAEEMQEMLQTTDEELRALCMHLNPNKCATLHLSGRTPVQAIPTVFQIRETGITALRDGESATYLGKPVGFFLRKTFGSVNEALTLLERISSSNLTQWQKIDAIKSFFFPSLSFAMRTAQIGKTSWTEVDVAARQELKNILSLPTNASNQYLHGNRKLGGCGIPSAAEDSDFYLVDSAFKLLTSKDEDVAIQALGQLTRTVRHRVRRQPTDGDMGSYMSGCMEDEFAESTNRLTNTWTLARQASKRVQVTWTFTEGLPSLTIADDCLTATKRRGVMKAFHDNFQLQESSKLLENPSQGKAMDCVALSPASTHFMLDGKYTRFADWKFVHRARLNLVPLNGSKHWLPKERRACRKCGKWDETLPHVLNHCTSYSAAWQMRHNAVLARVRTAVAFKGTILHENQVVGPDGLRPDLVALIDNKIYIIDATIPFENRRLAFQQARERKIVKYTPLLSHFASLGFVEAQIVPIVVGSLGAWDPENDKFLRLVATKSYLTTLRKLCVSDSIRWSRDIYIQHLTGAQQYKIGAPTTEDLQATPERQRNTIQCSERNEESPQGDATIASPIEPISPEIEIGANSPPSVVGSTNDGLVQI

SEQ ID NO: 25560 - protein, 1772 aa, Trichonephila clavata
MSELQQTSPSPVALRTRTVVAGLHEATAKRRCALCSFSTKQLSELRVHTAQHPASARRKQALYCIDSEMAKGYMDPTLDQDSATESKEPANSLGRSESTPVESNRLLEFPFAEPAHWTEAFSPLCHVTNATPVFDGQCKRTEAAGVVESPVEAILPDKPLDATPTANTTFVEVGTCTPPLIRSPTQDAETQCDTDILQQLLGSQDYTELEASPPQGPGAASTVEHAALAEIGNLFETPMTGPPRVSPFSRPTYAAKTKHNLHRCSNCERGFYSRAALETHMEEERVLDEVVQSIPQVSPKNSGSEEQQLITDTPAVKRPRRRRNALKNRQSQKREEKEVKAPGDTPRCSKCRITFLSHEAKSEHDKGFHFSSSTKNMGLSSKAQKESKECRWCTECGIYLPESITLAGHIARRHNVSRSVPSTKITHTKVVKIERANITDASISHGPSTVRVTKDKPTPGHNCRFCERSFSSSAGLAKHLRWHKKDLPGQRTREFRAKPSKVIQKTRVFTQSGPSVSTALQAADPNAVSSPTHAEDNSDVTTCVQCGTRTRTRKGMTYHMLQVHGVPIHKRNDTEPTPVSPTTSYDPAEVVYQLSEEREVVPGVELVGNTIRYTFPIPRELACPKSKCSHTFRTTQWYTTNTSLKRHLTAMHKIPHNLVEFWCSICHTRIRDKPASHPCLRERGLMHEVTQDKGWPCTDCDFVATTKTGLLNHGMAHRRKELQSQVVQLKVPDGPRKRQLKRRKRLGPLVTGQPGDTPLAAPVLEEQNNTEQGEDVGCARRERIDIKETLVLVSFEEPLDTLLDIEDLGDRKTHLEAIVGGVTQAVQEHFHLQRPVTQGDSSARKGLDTQDPQKLQRAYRWNRRKCIRAITQPSGTRCTLPKEEVHSYYTKIWEATSTPAEAPLPEPPVRPAVVEGFSQAFVQSCLQSAENSSPGPDMISYRHWREVDPNCKILTKIFNACLKLSDIPTSWKKSSTVLIHKKGDTGRLENWRPIALSDTVYKLFTKCLAKRLSEWCGIHEILSPAQKGFTPFDGVLEHNFLVSQHIESARRLNCDKFLAWLDLSNAFGSVPRQVIVEALIRNGVDQDFITLVDNIYEDSTTQVLTEEGPTDPISLKSGVKQGCPLSGILFNLAIDRVLWSVQEDREHRAILAFADDLVLLANSAEELQDMIRTTEQELHNLCLQPNPGKCATLHLSGKAPVQTLPSRFTMNGIELPILSDGEMYKYLGKPVGFFVQQSFSTPNDALKILEKISCSHLSPWQKLDALKTFFYPTLSFAMRTAQLGKECWSEVDSAARKEIKGILSLPQNAALGYLHGNRKLGSCGVPSAAEDSDFYLIDSAFKLLTSKDEEVSIHALGQLTRTARHRLGRPPTDGDLGSFLSGSMEGRFAETTNQLSNTWTLARKASHRQEVTWSFVDGLPTISFGDETITTTKRRAVMKAFHERFQVDQSTQLLSHPSQGKVMDCVAMSTASSHFIPNGMFTRFADWRFVHKARLGLVPLNGYKHWTPRQQRLCRKCGKWDETLPHVVNHCPSYSAAWQLRHNAIVARVKTAVAFKGTILHENQAMGPNKLRPDLVALVDGTTYIIDVTIPFENKRTAFYDARQRKIEKYSGLLDHFASLGATRVCIIPIVVGSLGAWDPENDAFLKLVATKSYLNTLRKLCVSDCIRWSRDIYVQHLTGTQQYSTGAPVIHPNPVASEEVRRLEVTNTQDSTPNTASQPLADQNLSQGSEVCRDVEQLAISQPSQLALTPNNCESSQNAPPCVGETTNVDL

SEQ ID NO: 25561 - protein, 1841 aa, Trichonephila clavata
MFLAAHCLYYVLGSRMRLVCSCETPGPLSLRSVLSHPFSVIPSVPEYNCHYSDSSNFKRVSVFNTQLTIMSELQQTSPSPVALRTRTVVAGLHEATAKRRCALCSFSTKQLSELRVHTAQHPASARRKQALYCIDSEMAKGYMDPTLDQDSATESKEPANSLGRSQSTPVESNRLLEFPFAEPAHWTEAFSPLCHATNATPVFDGQCKRTEAAGVVESPVEAILPDRPLNATPTANTTFVEVGTCTPPLIRSPTKDAETQCDTDILQQLLGSQDYTELEVSPPQGPGAAPTEEHAALSEIGNLFETPMTGPPRVSPFSRPTYAAKIKHNLHRCSNCERGFYSRAALEAHMEEERVLDEVVQSIPQVSPKNSGSEEQQLITDTPVAKRPRRRRNALKNRRSQKREEKEVKAPGDTPRCSKCRITFLSHEAKSEHDKGFHFSSSTKNMGPSSKSQNESKECRWCTECGIYLPESITLAGHIARRHNVSRSVPSTRITHTKVVKIEKANITDASVTHGPSTVRVTKEKPTPGHNCRFCERSFSSSAGLANHLRWHKKDLPGQRTREFRAKPSKDIQRTRVFTQSGPSVSTALQATDPNAVSSPTHAEDNSDVTTCVQCGTRTRTRKGMTYHMLQVHGVPIHKRNDTEPTPVSPTTSYDPAEVVYQLSDDREVVPGVELVGNTIRYTFPIPRELACPKSKCSHTFRTTQWYTTNTSLKRHLTAMHKIPHNLVEFWCSICRLRIRDKPASHPCLRERGLMHEVTQDKGWPCTDCDFVATTKNGLLNHGKAHRRKELQGKVVQLKVPDGPRKRQLKRRKKLGPLVTGQPGDTPLAAPALEDQTSIEQGEEIGCARRERIDIKESLVLVSFEEPLDTLLDIEDLGDRKMHLEAIVGGVTQAVQDHFHLQRPVAQGASSARKGLDTQDPQKLQRAYRWNRRKCIRAITQPSGTRCTLPKEEVHSYFKEIWETTSTPAEAPLPEPPVRPAVVEGFSQAFVVSCLQSAENSSPGPDMISYRHWREVDPNCKILTKMFNACLKLSDIPNSWKKSSTVLIHKKGDTGRLENWRPIALSDTVYKLFTKCLAKRLSEWCGIHEILSPAQKGFTPFDGVLEHNFLVSQHIESARRLNSDKFLAWLDLSNAFGSVPRQVIVEALMRNGVDQDFITLVDNIYEDSTTQVLTEEGPTDPISLKSGVKQGCPLSGILFNLAIDRVLWSVQEDREHRAILAFADDLVLLANSAEELQDMIRTTEQELHNLCLLPNPGKCATLHLSGKAPVQTLPSRFTMNGIELPILSDGEMYKYLGKPVGFFVQQSFQTPNDALKILEKISCSHLSPWQKLDALKTFFYPTLSFAMRTAQLGKECWSEVDSAARKEIKGILSLPQNAALGYLHGNRKLGSCGVPSAAEDSDFYLIDSAFKLLTSKDEEVSIHALGQLTRTARHRLGRPPTDGDLGSFLSGSMEGRFAETTNQLSNTWTLARKASHRQEVTWSFVDGLPTISFGDETITTTKRRAVMKAFHERFQVDQSTQLLSHPSQGKVMDCVAMSTASSHFIPNGMFTRFADWRFVHKARLGLVPLNGYKHWTPRQQRLCRKCGKWDETLPHVVNHCPSYSAAWQLRHNAIVSRVKTAVAFKGTILHENQAMGPNKLRPDLVALVDGTTYIIDVTIPFENKRTAFYDARQRKIEKYSGLLDHFASLGATRVCIIPIVVGSLGAWDPENDAFLKLVATKSYLNTLRKLCVSDCIRWSRDIYVQHLTGTQQYSTGAPVIHPNPVASEEVRRLEITNTQDSTPNTASQPLAEQNLSQGSEVCRDVEQLATSQPSQLALTPNNCESSQNTPPCVGETTNVDL

SEQ ID NO: 25562 - protein, 1659 aa, Trichonephila clavata
MSELQQTSPSPVALRTRTVVAGLHEATAKRRCALCSFSTKQLSELRVHTAQHPASARRKQALYCIDSEMAKGYMDPTLDQDSATEAKEPANSLGRSESTPVESNRLLEFPFAEPAHWTEAFSPLCHVTNATPVFDGQCKRTEAAGVVESPVEAILPDKPLDATPTANTTFVEVGTCTPPLIRSPTQDAETQCDTDILQQLLGSQDYTELEVSPPQGPGAASTVEHAALSEIGNLFETPMTGPPRVSPFSRPTYAAKTKHNLHRCSNCERGFYSRAALETHMEEERVLDEVVQSIPQVSPKNSGSEEQLLITDTPAAKRPRRRRNALRNRRSQKREEKEVKAPGDTPRCSKCRITFLSHEAKSEHDKGFHFSSSTKNMGPSSKSQKESKECRWCTECGIYLPESITLAGHIARRHNVSRSVPSTRITHTKVVKIEKANITDASITHGPSTVRVTKDKPTPGHNCRFCERSFSSSAGLAKHLRWHKKDLPGQRTREFRAKPSKDIQRTRVFTQSGPSVSTALQATDPNAVSSPTHAEDNSDVTTCVQCGTRTRTRKGMTYHMLQVHGVPIHKRNDTEPTPVSPTTSYDPAEVVYQLSDDREVVPGVELVGNTIRYTFPIPRELACPKSKCSHTFRTTQWYTTNTSLKRHLTAMHKIPHNLVEFWCSICRLRIRDKPASHPCLRERGLMHEVTQDKGWPCTDCDFVATTKNGILNHGKAHRRKELQGKVVQLKVPDGPRKRQLKRRKKLGPLVTGQPGDTPLAAPALEDQTSIEQGGEIGCARRERIDIKESLVLVSFEEPLDTLLDIEDLGDRKMHLEAIVGGVTQAVQDHFHLQRPVAQGASSARKGLDTQDPQKLQRAYRWNRRKCIRAITQPSGTRCTLPKEEVHSYFKEIWETASTPAEAPLPEPPVRPAVVEGFSQAFVVSCLQSAENSSPGPDMISYRHWREVDPNCKILTKMFNACLKLSDIPTSWKKSSTVLIHKKGDTGRLENWRPIALSDTVYKLFTKCLAKRLSEWCGIHEILSPAQKGFTPFDGVLEHNFLVSQHIESARRLNSDKFLAWLDLSNAFGSVPRQVIVEALMRNGVDQDFITLVDNIYEDSTTQVLTEEGPTDPISLKSGVKQGCPLSGILFNLAIDRVLWSVQEDREHRAILAFADDLVLLANSAEELQDMIRTTEQELHNLCLQPNPGKCATLHLSGKAPVQTLPSRFTMNGIELPILSDGEMYKYLGKPVGFFVQQSFSTPNDALKILEKISCSHLSPWQKLDALKTFFYPTLSFAMRTAQLGKECWSEVDSAARKEIKGILSLPQNAALGYLHGNRKLGSCGVPSAAEDSDFYLIDSAFKLLTSKDEEVSIHALGQLTRTARHRLGRPPTDGDLGSFLSGSMEGRFAETTNQLSNTWTLARKASHRQEVTWSFVDGLPTISFGDETITTTKRRAVMKAFHERFQVDQSTQLLSHPSQGKVMDCVAMSTASSHFIPNGMFTRFADWRFVHKARLGLVPLNGYKHWTPRQQRLCRKCGKWDETLPHVVNHCPSYSAAWQLRHNAIVARVKTAVAFKGTILHENQAMGPNKLRPDLVALVDGTTYIIDVTIPFENKRTAFYDARQRKIEKYSGLLDHFASLGATRVCIIPIVVGSLGAWDPENDAFLKLVATKSYLNTLR

SEQ ID NO: 25563 - protein, 973 aa, Cyrtorhinus lividipennis
MMPEHTCGLCDRSFGLQRALTQHRRLAHPEEFVRIQAEAVDGPGCHKYWSIEEMTVMAWWELQLTGGCSTEKELSTRLIDVMPGRTYEMIRRQRRRPVYLDIREGLAMEHMTGSTVSEVTMDPPGTSVANLDPSNMGGAAALLHSIMEDLENCSSGNWADLEIFVPGAHSFVEGAGNISFLDSWRQAQFDQPVVDGNVPGRRPARIRPPDIQRLWARDWKAAIGDILCGGHGATVPAPDCPTLEYWRNKMEIPSVPWIDGVAIRHPQDGDMSGVWSPLTLEEINWHRPRKSAPGLDGVSVEAWKGVDARIQRVLFHTIMLEGRAPLWMTRGRTTLIPKTDAPTGPQDLRPITVPSVVLRHFHKIMAGQLGPVVKHCPDQRGLMHGVDGVGHSVVLLDTILQAAKVSLRELHVCMGDVSKAFDSVSHDAIQAILRARGWGAEIRTYIAWLYRESRTVLAGSMEVWCRSGVRQGDPLSSILFNVVMDHVLMSLPTRVGFLFRAWRWTLMAFADDVVLFSSSAAGMRGLMSAFVRALGKCGLQLNAAKSLYVPLVPRGGKLVVPVDEMSLGDVPVAQPDSTWRYLGIQFSVYGAVRPRLVELFSEVEKVLAAPLRPLQALEALRSYVMPAWLHRLVLTGLMRKTLGWLDMRICAALRRSLGLPGDIPNAFFYAPIADGGLGIMELQSTVPELRLVRLAAANLALFEVELPEMLPTALQRRHRRTHAWLSTADGEGLEGMRAEPASWRWLKEDDAGAPAWKTKAAIKTLCGGIPTRTRRLRGQTGDRQCRHGCPNDETANNVLQCCPVTRLQRCARHNAAVGLLAEYARRKGWSLWQETVIWIGTRNIRPDLLIRHEGIVYLVDMAVVTGGSCFPRDVPYERKLNKYGGIDVLNAVRELTGTQEVEVVPAIITWRGVWHPPSSRRLKRIFPPFLLAWLARRVLDGGGFLWAAFMRNTRWRALNLHPLAPSRAPAALA

SEQ ID NO: 25564 - protein, 998 aa, Cyrtorhinus lividipennis
MMPEHTCGLCDRSFGSRRALTQHRRLAHPEEFVRVQAEAVDGPGRHKYWSIEEMTVMAQWELQLTGGCSTEKELSTRLIDVMPGRTYEMIRRQRRRPVYLDIREGLAMEHMTGSTVSEVTVDPPGTSVTDLDPSNMGGAAALLQSIMEDLENCSSGNRDDLEIFVPGAHSFVEGAGDISFLDSWRQARFDQPVVDGNVPGRRPARIRPPDIQRLWARDRKAAIGDILRGGHGAAVPAPDRPTLEYWRNKMEIPSVPWIDGVAIRHPQDGDMSGVWSPLTLEEIHRHRPRKSAPGLDGISVEAWKGVDARIQRVLFHTIMLEGRAPLWMTRGRTTLIPKTDAPTGPQDLRPITVPSVVLRHFHKIMASRLGAVVKHCPDQRGLMHGVDGVGHSVVLLDTILQAAKVSLRELHVCMGDVSKAFDSVSHDAIQAILRARGWGAEIRTYIAWLYRESRTVLAGSMEVWCRSGVRQGDPLSSILFNVVMDHVLMSLPTRVGFLFRARRWTSMAFADDVVLFSSSAAGMRGLMSAFVRALGECGLQLNAAKSLYVPLVPRGGKLVVPVDEMSLGDVPVARPDSTWRYLGIQFSVYGAVRPRLVELFSDVEKVLAAPLRPLQALEALRSYVMPAWLHRLVLTGLMKKTLGWLDMRIRAALRRSLGLPGDIPNAFFYAPIADGGLGIMELQSTVPELRLVRLAAATLALFEVELPEMLPTALQRRHRRTQAWLSTADGEGLEGMRAEPASWRWLKEDDAGAPAWKTKAAIKTLCGGIPTRTRRLRGRTGDRRCRHGCPNDETANHVLQCCPVTRLQRCARHNAAVGLLAEYARRKGWSLWQETVIRIGTRNIRPDLLIRHEGIVYLVDVAVVTGGSRFPRDVPYERKLNKYGGIDVLNAVRELTGTQEVEVVPAIITWRGVWHPPSSRRLKRIFPPFLLAWLARRVLDGGGFVWAAFMRNTRWRALNEPSSACALSSPGSARVTANSRPSPFSSICFRYHHERLWF

SEQ ID NO: 25565 - protein, 1071 aa, Oedothorax gibbosus
MSVPGCGRLFRTNRGLGVHRRAAHPETYHLEGLAQLQPKKARWTDAEVARMAEEESRIIHDHPKASNINDQLAIIFPGRTKESIKCRRKNPNYKMAVEIQLGIRRREAEPVIIGATTSQPATIPERRSAVVTAQGQDSLPSPTRRRTDPAVYQDDSSPPSSHLKSRSRPKTMHQDPIGLSPNQDRHERLSPAPGDDDPDPPDDGFPPPESAQDETLIYNWADDYINELLSLQPGPHCPWEDKLDLALKICAIEPELAVRLTEEFIAGNTIADGEKKGTTGNPKKRRKPKVSNKNTLSRRKARRAEYAKMQKLYRKSRSSCYDSLFTKANFAEELQPDVMFEFWSHLLKDRVADGSPDMSALPAVGKVIEDPSSLTQLFYPDEVGPCKMAYSTAAGPDGVTSKSWNKVSARAKCKIYSVWLKTRQAPLSLIGSRTIFIAKKTDASSPADARPISIASIVLRHYHKILAKRLSLLLENVLDQDQLGFRPFDGIGKGLGRLDSLIKHSMEDLLPISISCIDLEKAFDSVLHPSIQISLKAIGVPEDFSEYIKYIYDNAFTSLYFKGVLSSPVRPSKGVRQGDPLSPLLFLVVFDNILRAVPKYEGFKLPEIEHPVNKIAYADDLVLVADSPLGLQNTFQKIQPVLEATGLKINTKKSITFQWLKDGKKKMIFDHRPFIRVRGQPLQALRITDQFKYLGIFFTPRGKTPAKTDLREKLMTLQGAPLKPQQKLFLLVHHLLPGFQHTLTFGKISCGFLKKLDIVIRSLVRNILKLPKDTPTAFFHASIKDGGLGVPSMRWNIPVLAHKRGNFNRMIYDGEVELRSTTQVATRWRRLLYNSCDGSGLREASAVPQCHRWLSDGTSLMSGRSFISAVQVRSNTLFSRARAARGRPEKQQAHQCSRGCPQPETLNHILQVCFATHKQRIKRHNNIVDYLHRGLLQRGFTVHTEPRFETPGILKPDLVVYSEEVVSVIDIQVVNDQYSLEVANKNKIQKYEEPLRPHLQGLRSKYSVIGLTINWRGILCRTSVEELLKRRMISKRDLKILAVKTLEGNARIHGCHQDMTSHVSGLKKGVG

SEQ ID NO: 25566 - protein, 1136 aa, Exoneura robusta
MLPATTLQGKQRQRMRWSNEVNRHLMFCYYQTTNLGTNTTGYRPQVHAAFINTYPELHFLTEQRLADQIRVIIKNNRIPQPELENIKKQVQQTIEQNNTQSEEENENRTADLNNTEQTNKKQQVLTNQTKETIERRQREVQTQREITHNSDIEEKFQLTYIEYKDTSTDVRPFIHRISSNPQIKTTIANMNTIIHNKINEDTDMQELQLLIYAGALTTIRIHTKQGKTSETTNTKKKNPKPAWQHRIQKKIEKLRKDIGQLTQYIQNKISNEKRKKLRNITKQEAIEQLDEKKQKLQALAKRLRRYKKSENRRKQNQIFNTNQKKFYQMTNNTEIKINNAPDIIDVEHFWSNIWTNPVQHNKQADWIQTETDKYKKIQQMHEVIISHHEVTQAIKATHNWKTPGNDKIANFWLKQFTSIHPQLAKLFNNYITHPHTIPYALTQGITYLKPKDAADTTNPAKYRPITCLPTIYKILTSVITQKLVAHTTQNKIIHEEQKGCCKGARGCKEQLIIDTEVTHQAKIKQRSLHYAYIDYQKAFDSVPHSWLIQILEIYKVDPKLIQFLDAVMKTWETTLKIQTNTSNITTQPIQIKRGIYQGDSLSAFWFCLALNPLSSMLNNTKYGYNITGIHPHKITHLLYMDDLKLLAATNHQLNQLIRITEIFSKDINMAFGTDKCKKNSIIKGKQTTQENYTLDDNTKYIEAMEKTDDYKYLGYRQKIGIENASTKEGLKQKYKQRLIKILKTELNARNKTKAINTYAIPVLTYSFGVVRWSDTELEALNTLTRSQCHKHRIHHIHSAVERFTLNRGEGGRGFIDIKNLHYRQIDNLRKYFIERAETSNIHKAITHMNTSATPLKYQDQTYNPLDHIITIETKKEKWKQKTLHGKHPHHLAQPYIDQEASNIWLRKGNIYSETEGFMIAIQDQTINTRYYSKHIIKDQNTTTDKCRLCKQQIETIDHITSGCTMLANTEYTKRHDNVAKIIHQQLAIQNKLIQQHVTTYKYTPQNVLENDEYKLYWNRSITTDRTTPYNKPDITLTHKKKKLTQLIEISIPNTTNIQKKTGEKIEKYIQLAEEIKDMWHQDKVEIIPIIISTTGVIPHNIHQYIRAIQLHPNTYIQLQKSVIIDTCSTTRKFLNA

SEQ ID NO: 25567 - protein, 904 aa, Acipenser ruthenus
MNLMILVNPVRQTSIRENLNGHKPGVKWPRACEKTAWDTVNTDLCVALERLSGTVEKKLDKFGDIIYAYGSERFGVEKRKEKVQTIPGKSRRQQEIERLVRERRQLRNQWRRAEQSQKEGLNLLQKVIKDKLATLRRAERLRKRYKKKERARANFYKDPFKFVKKLFTSEKNGTLKASKVELERYLEETHTDSKRQEPMSIPSDIPPINPPEYQMEDCAPKWKEIEQAVKKARASSSPGPNGVPYRVYKSASGVLRILWKLMKVAWEKQVVPRAWRRAGGVFIPKEKDSTSISQFRPISLLNVEGKIFFSIIAQRLSAYLLKNCFIDTSIQKAGIPGFPGCLEHINVIWQQIQSAKKERKELHVTFLDLANAYGSVPHELLWAAFDFFSVPMTITNLVKAYFGDLQFSFSTSEFSTTWQCLEVGIMAGCTISPLAFTMAMEVIIRASKWVVGGERLASGMRLPPIRAYMDDMTTMTTTVACTNRLLGKLTNNIEWARMQFKPTKSRSISIIKGKVVDKTFFINGEAIPTVSEKPVKSLGRWYDGDLKDTVRVGEVRQQAVEGLKSIDSCALPGKLKLWCFQFGLLPRLLWPLTVYEVSLTTVEKLEALISSYIRKWLGAAKKAVEDAKAALRIGDIMGQVQHGRGGLGFSSTPPTWHKAAPAQRRKLVVNEVQKQEERMRCIKAISQAKQGEWMRWESVEQRKIGWQDLWSMEQSRISFLIRSTYDVLPSPQNLNLWVGEDPSCPLCSSPATLRHILTGCKVALSQGRFTWRHDQVLRCLALALEDKRNKTNKLPPVPSKHYTQKTTFLRPGEQPPRKGVKTNPRPGQLEAARDWNMLADVGQRLIFPPEIATTNLRPDIVLWSGSARLVHLVELTVPWEDAVDEAYERKKLRYAQLATEAEQR

SEQ ID NO: 25568 - protein, 1355 aa, Myxobolus squamalis
MAPNGRNLRINPNKYLPPAYPPSILTDNLSSSRAIISKEKISRPLSPISSGGQFSNLEESLTLSDIVQDIAYLSNSVSSIQVSLCSLQKKLMDMSTEKFSELIQNSQIVSSKPAIQRVENTEKYYSPLLVSPLKAPKSSHSLLIKPKELVCDQNSSIFLPQDIPPKNYCHSSSRVSTQPIDQKSSLIHENNLGSPPILCEKEYKPNKPSEINNQAVIFDKDAIFVPIKFSAQEKIAHIPLPRKIFICPTCKTSMISFDILRRHFTNTHRSKCLILCSSCMDNTFNNLKDFATHYSCCSKTKNTTSYPTIATNHNTKKSPLPSPFVIPAIAKSPILSRNKLNLQDQVTSLPFDTQKESLKRSKKVTQDVNLTIETHVDYIPQSITPQITVSSPGISSRKKRTRAKKKKLDEVYSAPTVNTFTINHQKLVVVETDKISLISQLASLTSASINDFDTQYENFSKEFLTISSKRGANFRPNKQSTSQLPNPSLSYHMRKKKTKKSCNGSSFFNKFPVYNAPKKVNVLKIVTEHNPVKNSASNQLNSLARSSPSRAFELITGKANSAKCICSSESISSYFNNIWNSPSPTDFVPFDCEEKFPHLLSLFSTEEVASKVNLFNASTSTGPDGLSVNAFKWFISDESGLSNLTNFLNHLLITNSIPLLMKKSSTILIPKSASADHVIYRIFTGLIADRLIKIAPSFLHHSQRGFLKVDGCLENTAEIIEILMQSKRSERSKCAMLFVDFKKAFDQVDHTSMFKSVNTKLGPRFASLVIELYRNGVSSFDNYASNNLVNLRRGIRQGCPISPMLFNIAIDSLLNDLSALPGFTFQSASNNFNSSCLAFADDLTILAPSRSALLEMSHPLTNWCSLFRMKLNFEKCALLELNLPSSKEPFYFAGGNIRSLETDDFYKYLGIRISKSNVTTSQGILSLLAPHHALNLIKLFIIPKFMHMIRLSRGKKLILNNFDTKLRGLLRDAFDLPSTSNSPLFYSPTHRGGLGLIELSKDVDLVEALRIVKILNNKSSYLASLLDYRIRLSRRSLNGEINSSSPVADLLNSPCVNAPPLSTLGINSNISRLLKLGLKFITLSSGLISISFPSYFRNPFPDVPISLKLLRKFASCKAVEEWQANKYQGNSQRCFGAYAESNDFIRSGSLPPKLYKWALKARLDLLPTKPSLKYRKLFHGDVTCRLCGSAPETLAHILNGCVMSKSSGQLQRHNEILNIISSSLNPNPFSVKRINLVYPFGQSKLRPDLLILNNQGLYDILLDVVVSFDNTTFHNAAAKEKIDKYSSLCSSHLKETGRSLLVLPFVVGSLGSITPHCLRALDSLPIAKENHSNILKRVCGCAIRHSHSLFKGYRE

SEQ ID NO: 25569 - protein, 1254 aa, Oesophagostomum dentatum
MSEIGTSRKVSCLDATRPCVLRASQLSDVRSNDLASQRPSLGPLHNHPVGNPEKGPSAQRGRRAGARLWLACEKSKLEQEVRNFKVDGKIRWAALATAWEHSRTPDQPERTVAALKAAYAKLCKNLTGVARPNPVSDDSVTIDATSPRGSSAEVLEVLDSAGGHDCHTEASSSEVVSANREVADIHADISSTNDSMGECLLRRIENYLRVAKLNRHRVPIRRPRSEIPSDLLETGNNILSGMIRGIKEPISKGKRYLSELSDAVYAVARAIASTADSLSKSEDSDNPKLTLAEAIELRGSLVSSISIVTNELARRRAKRPGTRATKKYRELAEVDCLRGASDIHRHLRQLKDRLNTTQQRIKVLEESKRRMLARRLGASHVVRDHHDRTTVDMPITSIREYWEPIVGRGKSFRVGRELQSWADDLASSATPERSQVFTEENWRDLFRKVKPWKATGPDGIQGFWWKHLSSARRALIAWCERAMAKPRQMIPSWLCEGRVVLIPKELKGDQSIRGPGDFRPIACLNVSYKILTASMSTRILQSVGDRFPREQIALRKGVWGCTHAQILDQTVIRDAMRHKKELHMLWVDLTKAFDSLSHGSIRWAVKQWGVPSDVRRMLTVLMSLQSVRYYGWVNGRVRRSSRLQIRNGLMQGDTLSPLLFCLAIAPTSHWIRQNVKPYRTQTGSSVRSEGVLELGHILYMDDLKIYTPEREGLEVALDGIVGLFGQLGLELNARKCATRCLNSPGASQVQLDLIPSLGATELYRYLGAEQNTLVCIGDLLDRVEQAAKTVARRLFFSDLTVRQKVNGYNQVVIPKLKYAFSCVIFGAGRLGTLKKRANKFDVDIRKLMEDSKMRFRSSCAARVYVEREAGGLGMKSVEEELDRSIAYSWCYLASNTDLLTSYELAESLRASHKRSLTSDFLKVLAANGIEGQVRRTVMATIIVDGVTFFTPTEAARAISALIRARWSKTHLTAWRSKVVASRVLQEYGQNGEPTGLCVKDSFLWSARGWVGAVVLRNVWAVQEGSLLTRSSAAGRACVPHASGVCRMRCSPGALETAEHIVSSCSHWRTNIMVDRHDDLARVLYASLRKKYNIKAVPNTHVPHCWDEKHVAIHWNDAIWTSEGLAHNRPDILVWDKVSNRIWIIEISVSWFTRVQTQERRKLGKYGVNSTLPEETPVSGFFPGPNLRACLQKDRKCRVDVIPIVVGTCGEVSPNLKDYLRALELPDPEEGLIERLQRAAVQGTNRLVKCHLANS

SEQ ID NO: 25570 - protein, 1113 aa, Ancylostoma duodenale
MVTEASVPYPSSSVAPEAPVVRRNPSILVESSSSDVSGGDHEIPNEASAATLRTFELKQLVLKRFEKFHKIAIASHDRVPIRRPRDKIPAELLQIGNDILASKVSERFSNGMEYLSKLNAAVYGIARAIAATAEGLSKDPDAPDPKRALKEAQEFRGTLLSHITSLTNELQRRKAWKRGERNRPSRKYLEIAEAQDLSSQSKVRRYLRQLKDRLETTKDQIRNLEGSLRRQSVRRKGFSVVVRERADRPSDVPVTSVREYWAPIVGKEKAFQVSRELKDWSDDLGTSDTPSRSQELSEEQWRSLFGKVKPWKATGPDGIQGFWWKHLPAARSRLVAWCRAALSKPRRMVPAWLCQGRVVLIPKVLKGDQSTRGPGDFRPIACLNTCYKILTASMSTHVLRTIGDRFPREQIALRKGVWSCTHAQALDQTIVKDALRHKKELHMLWVDLTKAFDSLSHGAIRWTIKQWGVPSDLRRLLSVIMSMQSVRYFGYSNGKLVKSPRLKIRNGLMQGDTLSPLLFCLAIAPVSHWIRSHVRPYESRTGAGNRSDGTLTLGHILYMDDLKIFTPDSGDMALAEGGIRRVFGQLGLELNARKCATRSLNCATANVAQLDEIPALGASEFYKYLGAEQNSLVCVGELWDRVESVAKATARRLFSSDLTVRQMVNGYNQVVIPKLKYAISCVIFGAGKLSTLKKRALRFDVDIRKVMEESHLRFGSSCTARLYVDKELGGLGMKSVVEELEKSITYSWCYLATNTDLLVPYELAESLRASGKRSITSDFEKVLATNELVGRVKRNILATITVDSRTFFNATEAARAITALIRARWSKVHLTAWKSKEVASRVIQERGRNGEQTPGLCLKDSFLWSVRGWVSAEVLRNVWAVQEGSLLTRNSAAGRACMPQARGLCRMHCSPNALETAEHIVSACSHWRTNIMVERHDDVARVLYSAIRRKYNVKATVNTHEPHVVDLRHVVIHWNDSIWTSEGLAHNRPDLLVWDKVAKRIWIVEISVSWFTRVPSQEQRKLGKYGVNSTLPEETAAGDFYPGPNLKSVLQRDRKCRVDVIPIVVGACGEVTPNLRRYINDLELPDSTDVLIERIERAAVLGTNRLVKCHLAN

SEQ ID NO: 25571 - protein, 1068 aa, Ancylostoma duodenale
MTTPGTLELGERVFARFEKFYGIACASRKRVPIRRPRREIPAELLEIGNGIIAGFMPERLSNGKQYLSRLNATVYAVARAIASVADEMAPDPDAAGRKCTLREALELRSTLLSFISTLSAEVSRRQELKRGLAGRKRPCRKYIELAEVYDNLGSTTSLRRFLRLLKDRLSTTQEQIRNLEESKRRQNVRRRGFSVTVRERADRSEQVPVTSVREYWRPIVGESKPFVVSRELKQWSDHLGTSNTPERAQELSDEEWRSLFSKVKPWKATGPDGIQGFWWKHLTAARSRLVMWCRNALLKPRKMVPTWLCQGRVVLIPKELKRGQSTRGPGDYRPIACLNTCYKILTASMSAQVLRTIGDRFPQEQIALRKGVWGCTHAQILDQTVVKDALRHKKELHMLWVDLTKAFDSLSHGAIRWTIKQWGVPSDLRRLLSTIMSMQSVRYYGFKNGKVVTSSRLQIRNGLMQGDTLSPLLFCLAIAPVSHWIRSHIRPYETRTGAGNRSDGTLTLGHILYMDDLKIFTPDSGDMALAEGGIRRVFGQLGLELNARKCATRSLNCTSACSVQLDEIPILGASEFYKYLGAEQNSLVCVGELFDRIEAGAKAVARRLFFSDLTVRQKINGYNQVVIPKLKYAISCVIFGAGKLSTLKKRASRFDVDIRKLMEESQLRFGSSCTARLYVDKELGGLGMKSVVEELEKSITYSWCYLSTNTDLLVSYELAESLRRSSKRSLTSDFLKVLASNGLEERVKRNILATISVDSQTFFNATEAARAITKLIRARWAKVHLTAWKSKEVAGRVLKERGRSGEGAIGLCLKDSFLWSARGWVSSVVLRNVWAVQEGSLLTRCSAAGRACMPQARGLCRMQCSPNAMETAEHIVSACSHWRTNIMVERHDDVARVLYSAIRRKYDVKAEVNTHKPHVIDLRHVVIHWNDSIWTSVGLAHNRPDLLVWDKVAKRIWIVEISVSWFTRVQAQEERKIGKYGINSTLPEDTAVGSFYPGPNLKSVLQKDRKCRVDVIPIVVGACGEVTPNLRRYINALELPDSTDVLIERIERAAVMGTNRLVKCHLSN

SEQ ID NO: 25572 - protein, 1269 aa, Ancylostoma caninum
MVLVWKQPCTKAPLYGSTKGTANHEMLVQSVCSNASCLDATRPSVLSDSSHAPDRSRSGRSTSQRPPLGPPFSPRVVDPRNEPSAQRARRGGNIRLWSTCELQKLKLEVERHREATDGRIRWAPLAEAWERTRNPDEARRTVAALRAAYAKLCKKATLATEASVPYPSSSVAVEAPVVRRNPSILVESSSSEVSGGDREIPETSAATLRTLELKELLLERFEKFHRIAIASHDRVPIRRPKGKIPAELLQIGNDILASKVSERFSNGMEYLSKLNAAVYGIARAIAATAEGLSKDPDAPDPKRALKEAQEIRGTLLSYITSLTNEVQRRQAWKRGERNRPSRKYLEIAEAHDLCSLSKVRRYLRQLKDRLEATKDQIRNLEGSLRRQSVRRKGFSVVVRERADRPSDVPVTSVREYWAPIVGKEKAFQVSRELKDWSDDLGTSDTPSRSQELSEEQWRSLFGKVKPWKATGPDGIQGFWWKHLPAARTRLVAWCRAALSKPRRMVPAWLCQGRVVLIPKVLKGDQSTRGPGDFRPIACLNTCYKILTSSMSTHVLRTIGDRFPREQVALRKGVWSCTHAQALDQTIVKDALRHKKELHMLWVDLTKAFDSLSHGAIRWTIKQWGVPSDLRRLLSVIMSMQSVRYYGYSNGKLVTSPRLKIRNGLMQGDTLSPLLFCLAIAPISHWIRSHVRPYETRTGAGNRSDGTLTLGHILYMDDLKIFTPDSGDMALAEGGIRRVFGQLGLELNARKCATRSLNCATANVAQLDEIPTLGASEFYKYLGAEQNSLVCVGELWDRVEGVAKATARRLFSSDLTVRQMVNGYNQVVVPKLKYAISCVIFGAGKLSTLKKRALRFDVDIRKVMEESHLRFGSSCTARLYVDKELGGLGMKSVVEELEKSITYSWCYLSTNTDLLVPYELAESLRASGKRSLTSDFQKVLATNGLEGRVKRNILATITVDSRTFFNATEAARAITALIRARWSNVHLTAWKSKEVASRVIQERGRNGEQTPGLCLKDSFLWSVRGWVSAEVLRNVWAVQEGSLLTRSSAAGRACMPQARGLCRMHCSPNALETAEHIVSACSHWRTNIMVERHDDVARVLYSAIRRKYNVKATVNTHEPHVVDLRHVVIHWNDSIWTSEGLAHNRPDLLVWDKVAKRIWIVEISVSWFTRVLSQEQRKLGKYGVNSTLPEETAAGDFYPGPNLKSALQKDRKCRVDVIPIVLGTCGEVSPNLRHYIQALELPDNTDVLIERIERAAVLGTNRLVKCHLAN

SEQ ID NO: 25573 - protein, 1260 aa, Ancylostoma caninum
MIMLNKDNETYARNPAAITGSQARYPAVTGKSSSSPSSSTPSGVPLLGCSPTSPRSTCGPPYNSLTDDATNEPSALRTRRGGKRLWRASELQRLELEVERYKVGDRIRWAPLAEAWERTRDPADAQRTVAALRAAYAKLCRKKRVCLSDAEPSALHPMPLVREDPTERLEPCQEDPSSPEVCGGDVTLPDAGLTTPGTFELGERVFARFEKFYGIACASRKRVPIRRPRREIPAELLEIGNGIIAGFMPERLSNGKQYLSRLNATVYAVARAIASVADEMAPDPDAAGRKCTLREALELRSTLLSFISTLSAEVSRRQELKRGLAGRKRPCRKYIELAEVYDNLGSTASLRRFLRLLKDRLTTTQEQIRNLEESKRRQSVRRRGFSVTVRERADRSEQVPVTSVREYWRPIVGESRPFVVSRELKQWSDDLGTSNTPERAQELSDEEWRSLFSKVKPWKATGPDGIQGFWWKHLSAARSRLVMWCRNALLKPRKMVPTWLCQGRVVLIPKELKKGQSTRGPGDYRPIACLNTCYKILTASMSAQVLRTVGDRFPQEQIALRKGVWGCTHAQILDQTVVKDALRHKKELHMLWVDLTKAFDSLSHGAIRWTIKQWGVPSDLRRLLSTIMSMQSVRYYGFKNGKVVTSSRLQIRNGLMQGDTLSPLLFCLAIAPVSHWIRSHIRPYESRTGSGNRSDGTLTLGHILYMDDLKIYTPDSGDMALAEGGIRRVFGQLGLELNARKCATRSLNCTSACPVQLDEIPILGASEFYKYLGAEQNSLVCVGELFDRIEAGAKAVARRLFFSDLTVRQKINGYNQVVIPKLKYAISCVIFGAGKLSTLKKRACRFDVDIRKLMEESQLRFGSSCTARLYVDKELGGLGMKSVVEELEKSITYSWCYLSTNTDLLVSYELAESLRRSSKRSLTSDFLKVLASNGLEERVKRSILATISVDSQTFFNATEAARAITKLIRARWAEAHLTAWKSKEVAGRVLKERGRTGEEAIGLCLKDSFLWSARGWVSSVVLRNVWAVQEGSLLTRCSAAGRACMPQARGLCRMQCSPNAMETAEHIVSACSHWRTNIMVERHDDVARVLYSAIRRKYDVKAEVNTHKPHVIDLRHVIIHWNDSIWTSEGLAHNRPDLLVWDRVAKRIWIIEISVSWFTRVQAQEERKIGKYGINSTLPEDTAVGSFYPGPNLKSVLQKDRKCRVDVIPIVVGACGEVTPNLRRYINALELPDSTDVLIERIERAAVMGTNRLVKCHLSN

SEQ ID NO: 25574 - protein, 1210 aa, Wasmannia auropunctata
MRMRKASDGEGHGPTPSTNSQGTTNGDLARNMDFEIRVPFERRSCHECLRSGSGNFMALILNDEIGHAAERHADMRVVFVCGKCGKRYINKHPALCHVPKCTAPAPPRVEAPITGEVHTCGVCGEVFRTRIGLSQHERHQHPEVRNAARAGGTAKDKKAPPRRYKVFSEEEENRMLELEVRYKGVKNIATRMVDHLPGKTAKQIRDKRATLVYKRRLAEILAVEHGEEEEAEEEEEEEKRDVPEEGGDLPIPPGVPPHPEAEEEKEEEIDVPVEVDELPVPPGVPPHLDAAEIRTDTDTAVSEPPDSLPVSAWREGIARMVLNTETTIAIPPGAAACVRLLKGVLAKIIENSGDLPSEETLEMVDEEVFNALKTQNEVRSAKSKRSKRKNRSREEFIYARTQELYRENPGLLVKHAREGTSWAEEPKADLKTGEIKDLYNSLWGTKPHIELPEFGEAEPETALDIVLTPISAKEVKARLARTKANVAPGPDGLIKRDVCRPADVEILRLWYNIIMVRARQPAAWRVNRTTLLPKDGQDKTKITNYRPITISSILSRLYWGIVDQKLRSVITMTPRQKGFTSEAGCFNNVHILSELLRHAKISEGLVVAQLDVSKAFDTVPHEAIGAALRKKGLPEFVVRLVVDSYEDVRTVIRNKEDCIEIKLQRGVKQGDPLSPSIFNLVMEPMLKALESQPGYQIGNEAGVSVLAFADDIILTAKTAPQASDLLGYAEEYLKGLGMKISAAKCAAFRINITKDSWYLADPRLTLLSGESIPYADAGTSLKYLGIKISPWAGIDIKGLRENLCSAIKRIRKLALKPYQKVNLISTYLVPHYLYQLVLAVPPVTYLRQLDQELRVVIKDIYHLSQSTTNGLMYCGKRDGGLGFPKLETLVVSSSLRAGLKFSESSDPVMRALAEETGMVNRLKSLSASARINWPLSLEGIRRYKIAAKKTELASWAALVSQGKSVKSLTDDKFGNAWLYKPTLLKPGRFTTALRMRTNTTANRVAMNRAGPVADIKCRKCKSLPETLGHILGQCTVMKEHTIRRHNEILDTVINRVVSRDKEAAVTRETTYRTSCGNLKPDLVIQSRKGVQVVDVTVRHEDNDYLAQGHKDKINKYSRLLPLLRRDLGASAAEVLPIVVGTRGAMPKETVRNLAKLDITDRKTLVTISLIALRNSIEQYHMFMDYDAPRTPVEIPSSAGENFRSNSLSAN

SEQ ID NO: 25575 - protein, 1159 aa, Trachymyrmex cornetzi
MTNRQAKRLMRLWSHLKRRNCQVCIVKGRGTFMALRLKDEIEHIAERHGDLEVYYVCQKCGKKYEAKHPALCHVPKCTAPKPPPVDGVTCTLCRKIFPTKSGLSQHERHEHPMARNVARAGNMIRGEQAPRKLRVFTEEEENRMLELEIRFREERNVANAMLPFMPGKTGKQIRDKRATLSYKRRRDEILARTEDEPAAEESEAGEPPEVVEIIDVPEEVCELPTPPGDPPHLGEAEKTGTSTDTAVPEVEEASDSLSEAGWREGMAKKVLEAEPPNAIPPEAAACVRLLRGALAEIANGRGALPTTEQMETADNAVKNLLECKSRTAKTSRKKKRGTKNKKQYRYARAQELYRKNPGLLAKYAREGIDWTEEPAVDLRTEDIENLYNSLWGAKPRIIPPEFGEAEPRLQLEEVLTPISMKEVKNRVTRTKANVAPGPDGLSKQDVSRLADMEVLRLWFNLIMIRSYQPVAWRTNRTTLLPKDGQDKSKATNYRPITISSILSRLYWGIVDQKLRGSVTMTPRQKGFTSEAGCFNNVHILNELIKDAKTTEGLVVVQLDVSKAFDTIPHEAIGAALRKKGLPELMVRLVVDSYKDVHTKITNKQDIINIELQRGVKQGDPLSPLLFNLVMEPMLRALESQPGYLIRDEVGVSVLAFADDLILTAKTVPQAKNLLRWAETYLRGLGMSISATKCSTFRVVMTKDSWHLADPELTLTSGESIPYADAGTTLKYLGMKVSPWAGIDIKGLGGNLCTVLKRVKRLALKPYQKVNLISTYLIPHYLYQLVLATPPVTTLRQLDQELRVVIKDIYHLPQSVANGLIYCGKRDGGLGFPKLETLVVSSSLRAGLKFAQSNDRVMRALAESTGMVKRLRSLATSARINWPVDIDGIKAYKNTARKQELASWAALVSQGKSVKSLTDDKIGNAWLYNPMLLKPGRFITALKMRTNTTANRVALSRAGPVADVRCRKCRIQPETLAHILGQCTIMKEHTIRRHNEILNLIVDKVTNRDKEAAVTRETSYRMPSGGNLKPDLVIQSRKGVQVVDVTVRHEDNDYLAQGHKDKIQKYSRLLPHLQRDLGASAAEVLPIVVGTRGAMPKETVRNLKKLKITDRKTLITIAMIALRNSIEQYHIFMDYDAPRSSVETPSFAEQNLPIHSLSAS

SEQ ID NO: 25576 - protein, 1003 aa, Ooceraea biroi
MVIHLPGKTAKQIRDKRGTAAYKRKMEVALAPFRTPDQSEDEHSEEDEAEADEEEKGIDAPEEIDELPVTPGDPPHQTADETGAEREAQTREEASATLQEAAWREEVARSVLRDMAPAATSAEAAACVQLLRGVLANIIEQQGQLPSEEEMRKVDDQVVEYFAENSVAAKRKTIAGKRKRRRKGRIQQYRYARTQELYRENPGLLAKHIREGIDCTEQKRTKLETVDIKDLYSSLWETKARINLPKFDERDPERGLQDVLTPIVSGEIDKRISRTKANVAAGPDGLVKRDISSRTAREILRLWYNIIEVRGYQPSVWRINRTTLLPKDGQDHTLVKNYRPITIGSLLARLYWGIVDQKLRRSVTMNPRQKGFTSEAGCFNNVHILSELLRHSKVTGGLVAVQLDVSKAFDTIPHDIIGEALRRKGLPEFVVRLVVDSYRDVHTVIKNGEEEVAIKIQRGVKQGDPLSPLIFNLVMEPMLIALESQPGYSIGREHNTSVLAFADDIILTARTAPHAKHLLGVAETYLKGLGMSISAAKCATFRIVGTKDSWYLADPGLTLKSGESIPYADADTAIKYLGVKISPWAGIDIRSLKPDLCTALQRVKKLALKPHQKVNLISTYLVPHYLYQLVLALPPVTLLRQLDQELRVVVRDIYHLSQSTADGFIYCGKRDGGLGFPKLEALVVCSSLRTGLKFIGSTDPTMRALADDAGMVNRLKSLAKSARINWPVTEQNIRQHKARAKEKELASWSALVSQGKSVKSHTDDKFGNAWLYNPQLLKPCRFITALKMRTNTTANRTTLHRAGLVADVKCRKCETQPETLAHILGQCTYMKQHTIRRHDEIKDLIIETITKRDKEVAVTREPTFKMASGGNLKPDLVIQSQKGIRVVDVTVRHEDNDYLAQGHRDKMQKYSRLLPHLRHELGAVSAEVLPIVVGTRGAMPKETVRNLAKLNITDRKTLVTISMIALRNSIEQYHMFMDYDAPRKPTRAPSLSDKTSDPISLLA

SEQ ID NO: 25577 - protein, 1194 aa, Ooceraea biroi
MIAVKTRSQASDGEGAGSVPSTSRQGASKEDQAGQEDDDFEILVPFVRRSCQKCLRSKKGNYMALSLKDEIRHVAERHANAEVTFKCATCDKRYSREHPALCHIPKCPGPKRAGNDDNHKCRECGKAYKTKSGLSQHERHAHPATRNKERAGGLAGAEPKARQGKVFSEQEERKMLELEVELRKEKFIATKMVIHLPGKTAKQIRDKRGTAAYKKKMEVALAPFRTPDQSEDEHSEEDEAEADEEEKGIDAPEEIDELPVTPGDPPHQTADETGAEREAQTREEASATLQEAAWREEVARSVLRDMAPAATSAEAAACVQLLRGVLANIIEQQGQLPSEEEMRKVDDQVVEYFAENSVAAKRKTIAGKRKRRRKGRIQQYRYARTQELYRENPGLLAKHIREGIDCTEQKRTKLETVDIKDLYSSLWETKARINLPKFDERDPERGLQDVLTPIVSGEIDKRISRTKANVAAGPDGLVKRDISSRTAREILRLWYNIIEVRGYQPSVWRINRTTLLPKDGQDHTLVKNYRPITIGSLLARLYWGIVDQKLRRSVTMNPRQKGFTSEAGCFNNVHILSELLRHSKVTGGLVAVQLDVSKAFDTIPHDIIGEALRRKGLPEFVVRLVVDSYRDVHTVIKNGEEEVAIKIQRGVKQGDPLSPLIFNLVMEPMLIALESQPGYSIGREHNTSVLAFADDIILTARTAPHAKHLLGVAETYLKGLGMSISAAKCATFRIVGTKDSWYLADPGLTLKSGESIPYADADTAIKYLGVKISPWAGIDIRSLKPDLCTALQRVKKLALKPHQKVNLISTYLVPHYLYQLVLALPPVTLLRQLDQELRVVVRDIYHLSQSTADGFIYCGKRDGGLGFPKLEALVVCSSLRTGLKFIGSTDPTMRALADDAGMVNRLKSLAKSARINWPVTEQNIRQHKARAKEKELASWSALVSQGKSVKSHTDDKFGNAWLYNPQLLKPCRFITALKMRTNTTANRTTLHRAGLVADVKCRKCETQPETLAHILGQCTYMKQHTIRRHDEIKDLIIETITERDKEVAVTREPTFKMASGGNLKPDLVIQSQKGIRVVDVTVRHEDNDYLAQGHRDKMQKYSRLLPHLRHELGAVSAEVLPIVVGTRGAMPKETVRNLAKLNITDRKTLVTISMIALRNSIEQYHMFMDYDAPRKPTRAPSLSDKTSDPISLLA

SEQ ID NO: 25578 - protein, 1100 aa, Ooceraea biroi
MIAVKTRSQASDGEGAGSVPSTSRQGASKEDQAGQEDDDFEILVPFVRRSCQKCLRSKKGNYMALSLKDEIRHVAERHANAEVTFKCATCDKRFSREHPALCHIPKCPGPKRAGNDDNHKCRECGKAYKTKSGLSQHERHAHPATRNKERAGGLAGAEPKARQGKVFSEQEERKMLELEVELRKEKFIATKMVIHLPGKTAKQIRDKRGTAAYKRKMEVALAPFRTPDQSEDEHSEEDEAEADEEEKGIDAPEEIDELPVTPGDPPHQTADETGAEREAQTREEASATLQEAAWREEVARSVLRDMAPAATSAEAAACVQLLRGVLANIIEQQGQLPNEEEMRKVDDQVVEYFAENSVAAKRKTIAGKRKRRRKGRIQQYRYARTQELYRENPGLLAKHIREGIDCTEQKRTKLETVDIKDLYSSLWETKARINLPKFDERDPERGLQDVLTPIVSGEIDKRISRTKANVAAGPDGLVKRDISSRTAREILRLWYNIIEVRGYQPSVWRITRTTLLPKDGQDHTLVKNYRPITIGSLLARLYWGIVDQKLRRSVTMNPRQKGFTSEAGCFNNVHILSELLRHSKVTRGLVAVQLDVSKAFDTIPHDIIGEALRRKGLPEFVVRLVVDSYRDGHTVIKNGEEEVAIKIQRGVKQGDPLSPLIFNLVMEPMLIALESQPGYSIGREHNTSVLAFADDIILTARTAPHAKHLLGVAETYLKGLGISISAAKCATFRIVGTKDSWYLADPGLTLKSGESIPYADADTAIKYLGVKISPWAGIDIRSLKPDLCTALQRVKKLALKPHQKVNLISTYLVPHYLYQLVLALPPVTLLRQLDQELRVVVRDIYHLSQSTADGFIYCGKRDGGLGFPKLEALVVCSSLRTGLKFIGSTDPTMRALADDAGMVNRLKSLAKSARINWPVTEQNIRQHKARAKEKELASWSALVSQGKSVKSHTDDKFGNAWLYNPQLLKPCRFITALKMRTNTTANRTTLHRDGLVADVKCRKCKTQPETLAHILGQCTYMKQHTIRRHDEIKDLIIETITKRDKEVAVTREPTFKMASGGNLKPDLVIQSQKGIRVVDVTVRHEDNDYLAQGHKDKIQK

SEQ ID NO: 25579 - protein, 1132 aa, Ooceraea biroi
MALSLKDEIRHVAERHANAEVTFKCATCDKRFSREHPALCHIPKCPGPKRAGNDDNHKCRECGKAYKTKSELSQHERHAHPATRNKERAGGLAGAEPKARQGKVFSEQEERKMLELEVELRKGKFIATKMVIHLPGKTAKQIRDKRGTAAYKRKIEVALAPFRTPDQSEDEHSEEDEAEADEEEEGKDAPEEIDELPVTPGDPPHQTADETGAEREAQTREEASATLQEAAWREEVARSVLRDMAPAATSAEAAACVQLLRGILANIIEQQGQLPSEEEMRKVDDQVVEYFAENSVAAKRKTIAGKRKRRRKGRIQQYKYARTQELYRENPGLLAKHIREGIDCTEQKRTKLETVDIKDLYSSLWETKAHINLPKFEERDPERGLQDVLTPIVSGEIDKRISRTKTNVAAGPDGLVKRDISSRTAREILRLWYNIIEVRGYQPSVWRINRTTLLPKDGQDHTLVKNYRPITIGSLLARLYWGIVDQKLRRSVTMNPRQKGFTSEAGCFNNVHILSELLRHSKVTGGLVAVQLDVSKAFDTIPHDIIGEALRRKGLPELVVRLVVDSYRDVHTVIKNGEEEVAIKIQRGVKQGDPLSPLIFNLVMEPMLIALEGQPGYSIGREHNTSVLAFADDIILTARTAPHAKHLLGVAETYLKGLGMSISAAKCATFRIVGTKDSWYLADPGLTLKSGESIPYADADTAIKYLGVKISPWAGIDKRSLKPDLCTALQRVKKLALKPHQKVNLISTYLVPHYLYQLVLALPPVTLLRQLDQELRVVVRDIYHLSQSTADGFIYCGKRDGGLVFPKLEALVVCSSLRTGLKFIGSTDPTMRALADDAGMVNRLKSLAKSARINWPVTEQNIRQHKARAKEKELASWSALVSQGKSVKFHTDDKFGNAWLYNPQLLKPCRFITALKMRTNTTANRTTLHRAGLVADVKCRKCKTQPETLAHILGQCTYMKQHTIRRHDEIKDLIIETITKRDKEVAVTREPTFKMASGGNLKPDLVIQNQKGIRVVDVTVRHEDNDYLAQGHKDKIQKYSRLLPHLRHELGAVSAEVLPIVVGTRGAMPKETVRNLAKLNITDRKTLVTISMIALRNSIEQYHMFMDYDAPRKPTRAPSLSDKTSDPISLLA

SEQ ID NO: 25580 - protein, 1200 aa, Vollenhovia emeryi
MTDTNRNKASEAGDLVPASGEIDSAACVAKTRRGGNGARTKRVLRTPLQERWDPPIQEEAPDEASDGEDAGPAPSTSRQGTIADKPAKSKEYEIILPFIRRSCRKCVESGKGNFRALILKDEIEHAAERHKNEVVVFQCEKCGKKYDRKHPALCHIPKCTAPRPPPIDGHTCLKCGRVFVTKIGLSQHERHEHPDVRNAARAGGTARKEPAPRRLKVFTEEEENLMLELEVRFKGESRVASLMTEHLPGKTSKQIRDKRATTSYKRKLEARLATLQEEEQEEEEVEEEADEVQGNDAPEERDELPIPPGDPPHQQEERPHEMDDAEPPLVGRASDSLTDREWREGIAKKVLEAEPPNAIPPEAAACVQLLKGVLANIANGEAIDAEVYREVDSKVQEHFTKGDEAGKKIRRNKKKTGNRKRFRYARTQELYRENPGLLTKYVREKIDWTENQETNLETVDIKNLYNSLWGSKPNIETPNFGDPEPERILDDILSPITGKEVRDRVARTKANVAAGPDGVAKKDVTPQYKMEILRLWFNLIMVREYQPEAWRYNRTSLLPKDGQDKTKVANYRPITISSILSRLFWGIIDQKLRKETTMTPRQKGFTTEAGCFNNVHILSELLRHSKTTEGLVAAQLDVSKAFDTIPHEAIGAALRKKGLPELVVRLVADSYKDVYTTIKNKEERIEIKIQRGVKQGDPLSPLLFNLVMEPMLKALESQPGYTINNDTSVSALAFADDIILTARNVPQASNLLRSAETYLRGLGMKVSAEKCSTFMIKPTKDSWYLADPGLTLLSGDGIPYADAGTTIKYLGVRISPWAGIDIKGLKDNLCSALQRIKKLALKPPQKVQIISTYLVPHYLYQLVLAAPPVTYLRQLDQELRVVIKEIYHLPQSTANGLLYCGKRDGGLGFPKLETLVVGSSLRAGLKFMESEDSVMRALAEAAGMVNRLKSLAASARINWPTNIDAIKRYKAKMRKQELAAWAALVSQGKSVESLTDDKFGNAWLYKPSLLKPCRFITALKMRTNTTANRVNLNRAGPVADVRCRKCKSKPETLAHILGQCTIMKEHTIRRHDEIVNLLVDKVTSRDKEVAVTRETTYRLPSGGNLKPDLVIQSRKGVLVVDVTVRHEDNDYLAQGHKDKVTKYSRLLPHLQRDLGARAAEVLPIVVGTRGAMPKETVKNLVKIRNLRPQDAHHNIVDSAT

SEQ ID NO: 25581 - protein, 1001 aa, Vollenhovia emeryi
MLELEVRFKGENRVASLMTEHLPGKTSKQIRDKRATASYKQRLEAKLATLQEEEQRSEEEEDEADGEQENDAPEEADELPIPPGDPPHQQEERPHEMGDAEPPLVGRASDSLTDREWREGIAKKVLEAEPPNAMPPEVAACVQLLKRVLAKVAEGEMPDRNELGECDDRILELFTTGNKAVSKRQRSRRKTGNQKKFRYARTQELYRENPGLLAKYVRENIDWTKNSDTHLETVDIKSLYNSLWGSKPNIAAPDFGDPDPPRELEEILSPISGRDIRVRIARTKANVAAGPDGVTKRDVTHPAQREILRLWFNLIVVRGYQPTAWRYNRTTLLPKDGQDKSKVTNYRPITISSVLARLFWGIIDQKLRNGVTMTARQKGFTSEAGCFNNVHILSELLRHSKTTEGLVAMQLDVSKAFDTIPHEAIGAALRKKGLPEFVVRLVADSYRDVYTTIKNKEEKIEIKIQRGVKQGDPLSPLLFNLVMEPMLEALESQPGYQIKDDANVSVLAFADDIILTAIDVPQASSLLRSAETYLRGLGMSISANKCATFRIKPTKDSWYLTDPGLTLNSGEGIPYADAGTTIKYLGVRISPWAGIDIKGLKDNLCTALERMKKLALKPPQKVQIISTYLVPHYLYQLALAGPPVTYLRQLDQELRVVIKDIYHLPQSTANGLIYCGKRDGGLGFPKLETIVVGSSLRAGLKFTESEDPVMRALAEVGGMVNRLRSLAASARINWPISLEAIKRYKTTIRKQELAAWAALVSQGKSVKSLTDDKFGNAWLYQPSLLKPCRFITALKMSTNTTANRVNLNRAGPVADVRCRKCKSKPETLAHILGQCTVMKEHTIRRHDEIVSLLVDKVTSRDKEVAVTRETTYRLPSGGNLKPDLVIQSRKGVLVVDVTVRHEDNDYLAQGHKDKIQKYSRLLPHLQRDLGASAAEVLPIVVGTRGAMPKETVRNLSKLKITDRKTLITISLIALRNSIEQYHMFMDYDAPRVPAEAPSSVG

SEQ ID NO: 25582 - protein, 1007 aa, Cyphomyrmex costatus
MLDMEVQYRGERNVAQLMAASLPGKTCKQIRDKRATLTYKKRRDAILAPREELEDVPEEDRELPTPPGDPPHPEVEEIASSVDVSVRILDQQSGTCADASTLRTEASDPTPETGWMGGMASKILEIELPDDIPAEAAACVRLLRETLAYIESNMGNLPPRQKLEETDREVEKYFELKSESANGKRKRKKKSGNNKQYRYARAQELYRQNPGLLAKYAREGIDWTKNSKTSLATNDISRLYNSLWGTKPHIRLPDFGAPEVELSLEEVLTPVTLKEIHNRVTRTKANVAPGPDGIRKRDVCRCIDMEILRLWFNLIMIRSYQSTAWKMNRTTLLPKEGQDINKVTNYRPITISSILSRLYWGIVDQKLRKCISMSPRQKGFTSEAGCFNNVHILSELLRHSKTNEGLVAVQLDVSKAFDTIPHEAIGAALRKKGLPELVVRLVTDSYKDVHTKITNGQEQIEIQLQRGVKQGDPLSPLLFNLVMEPMLRALESQPGYNIGDEAGVSVLAFADDIILTAKTAPQANNLLGYAEAYLRELGMSISAAKCAAFRIITTKDSWYLADPELTLHSGEGIPYAEAGTTLKYLGMRISPWAGIDIKGLGGNLCSALTRVRRLALKPYQKVNLISTYLVPHYLYQLVLASPPVTALRQLDQELRVVIRDIYHLPQSVANGLLYCGKRDGGLGFPKLETLVVSSSLRAGIKFIESEDVVMRALAESTGMVNRLKSLATSARINWPVSLDGIRTYKNQARKQELASWSALVSQGKSVKSLTDDKIGNAWLYNPTLLKPGRFITALKMRTNTTGNRVAMKRAGPVADVNCRKCRSQPETLAHILGQCTVMKEHTIRRHNEILDLVVNRITSRDKEVAVTREASFRMPSGGNLKPDLVVQSRKGVQVVDVTVRHEDNDYLAQGHKDKIEKYSRLLPHLQRELGASAAEVLPIVVGTRGAMPKETVRNLEKLNIKDRKTLITISMIALRNSIEQYHMFMDYDAPRASAETPSSVRGKTLDP

SEQ ID NO: 25583 - protein, 1118 aa, Cyphomyrmex costatus
MALLLKDEEEHVRERHEELGVCYVCQKCGKKYKTRHPALCHVPKCTAPKTPPASGETCAICGRVFATKSGLSQHERHEHPAVRNVARMDAAKKGVQEPRKLKTFTVEEVSRMLEMELQYRGERNVAQLMTASLPGKTCKQIRDKRATLTYKKRRDALLASGEELEDVPEEDRELPTPPGDPPHPEVEETTSNVDASTRMVELQQGTGADASTLRTEASDPTPEAGWMGGMASKILEIELPDDIPAEAAACVRLLRETLAYIESNMGNLPPRQKLEETDREVEKYFELKSESANGKRKRKKKSGNNKQYRYARAQELYRQNPGLLAKYAREGIDWTKDSKTSLATNDISSLYNSLWGTKPHIRLPDFGAPEVELSLEEVLTPVTLKEIHNRVTRTKANVAPGPDGIRKRDVCRRIDMEILRLWFNLIMIRSYQPTAWKMNRTTLLPKEGQDINKVTNYRPITISSILSRLYWGIVDQKLKKCISMSPRQKGFTSEAGCFNNVHILSELLRHSKTNEGLVAVQLDVSKAFDTIPHEAIGAALRKKGLPELVVRLVTDSYKDVHTKITNGQEQIEIQLQRGVKQGDPLSPLLFNLVMEPMLRALESQPGYNIGDEAGVSVLAFADDIILTAKTAPQANNLLGYAEAYLRELGMSISAAKCAAFRIITTKDSWYLADPELTLHSGEGIPYAEAGTTLKYLGMRISPWAEIDIKGLGGNLCTALTRVRRLALKPYQKVNLISTYLVPHYLYQLVLASPPVTALRQLDQELRVVIRDIYHLPQSVANGLLYCCKRDGGLGFPKLETLVVSSSLRGGIKFIESEDVVMRALAESTGMVNRLKSLATSARINWPVSLDGIRTYKNQARKQELASWSALVSQGKSVKSLTDDKIGNAWLYNPTLLKPGRFITALKMRTNTTGNRVAMKRAGPVADVNCRKCRSQPETLAHILGQCTVMKEHTIRRHNEILDLVVNRITSRDKEVAVTREASFRMPSGGNLKPDLVVQSRKGVQVVDVTVRHEDNDYLAQGHKDKIEKYSRLLPHLQRELGASAAEVLPIVVGTRGAMPKETVRNLEKLNIKDRKTLITISMIALRNSIEQYHMFMDYDAPRASAETPSSVRGKTLDP

SEQ ID NO: 25584 - protein, 989 aa, Solenopsis invicta
MPPRRRALRVFSEEEEDIMLRLELRFRNERNVANKMMEFLPDKTNKQLRDKRNMAAYKRRLEEMLARHDEEDEEEMEEMEIKEGEEMEEEEEMEDEEEVEEADEEEIDVPEEADELPIPPGDPPHQSEEGQPREENGAEERQPVEEASDSLPEIAWREGIARKVLEVEPPNAIPPEAAACVQLLRGVLARIVSGEPPTHEEQETLDKEIEDFFRANAVNPKGMKRGKGGAKKKSKKRYKYARTQELYRQNPGLLVKYVREGIDWTEEAKPDLGSEDIKSLYDSLWGTKPHIKTPKFGEPAPPLELGRVLSPITSKDVRDRITRTRATVAAGPDGLMKRDISPLARAEILRLWFNIIMTRASQPKAWRLNRTALLPKDGLDHTKVTNYRPITISSILSRLYWGIVDQKLRKHISMTPRQKGFTSEAGCFNNVHILSELLRHSKITEGLVAVQLDVSKAFDTIPHKAIGAALRKKGLPELVVRLVEDSYKDVHTVISNRTDEIQIKLQRGVKQGDPLSPLLFNLVMEPMLTALESQPGYNIRDEVSVSALAFADDIILTAKTAPQASNLLRLAETYLRGLGMSISAKKCASFRIQTTKDSWYLADPALTLISGDGIPYADAGTTLKYLGVRISPWAGIDIKGLKDSLCTAIRGIRKLALKPPQKVHLISTYLVPHYLYQLVLATTPVTYLRQLDQELRVAIKDIYHLLQGTADGLIYCSKRDGGLGFPKLETLVVSSSLRAGLKFTESTDPVMRALAEAAGMVNRLRSLAASARINWPIDMQAIKRYKAAARKRELASWAALVSQGKSVQSLTDDKIGNAWLYNPTLLKPGRFITALKMRTNTTANRTSLARAGPVADVRCRKCKSQPETLAHILGQCTYTKEDTIRRHDEIVKLIVDKMTLRDKEVAVTRETHYKMPSGGILKPDLVVQSQRGVFVVDVTVRHEDNEYLAQGHQDKIRKYSRLLPHLQRDLGATAAEVLPIVVGARGAMP

SEQ ID NO: 25585 - protein, 1098 aa, Ooceraea biroi
MIAVKTRSQASDGEGAGSVPSTSRQGASKEDQAGQEDDDFEILVPFVRRSCQKCLRSKKGNYMALSLKDEIRHVAERHANAEVTFKCATCDKRFSREHPALCHIPKCPGPKRAGNDDNHKCRECGKAYKTKSGLSQHERHAHPATRNKERAGGLAGAEPKARQGKVFSEQEERKMLELEVELRKEKFIATKMVIHLPGKTAKQIRDKRGTAAYKRKMEVALAPFRTPDQSEDEHSEEDEAEADEEEKGIDAPEEIDELPVTPGDPPHQTADETGAEREAQTREEASATLQEAAWREEVARSVLRDMAPAATSAEAAACVQLLRGVLANIIEQQGQLPSEEEMRKVDDQVVEYFAENSVAAKRKTIAGKRKRRRKGRIQQYRYARTQELYRENPGLLAKHIREGIDCTEQKRTKLETVDIKDLYSSLWETKARINLPKFDERDPERGLQDVLTPIVSGEIDKRISRTKANVAAGPDGLVKRDISSRTAREILRLWYNIIEVRGYQPSVWRINRTTLLPKDGQDHTLVKNYRPITIGSLLARLYWGIVDQKLRRSVTMNPRQKGFTSEAGCFNNVHILSELLRHSKVTGGLVAVQLDVSKAFDTIPHDIIGEALRRKGLPEFVVRLVVDSYRDVHTVIKNGEEEVAIKIQRGVKQGDPLSPLIFNLVMEPMLIALESQPGYSIGREHNTSVLAFADDIILTARTAPHAKHLLGVAETYLKGLGMSISAAKCATFRIVGTKDSWYLADPGLTLKSGESIPYADADTAIKYLGVKISPWAGIDIRSLKPDLCTALQRVKKLALKPHQKVNLISTYLVPHYLYQLVLALLPVTLLRQLDQELRVVVRDIYHLSQSTADGFIYCGKRDGGLGFPKLEALVVCSSLRTGLKFIGSTDPTMRALADDAGMVNRLKSLAKSARINWPVTEQNIRQHKARAKEKELASWSALVSQGKSVKSHTDDKFGNAWLYNPQLLKPCRFITALKMRTNTTANRTTLHRAGLVADVKCRKCKTQPETLAHILGQCTYMKQHTIRRHDEIKDLIIETITKRDKEVAVTREPTFKMASGGNLKPDLVIQSQKGIRVVDVTVRHEDNDYLAQGHRDKM

SEQ ID NO: 25586 - protein, 1168 aa, Pediculus humanus
MRTRQSKNQNKSCSTVDLRQLDENVNFTASDPGHSNDVSHRSPVQETTRSHRIRWTQEDLQELMWCYFYSQKFGSGSESDTFKIWRGRNPNSRKDMTSKKLAAQRRYIIKTQKIENDKLEEIKKNVDSSCSNVIRDNAQIITELNESNHKSKTDTDEQLLTDAEMKSIEERLIEEIKKVKMCPLINREPLRKIYKNKKATEVLHLIDNTLINVLEKVVDINLTTINEIIYAAGVVATDIILGPRKEARHKGMETKKSTSPIWIQRIEGKIERIRLHISLVSEMKKNNNLKKRTIKKLDHLKRIYKLKTMEDIELTMETLKQKVLLYSQRIRRYKKREQFWRQNKLFESDPKKFYRTIREQNIQNGFSTLNVEKMADFWSNIWEKSHPLNKNSTWMNKEKEAHAWIASSTMSDVRMADLETCLKNTANWKSPGLDRVQNFWIKNFTSTHKYLMVSINKLIMGRQEMPEWITTGKTYLLPKKSGATEPKDFRPITCLPTMYKIITAIIAEKIYGHLRKNNIFPPEQYGCRKGSYGCKEVLLINKLIMASAKQKRKNLSMAWIDYQKAFDSVPHEWIIEALKIYKVDPNITAFCEKSMKNWCTQLEVQKYSSRKIFIKRGIFQGDSLSPLLFCMSLIPLSRQLNIKDQGYELVPGGRKITHMLYMDDLKIYAKNEEELNKMLRTVQTFSSDINMKFGLEKCARINIVRGKLKQKQNIEDSEEELIKELDPGSSYKYLGIEENFGIANKEIKPRLKKEYFKRLRLILQSELNGRNKITAVGTLAVPVIEYSFGLVDWTKEEITHLDRRTRKILTMNGALHPKADVDRLYVSRKDGGRGLRQIEAAYQNAIIGMGKYIESHREDPILAQVIHAEEKTTKKGVLKRAKQIVQENKENEIMEEGQLATYNSKAQSQKKLIGKWEQKKLHGQYLKRINAEDINKKSTHNWLRRGKLKIETEAFITAAQDQALRTHNYEKVILKVRQDDKCRICQSQSETIDHLISGCPILAKHEYLERHNKICQYLHWSICREYGMDGLPKEWYNHIPSPVTTVGPCTVLYDQQIHTDRTVPANKPDIILRHNAEKWCKLIEVSVPAEKNTTAKEADKRLKYRNLEIEITRMWGTKTETIPVIVGALGAMPNSIKGNLKKIMKNLKEETIQDIALCGTAHILRKIL

SEQ ID NO: 25587 - protein, 1168 aa, Pediculus humanus
MRTRQSKNQNKSCSTVDLRQLDENVNFTASDPGHSKDVSHRSPVQETTRSHRIRWTQEDLQELMWCYFYSQKFGSGSESDTFKIWRGRNPNSRKDMTSKKLAAQRRYIMKAQKIENNKLEEIKKNVDSSCSNVIRDNAQIITELNESNHKSKTDTDEQLLTDAEMKSIEERLIEEIKKVKMCPLINRKPLRKIYKNKKATEVLRLIDNTLINVLEKVVDINLTTINEIIYAAGVVATDVILGQRKEARHKEIEIKKSTSPIWIQRIEGKIERIRSHISLVSEMKKNNNLKKRTIKKLDHLKRIYKLKTMEDIELTMETLKQKVLLYSQRIRRYKKREQFWRQNKLFESDPKKFYRTIREQNIQNGSSTLNVEKMADFWSNIWEKSHPLNKNSTWMNKEKEAHAWIASSTMSDVRMADLETCLKNTANWKSPGLDRVQNFWIKNFTSTHKYLLVSINKLIMGRQEMPEWITTGKTYLLPKKSGAMEPKDFRPITCLPTMYKIITAIIAEKIYGHLRKNNIFPPEQYGCRKGSYGCKEVLLINKLIMASAKQKRKNLSMAWIDYQKAFDSVPHEWIIEALKIYKVDPKITAFCEKSMKNWCTQLEVQKYSSRKIFIKRGIFQGDSLSPLLFCMSLIPLSRQLNIKDQGYELIPGGRKITHMLYMDDLKIYAKNEEELNKMLRTVQTFSSDINMKFGLEKCARINIVRGKLKQKQNIEDSEEELIKELDPGSSYKYLGIEENFGIANKEIKPRLKREYFKRLRLILQSELNGRNKITAVGTLAVPVIEYSFGLVDWTKEEITHLDRRTRKILTMNGALHPKADVDRLYVSRKDGGRGLRQIEAAHQNAIIGMGKYIESHQEDPILAQVIHAEEKTTKKGVLKRAKQIVLENKENEIMEEGQLATYNSKAQSQKKLIGKWEQKKLHGQYLKRINAEDINKKSTHNWLRRGKLKIETEAFITAAQDQALRTHNYEKVILKVRQDDKCRICQSQSETIDHLISGCPILAKHEYLERHNKICQYLHWNICREYGMDGLPKEWYNHIPSPVTTVGPCTVLYDQQIHTDRTVPANKPDIILRHNGEKWCKLIEVSVPAEKNTTAKEADKRLKYRNLEIEITRMWGTKTETIPVIVGALGAMPHSIKGNLKKIMKNLKEETIQEIALCGTAHILRKIL

SEQ ID NO: 25588 - protein, 1168 aa, Pediculus humanus
MRTRQSKNQNKSCSTVDLRQLDENVNFTASDPGHSNDVSHRSPVQETTRSHRIRWTQEDLQELMWCYFYSQKFGSGSESDTFKIWRGRNPNSRKDMTSKKLAAQRRYIIKTKKIENDKLEEIKKNVDSSCSNVIRDNAQIITELNESNHKSKTDTDEQLLTDAEMKSIEERLTEEIKKVKMCPLINREPLRKIYKNKKATEVLHLIDNTLINVLEKVVDINLTTINAIIYAAGVVATDIILGPRKEARHKGMETKKSTSPIWIQRIEGKIERIRLHISLVSEMKKNNNLKKRTIKKLDHLKRIYKLKTMEDIELTMETLKQKVLLYSQRIRRYKKREQFWRQNKLFESDPKKFYRTIREQNIQNGFSTLNVEKMADFWSNIWEKSHPLNKNSTWMNKEKEAHAWIASSTMSDVRMADLETCLKNTANWKSPGLDRVQNFWIKNFTSTHKYLLVSINKLIMGRQEMPEWITTGKTYLLPKKSGATEPKDFRPITCLPTMYKIITAIIAEKIYGHLRKNNIFPPEQYGCRKGSYGCKEVLLINKLIMASAKQKRKNLSMAWIDYQKAFDSVPHEWIIEALKIYKVDPNITAFCEKSMKNWCTQLEVQKYSSRKIFIKRGIFQGDSLSPLLFCMSLIPLSRQLNIKDQGYELVPGGRKITHMLYMDDLKIYAKNEEELNKMLRTVQTFSSDINMKFGLEKCARINIVRGKLKQKQNIEDSEEELIKELDPGSSYKYLGIEENFGIANKEIKPRLKREYFKRLRLILQSELNGRNKITAVGTLAVPVIEYSFGLVDWTKEEITHLDRRTRKILTMNGALHPKADVDRLYVSRKDGGRGLRQIEAAHQNAIIGMGKYIESHQEDPILAQVIHAEEKTTKKGVLKRAKQIVQENKENEIMEEGQLATYNSKAQSQKKLKGKWEQKKLHGQYLKRINADDINKKSTHNWLRRGKLKIETEAFITAAQDQALRTHNYEKVILKVRQDDKCRICQSQSETIDHLISGCPILAKHEYLERHNKICQYLHWNICREYGMDGLPKEWYNHIPSPVTTVGPCTVLYDQQIHTDRTVPANKPDIILRHNGEKWCKLIEVSVPAEKNTTAKEADKRLKYRNLEIEITRMWGTKTETIPVIVGALGAMPNSIKGNLKKIMKNLKEETIQEIALCGTAHILRKIL

SEQ ID NO: 25589 - protein, 1168 aa, Pediculus humanus
MRTRQSKNQNKSCSTVDLRQLDENVNFTASDPGHSNDVSHRSPVQETTRSHRIRWTQEDLQELMWCYFYSQKFGSGSESDTFKIWRGRNPNSRKDMTSKKLAAQRRYIIKKIENDKLEEIKKNVDSSCSNVIRDNAPIITKLNESNNNNRYETDTDEQLLTDAEMKSIEERLIEEIKKVKMCPLINREPLRKIYKNKKATEVLHLIDNTLINVLEKVVDINLTTINEIIYAAGVVATDIILGPRKEARHKGIETKKSTSPIWIQRIEGKIKRIRSHISLVSEMKKNNNLKKRTIKKLDHLKRIYKLKTMEDIELTMETLKQKVLLYSQRIRRYKKREQFWRQNKLFESDPKKFYRTIREQNIQNGSSTLNVEKMADFWSNIWEKSHPLNKNSTWMNKEKEAHAWIASSTMSDIIMADLEICLKNTANWKSPGLDRVQNFWIKNFTSTHKYLLVSINKLIMGRQEMPEWITTGKTYLLPKKSGAMEPKDFRPITCLPTMYKIITAIIAEKIYGHLRKNNIFPPEQYGCRKGSYGCKEVLLINKLIMASAKQKRKNLSMAWIDYQKAFDSVPHEWIIEALKIYKVDPKITAFCEKSMKNWCTQLEVQKYSSRKIFIKRGIFQGDSLSPLLFCMSLIPLSRQLNIKDQGYQLVPGGRKITHMLYMDDLKLYAKNEEELNKMLRTVQTFSSDINMKFGLEKCARINIVRGKLKQKQNIEDSEEELIKELDPGSSYKYLGIEENFGIANKEIKPRLKKEYFKRLRLILQSELNGRNKITAVGTLAVPVIEYSFGLVDWTKEEITHLDRRTRKILTMNGALHPKADVDRLYVSRKDGGRGLRQIEAAHQNAIIGMGKYIESHREDPILAQVIHAEEKTTKKGVLKRAKQIVQENKENEIMEEGQLATYNSKAQSQKKLIGKWEQKKLHGQYLKRINAEDINKKSTHNWLRRGKLKIETEAFITAAQDQALRTHNYEKVILKVRQDDKCRICQSQSETIDHLISGCPILAKHEYLERHNKICQYLHWSICREYGMDGLPKEWYNHIPSPVTTVGPCTVLYDQQIHTDRTVPANKPDIILRHNGEKWCKLIEVSVPAEKNTTAKEADKRLKYRNLEIEITRMWGTKTETIPVIVGALGAMPHSIKGNLKKIMKNLKEETIQEIALCGTAHILRKIL

SEQ ID NO: 25590 - protein, 1168 aa, Pediculus humanus
MRTRQSKNQNKSCSTVDLRQLDENVNFTASDPGHSNDVSHRSPVQETTRSHRIRWTQEDLQELMWCYFYSQKFGSGSESDTFKIWRGRNPNSRKDMTSKKLAAQRRYIIKTKKIENDKLEEIKKNVDSSCSNVIRDNAQIITELNESNHKSKTDTDEQLLTDAEMKSIEERLIEEIKKVKMCPLINREPLRKIYKNKKATEVLHLIDNTLINVLEKVVDINLTTINEIIYAAGVVATDIILGPRKEARHKGMETKKSTSPIWIQRIEGKIERIRLHISLVSEMKKNNNLKKRTIKKLDHLKRIYKLKTMEDIELTMETLKQKVLLYSQRIRRYKKREQFWRQNKLFESDPKKFYRTIREQNIQNGFSTLNVEKMADFWSNIWEKSHPLNKNSTWMNKEKEAHAWIASSTMSDVRMADLETCLKNTANWKSPGLDRVQNFWIKNFTSTHKYLLVSINKLIMGRQEMPEWITTGKTYLLPKKSGAMEPKDFRPITCLPTMYKIITAIIAEKIYGHLRKNNIFPPEQYGCRKGSYGCKEVLLINKLIMASAKQKRKNLSMAWIDYQKAFDSVPHEWIIEALKIYKVDPNITAFCEKSMKNWCTQLEVQKYSSRKIFIKRGIFQGDSLSPLLFCMSLIPLSRQLNIKDQGYELVPGGRKITHMLYMDDLKIYAKNEEELNKMLRTVQTFSSDINMKFGLEKCARINIVRGKLKQKQNIEDSEEELIKELDPGSSYKYLGIEENFGIANKEIKPRLKREYFKRLRLILQSELNGRNKITAVGTLAVPVIEYSFGLVDWTKEEITHLDRRTRKILTMNGALHPKADVDRLYVSRKDGGRGLRQIEAAYQNAIIGMGKYIESHREDPILAQVIHAEEKTTKKGVLKRAKQIVQENKENEIMEEGQLATYNSKAQSQKKLKGKWEQKKLHGQYLKRINADDINKKSTHNWLRRGKLKIETEAFITAAQDQALRTHNYEKVILKVRQDDKCRICQSQSETIDHLISGCPILAKHEYLERHNKICQYLHWNICREYGMDGLPKEWYNHIPSPVTTVGPCTVLYDQQIHTDRTVPANKPDIILRHNGEKWCKLIEVSVPAEKNTTAKEADKRLKYRNLEIEITRMWGTKTETIPVIVGALGAMPNSIKGNLKKIMKNLKEETIQEIALCGTAHILRKIL

SEQ ID NO: 25591 - protein, 886 aa, Pediculus humanus
MKKNNNLKKRTIKKLDHLKRIYKLKTMEDIELTMETLKQKVLLYSQRIRRYKKREQFWRQNKLFESDPKKFYRTIREQNIQNGFSTLNVEKMADFWSNIWEKSHPLNKNSTWMNKEKEAHAWIASSTMSDVRMADLETCLKNTANWKSPGLDRVQNFWIKNFTSTHKYLLVSINKLIMGRQEMPEWITTGKTYLLPKKSGATEPKDFRPITCLPTMYKIITAIIAEKIYGHLRKNNIFPPEQYGCRKGSYGCKEVLLINKLIMASAKQKRKNLSMAWIDYQKAFDSVPHEWIIEALKIYKVDPNITAFCEKSMKNWCTQLEVQKYSSRKIFIKRGIFQGDSLSPLLFCMSLIPLSRQLNIKDQGYELVPGGRKITHMLYMDDLKIYAKNEEELNKMLRTVQTFSSDINMKFGLEKCARINIVRGKLKQKQNIEDSEEELIKELDPGSSYKYLGIEENFGIANKEIKPRLKREYFKRLRLILQSELNGRNKITAVGTLAVPVIEYSFGLVDWTKEEITHLDRRTRKILTMNGALHPKADVDRLYVSRKDGGRGLRQIEAAHQNAIIGMGKYIESHQEDPILAQVIHAEEKTTKKGVLKRAKQIVQENKENEIMEEGQLATYNSKAQSQKKLKGKWEQKKLHGQYLKRINADDINKKSTHNWLRRGKLKIETEAFITAAQDQALRTHNYEKVILKVRQDDKCRICQSQSETIDHLISGCPILAKHEYLERHNKICQYLHWNICREYGMDGLPKEWYNHIPSPVTTVGPCTVLYDQQIHTDRTVPANKPDIILRHNGEKWCKLIEVSVPAEKNTTAKEADKRLKYRNLEIEITRMWGTKTETIPVIVGALGAMPNSIKGNLKKIMKNLKEETIQEIALCGTAHILRKIL

SEQ ID NO: 25592 - protein, 1168 aa, Pediculus humanus
MRTRQSKNQNKSCSTVDLRQLDENVNFTASDPGHSNDVSHRSPVQETTRSHRIRWTQEDLQELMWCYFYSQKFGSGSESDTFKIWRGRNPNSRKDMTSKKLAAQRRYIIKTQKIENDKLEEIKKNVDSSCSNVIRDNAQIITELNESNHKSKTDTDEQLLTDAEMKSIEERLIEEIKKVKMCPLINREPLRKIYKNKKATEVLHLIDNTLINVLEKVVDINLTTINEIIYAAGVVATDIILGPRKEARHKGMETKKSTSPIWIQRIEGKIERIRLHISLVSEMKKNNNLKKRTIKKLDHLKRIYKLKTMEDIELTMETLKQKVLLYSQRIRRYKKREQFWRQNKLFESDPKKFYRTIREQNIQNGSSTLNVEKMADFWSNIWEKSHPLNKNSTWMNKEKEAHAWIASSTMSDVRMADLETCLKNTANWKSPGLDRVQNFWIKNFTSTHKYLLVSINKLIMGRQEMPEWITTGKTYLLPKKSGATEPKDFRPITCLPTMYKIITAIIAEKIYGHLRKNNIFPPEQYGCRKGSYGCKEVLLINKLIMASAKQKRKNLSMAWIDYQKAFDSVPHEWIIEALKIYKVDPNITAFCEKSMKNWCTQLEVQKYSSRKIFIKRGIFQGDSLSPLLFCMSLIPLSRQLNIKDQGYELVPGGRKITHMLYMDDLKIYAKNEEELNKMLRTVQTFSSDINMKFGLEKCARINIVRGKLKQKQNIEDSEEELIKELDPGSSYKYLGIEENFGIANKEIKPRLKKEYFKRLRLILQSELNGRNKITAVGTLAVPVIEYSFGLVDWTKEEITHLDRRTRKILTMNGALHPKADVDRLYVSRKDGGRGLRQIEAAYQNAIIGMGKYIESHREDPILAQVIHAEEKTTKKGVLKRAKQIVQENKENEIMEEGQLATYNSKAQSQKKLIGKWEQKKLHGQYLKRINAEDINKKSTHNWLRRGKLKIETEAFITAAQDQALRTHNYEKVILKVRQDDKCRICQSQSETIDHLISGCPILAKHEYLERHNKICQYLHWNICREYGMDGLPKEWYNHIPSPVTTVGPCTVLYDQQIHTDRTVPANKPDIILRHNGEKWCKLIEVSVPAEKNTTAKEADKRLKYRNLEIEITRMWGTKTETIPVIVGALGAMPNSIKGNLKKIMKNLKEETIQEIALCGTAHILRKIL

SEQ ID NO: 25593 - protein, 978 aa, Sitophilus oryzae
MKYSGVDFLSRPRLPKIKYNNQTKSTVAIMNRALSQYLPQSLSLQDTCDLIYCAAAAVCHVTGLRIGEMAQSSNHKPQIPPWKRRLENKIKDIRVTIGVLHTYLTNDNPSNRTKRIVNDIIRQNNLEAGSVRILREFMDNLKQKIAALGCRLRRYNESEKRRKQNKQFITNQKLFLRALSTQKEEPDRALVKADEMYNFWNNIWGNEQEHQDAYWIKEEIHRTQDLPKMREIQITENDIKQAVSSLGNWKAPGIDKIQAYWWKHLTHVHAVLAIQLTQAIKNPAETIPAFFTMGITHMIPKNKFIDDPKNFRPITCLPVIYKIFTSVFEKSISKHLTNHHILAREQNGSRKGSRGSTEWLIIDNVIGKQAYKNQRNISIAWIDYKKAFDSVPHSWLLKILEIYKIDTSIVRTLQYLMQQWQTSLLVTSSRDSYQTKPLKVRRGIFQGDSLSPLMFCMAINPLSFMLKSSKYGYAVKNNPQVKISHLLYMDDLKCYASNPEQLKGQMELVASFSQAVRMEFGMEKCAFLHCKKGKIQESNEIILTNEITFSPLHLGETYKYLGIHQALKIDDGVIKKTAEDAFMKRVCKVLGTELHAKNKIAAINVWAAPVILNTFGVLKWSQTDLESLDRKVRTSMTRHRMHHPHASTIRLYMPRDKGGRGIISLIAMHEKHIRSLQHYFDQSNDPLLSAIKTADRNFTPLNLAGQRLPAGTGGAEELIEEWKGKALHGRYPSNLYNPDVDRNLSLRFLRDGELRAETEGFIIAIQDQQIPTKNFLKIIAKKDLPNDRCRLCNAFPETIQHICSGCTYLAPRHYLDRHNRVAGILHQEICKKENLLNEITPYYRYLPEKIVENENVKVYWDTDIITDRTVQHNRPDIVVFYKKQKHAYLLDITIPLDENIKNARKEKITKYEALAQELKAIYDLSKTFILPIILTCNGLVDVNLVQSLKNSNFTTRKESSLPCRSPQFFLPVLSFALC

SEQ ID NO: 25594 - protein, 982 aa, Sitophilus oryzae
MKYSGVDFLSRPRLPKIKYNNQTKSTVAIMNRALSQYLPQSLSLQDTCDLIYCAAAAVCHVTGLRIGEMAQSSNHKPQIPPWKRRLENKIKDIRVTIGVLHTYLTNDNPSNRTKRIVNDIIRQNNLEAGSVRILREFMDNLKQKIAALGCRLRRYNESEKRRKQNKQFITNQKLFLRALSTQKEEPDRALVKADEMYNFWNNIWGNEQEHQDAYWIKEEIHRTQDLPKMREIQITENDIKQAVSSLGNWKAPGIDKIQAYWWKHLTHVHAVLAIQLTQAIKNPAETIPAFFTMGITHMIPKNKFIDDPKNFRPITCLPVIYKIFTSVFEKSISKHLTNHHILAREQNGSRKGSRGSTEWLIIDNVIGKQAYKNQRNISIAWIDYKKAFDSVPHSWLLKILEIYKIDTSIVRTLQYLMQQWQTSLLVTSSRDSYQTKPLKVRRGIFQGDSLSPLMFCMAINPLSFMLKSSKYGYAVKNNPQVKISHLLYMDDLKCYASNPEQLKGQMELVASFSQAVRMEFGMEKCAFLHCKKGKIQESNEIILTNEITFSPLHLGETYKYLGIHQALKIDDGVIKKTAEDAFMKRVCKVLGTELHAKNKIAAINVWAAPVILNTFGVLKWSQTDLESLDRKVRTSMTRHRMHHPHASTIRLYMPRDKGGRGIISLIAMHEKHIRSLQHCFDQSNDPLLSAIKTADRNFTPLNLAGQRLPAGTRGAEELIEEWKGKALHERYPSNLYNPDVDRNLSLRFLRDGELRAETEGFIIAIQDQQIPTKNFLKIIAKKDLPNDRCRLCNAFPETIQHICSGCTYLAPRHYLDRHNRVAGILHQEICKKENLLNEITPYYRYLPEKIVENENVKVYWDTDIITDRTVQHNRPDIVVFYKKQKHAYLLDIRIPLDENIKNARKEKITKYEALAQELKAIYDLSKTFILPIILTCNGLVDVNLVQSLKKLQLHNPERIISTMQKSTILSTCSIVRTVLNRD

SEQ ID NO: 25595 - protein, 1253 aa, Plectus sambesii
MPYVTIDVPLTPPHNCHLCLPVPRQYVDHHGLAKHLSKEHVGYTLDFRCVGCHEKFGNLKSTNTHIKSTTCSTTIAARPAHAPPPTLPLRRIQFRPRVRNAAAASADADAEADADTITEAVATVAVIADVNADAEPSSQLSTPPRRVLRQRPAPPMLQPSSSSKRSSSSSSSSSSSKRSSSSSSSSSSESSSSSSISSGSNTSVTEQQQQQQPQQPATPAPQAVIPDRPAAGPPPPATAEQLAWARRFNSIETTEDLEATLAMLITEVTNSTPTQTRPAPGPAQPARPPGARHQPQTQGPAGHPQQPPMRPAPQQQVRAPRRRSQIPLPAGPPQQLPTLLAPQQAHAPRHRSLTPRPRQEPTLPPPPVLPPRPTPQPCRPDAAALQRRRRHSGPEYVAAEASRLQKLYRVNRPKAFREVTSPPSAFCNIDQHRVQAHFTQVLQRRHHLTNAMPTSVPQLTPPPLHDADPLNSDFTPAEVRNRLTRCKNTAPGPDKLRYTSWKTFDPSGSILSAVYNAAQRLQHVPAAWKESTTILLYKDGDRDNISNWRPIALSDTIGKLYASCLAARLTNWCLRYERISPTQKGFMPYEGCLEHNFVLQSCIQDARSSRRTCTIAWLDLRNAFGSVPHDTLFKCLRWTGLSTASIDAIRRLYTDCSTAIRVNEGLTESIAIGAGVKQGCPLSPIVFNLTIEPILRAVRQLHHAYKIHDQEVDVLAYADDLALVSDSADGLQALLDVTATVASWAGLSFNPKKCASLHINGKKHNTPDTSFNIQGNTMQALNISNFYKHLGVPTGFTLHSSASSTLKEIADDVHKLDESLLAPWQKFDATNVFVLSRLSFHLKAGVVPKGPLIALDKQIKAVGKRWLHLPQRASVEPLYLSYKAGGVNLLPLGVLADVAQVTHALRLLTSIDPAVRQLSLSALLAAVKKRTRRDVQETDVADYLNGSMEGVFRQESTAITSIWSRLRVATRRLRTKLNISWQHSGDNISLFLDDATVTRKPAESQLRDAVRNHYLQRLLAKPDQGKVYDVTASTPASNHYMRNGNFTRFAEWRFIHRARLGVVPLNGCRRFGTGDKRCRRCGEMDETLPHVLNHCRPHFATMTRRHDAILDRLEKATRRAPGTTIRRNQQVPGCNSTLRPDLVLINETEKTFTIVDVTVPFENRSAAFTAARVEKARKYADITQHYADLGYDASCNAFIIGSLGGYDPANGQAIARLGIGHRYAVLMKRLMVTDTIRWSRDIYIEHVSGHRQY

SEQ ID NO: 25596 - protein, 995 aa, Folsomia candida
MKKDVISATRLWIQSNFIEDIDSHIPKTDIAIRYAHHAQQSGGGRVHDSTVGKYILQLFPNTKTNRPHARGAKPSFFGIRWADQPTPPLPDTTNWSTFLGKLKGSIPTLRRVPRGARLPVAQALLRTIQEVTTTNHDDNWGKLFTFPYAVIAVPSKSDHVKNLTTWVKSRVVMWESDHTTAVPPPRTPHPPSNKPQKQSQIAKKVEAKLSDGDISGAIRLLSSDDTIATPNEATISSLQEKHPYHPEPANFPEPPEQLDPPSEVSSEELSSALSSFPPGSAGGLDAPRPQIVKDLLGQSLGETGEKLGTAITNLINIILQGGVPTTFCPTFYGASLTALNKKGGGIRPIAVGNTWRRLVAKVVVARITPALVEHFSPHQLGVGIRGGAEIGAHAARRYWNHPHTTPKAFLKIDFSNAFNEIRRDCLLNIVKDRLLLIFLFVAQAYSSPSNLQYGTTPISSQLGVQQGDPCGPGLFCLVLQPVVEAVQTEFNMWYLDDGTIADSPEEVLTAFETVRRMGTDVGLHLNEAKCEVGIFGGDPNTHEDIYEMFRQVSPDIQKISPEVATLLGAPLTDSAIEKIMEKKTSQLSTLGDRLRQLSSHSAFFLLRASISIPRLIYFLRCAPTWRNHAALLLYDNALKIAVEGILNCSLSPDSWSQSSLPVKFGGLGVRHAVETAIPSFLASSYSCLPHLNSLLPDFLCEQDDAVTEGEQQWSLHGPTELPPMLLRGSQKVWELPIITKTISTLLSTALTPHDTARILAMDQPHAGAWLNALPSPQLGTHLSNDSFRVAVAFRLGCEICQPHRCPCGADVTSKGYHGLSCKKSAGRWSRHEAANDIIARALRSAEVQCIREPAGCSREDGKRPDGMTLVPWTRGRSMVWDYTCVDTYAPSHLPHTTINPGSAAEKAENNKKNKYSFLQDHFLFIPVALETSGVWGGEGLSLINEIGRRISERTGDKRSATFLRQQISIATQRGNVAAILGSLPAGKELDEIYYF

SEQ ID NO: 25597 - protein, 957 aa, Ypsolopha scabrella
MSQTAGPSTAAGSQSSLNDVQCPDCKKSYKGQRGLNIHRSKVHLNSQVTNSSPAAQGDTGIPHDKPFWQFLGDLKGNLPRVKRIPRGARTTVAASLSQCINSVVHDNSEDSWKHFLTFSYRTLHVRRNKDVKGSLTQKIKNNCKHSDNLNLSNTIDFQNNSYDIIKKIEAKVNDGDIRGAARLLFSDDAIAPDTPDTFSALTSKHPPQMIPTQLPDPPGPSDQTPEATAEETLAAIMSFRNGSAGGLDGLTPQHYKDLVCGTVGETGRILLDAITRLVNLMLSGRVCEQILDILYGANLFALKKKDGGIRPIAVGNTIRRVVSKICCQHILPDLASKFQPVQLGFGTTGGCEAAVHATRTFLNNNAGEVLLKVDVRNAFNSLDRKALLTQVKEHVSPIYNYVSQCYNQSSKLLYQNTFINSAVGCQQGDPLGPAIFSLAIHPVISSLTSKLNIWYLDDGTVGGEATSVFNDLEIIINKFSELGLELNFSKCELFVSELLSQEDKNSIISKFNILAPDIRIADKESLRLLGAPILDDAVPRFVSDQVAKFTHSSERMNKINPHMALCVIRHCLFVPQLTYTLRCSPIWKFPNLVDTLDTVLRQSLTTVLNCSFDDRSWSQATLPVRFGGLGVRKISSIALPAFLSSVYSTHVLFGNIISPSLGDVEASCLTEARNAWTLSCPDLPIVLESQKSWDEPLCEQTQKNLLATASNLADRARLLATGERESGFWLHAIPSANIGTLLDKTTFTLAICLRLGTKTNESHRCQCGASVDQLGHHGLSCRRSAGRWSRHGSLNDVIRRALATVNVPAVLEPNGIARDDGKRPDGMTLIPWQNGRSLVWDATCVDTLAASHIQSTAVTAGVAAATAERNKRRKYAALGEGYIFVPFGVETFGPWGPDARLLYKQIASRLVDASGDPRAGAYLGQRISLAIQRGNAASVLGTLPSDSDDLNKVFYLI

SEQ ID NO: 25598 - protein, 825 aa, Ypsolopha scabrella
MAPDTSDTLAALASKHPLPAMGTQLPDPPNPSDRTPETTAEETLAAIMSFRNGSAGGLDGLTPQHLKDLLSKTVGETGRTLLNDITRLANLMLSGKVCEEITDILYGANLIALKKKDGGIRPIAVGNTIRRIVSKICCIHILPELSAKFQPVQLGFGCRGGCEAAVHAARTFLADDSSELLLKVDVCNAFNSVGRDALLTQVKENSPAIYNYIYQCYSKPTKLIYKNEILQSATGCQQGDPLGPAIFSLAIHPVITTLNSKFNVWYLDDGTIGGDAITVLNDLQSITHQFQQLGLQLNFSKCELFLSDSISTEEKNDIFLKFKNLAPDIKILDKQSLRLLGAPIHEESIPAYVNEQISRFIASSERLLKINPHMALFIIRYCLFVPNLTYVLRCSLMWKFNTLLKLLDNTISQTLSSLLNCSFTERSWDQATLPVRFGGLGIRKISSVALPAFLSSINGTNALFGNIISPSLGDVEALGLTEARDAWTLACPGEALPIVLNSQKLWDEPLCRKLQQNLLETAVNPVERARLLAVGEHEAGYWLQAMPSASIGTLLDKTTFSMAVCLRLGIPVNVPHRCQCGTSVDELGHHGLSCRRSAGRLSRHASINDVIRRALATVNVPAILEPQGIARDDGKRPDGMTLVPWKNGHSLVWDATCVDTLAPSHIPATATKAGAAAATAESAKRRKYGALGASYIFAPFGVETLGPWGPETRRLFHDLSSRLVDASGDPRAGAYLGQRISLAIQRGNAASVLGALPFGSDLEKVFYLRLCQGPQEIMNSPSLRHPPASRNAHIASLNSSRARSSRSIQIALFFVEANIDILVGS

SEQ ID NO: 25599 - protein, 959 aa, Ypsolopha scabrella
MSQTAGPSTAAGSQSSLNDVQCPDCKKSYKGQRGLNIHRSKVHLNSQVTNSSPAAQGDTGIPHDKPFWQFLGDLKGNLPRVKRIPRGARTTVAASLSQCINSVVHDNSEDSWKHFLTFSYRTLHVRRNKDVKGSLTQKIKNNCKHSDNLNLSNTIDFQNNSYDIIKKIEAKVNDGDIRGAARLLFSDDAIAPDTPDTFSALTSKHPPQMIPTQLPDPPGPSDQTPEATAEETLAAIMSFRNGSAGGLDGLTPQHYKDLVCGTVGETGRILLDAITRLVNLMLSGRVCEQILDILYGANLFALKKKDGGIRPIAVGNTIRRVVSKICCQHILPDLASKFQPVQLGFGTTGGCEAAVHATRTFLNNNAGEVLLKVDVRNAFNSLDRKALLTQVKEHVSPIYNYVSQCYNQSSKLLYQNTFINSAVGCQQGDPLGPAIFSLAIHPVISSLTSKLNIWYLDDGTVGGEATSVFNDLEIIINKFSELGLELNFSKCELFVSELLSQEDKNSIISKFNILAPDIRIVDKESLRLLGAPILDDAVPRFVSDQVAKFTHSSERMNKINPHMALCVIRHCLFVPQLTYTLRCSPIWKFPNLVDTLDTVLRQSLTTVLNCSFDDRSWSQATLPVRFGGLGVRKISSIALPAFLSSVYSTHVLFGNIISPSLGDVEASCLTEARNAWTLACPGRDLPIVLESQKSWDEPLCEQTQKNLLATSSNLADRARLLATGERESGFWLHAIPSANIGTLLDKTTFTLAICLRLGTKTNESHRCQCGASVDQLGHHGLSCRRSAGRWSRHGSLNDVIRRALATVNVPAVLEPNGIARDDGKRPDGMTLIPWQNGRSLVWDATCVDTLAASHIQSTAVTAGVAAATAERNKRRKYAALGEGYIFVPFGVETFGPWGPDARLLYKQIASRLVDASGDPRAGAYLGQRISLAIQRGNAASVLGTLPSDSDDLNKVFYLI

SEQ ID NO: 25600 - protein, 959 aa, Ypsolopha scabrella
MSQTAGPSTAAGSQSSLNDVQCPDCKKSYKGQRGLNIHRSKVHLNSQVTNSSPAAQGDTGIPHDKPFWQFLGDLKGNLPRVKRIPRGARTTVAASLSQCINSVVHDNSEDSWKHFLTFSYRTLHVRRNKDVKGSLTQKIKNNCKHSDNLNLSNTIDFQNNSYDIIKKIEAKVNDGDIRGAARLLFSDDAIAPDTPDTFSALTSKHPPQMIPTQLPDPPGPSDQTPEATAEETLAAIMSFRNGSAGGLDGLTPQHYKDLVCGTVGETGRILLDAITRLVNLMLSGRVCEQILDILYGANLFALKKKDGGIRPIAVGNTIRRVVSKICCQHILPDLASKFQPVQLGFGTTGGCEAAVHATRTFLNNNAGEVLLKVDVRNAFNSLDRKALLTQVKEHVSPIYNYVSQCYNQSSKLLYQNTFINSAVGCQQGDPLGPAIFSLAIHPVISSLTSKLNIWYLDDGTVGGEATSVFNDLEIIINKFSELGLELNFSKCELFVSELLSQEDKNSIISKFNILAPDIRIVDKESLRLLGAPILDDAVPRFVSDQVAKFTHSSERMNKINPHMALCVIRHCLFVPQLTYTLRCSPIWKFPNLVDTLDTVLRQSLTTVLNCSFDDRSWSQATLPVRFGGLGVRKISSIALPDFLSSVYSTHVLFGNIISPSLGDVEASCLTEARNAWTLACPGRDLPIVLESQKSWDEPLCEQTQKNLLATSSNLADRARLLATGERESGFWLHAIPSANIGTLLDKTTFTLAICLRLGTKTNESHRCQCGASVDQLGHHGLSCRRSAGRWSRHGSLNDVIRRALATVNVPAVLEPNGIARDDGKRPDGMTLIPWQNGRSLVWDATCVDTLAASHIQSTAVTAGVAAATAERNKRRKYAALGEGYIFVPFGVETFGPWGPDARLLYKQIASRLVDASGDPRAGAYLGQRISLAIQRGNAASVLGTLPSDSDELNKVFYLI

SEQ ID NO: 25601 - protein, 959 aa, Ypsolopha scabrella
MSQTAGPSTAAGSQSSLNDVQCPDCKKSYKGQRGLNIHRSKVHLNSQVTNSSPAAQGDTGIPHDKPFWQFLGDLKGNLPRVKRIPRGARTTVAASLSQCINSVVHDNSEDSWKHFLTFSYRTLHVRRNKDVKGSLTQKIKNNCKHSDNLNLSNTNDFQNNSYDIIKKIEAKVNDGDIRGAARLLFSDDAIAPDTPDTFSALTSKHPPQMIPIQLPDPPGPSDQTPEATAEETLAAIMSFRNGSAGGLDGLTPQHYKDLVCGTVGETGRILLDAITRLVNLMLSGRVCEQILDILYGANLFALKKKDGGIRPIAVGNTIRRVVSKICCQHILPDLASKFQPVQLGFGTTGGCEAAVHATRTFLNNNAGEVLLKVDVRNAFNSLDRKALLTQVKEHVSPIYNYVSQCYNQSSKLLYQNTFINSAVGCQQGDPLGPAIFSLAIHPVISSLTSKLNIWYLDDGTVGGEATSVFNDLEIIINKFSELGLELNFSKCELFVSELLSQEDKNSIISKFNILAPDIRIVDKESLRLLGAPILDDAVPRFVSDQVAKFTHSSERMNKINPHMALCVIRHCLFVPQLTYTLRCSPIWKFPNLVDTLDTVLRQSLTTVLNCSFDDRSWSQATLPVRFGGLGVRKISSIALPAFLSSVYSTHVLFGNIISPSLGDVEASCLTEARNAWTLACPGRDLPIVLESQKSWDEPLCEQTQKNLLATASNLADRARLLATGERESGFWLHAIPSANIGTLLDKTTFTLAICLRLGTKTNESHRCQCGASVDQLGHHGLSCRRSAGRWSRHGSLNDVIRRALATVNVPAVLEPNGIARDDGKRPDGMTLIPWQNGRSLVWDATCVDTLAASHIQSTAVTAGVAAATAERKKRRKYAALGEGYIFVPFGVETFGPWGPDARLLYKQIASRLVDASGDPRAGAYLGQRISLAIQRGNAASVLGTLPSDSDDLNKVFYLI

SEQ ID NO: 25602 - protein, 959 aa, Ypsolopha scabrella
MSQTAGPSTAAGSQSSLNDVQCPDCMKSYKGQRGLNIHRSKVHLNSQVTNSSPAAQGDTGIPHDKPFWQFLGDLKGNLPRVKRIPRGARTTVAASLSQCINSVVHDNSEDSWKHFLTFSYRTLHVRRNKDVKGSLTQKIKNNCKHSDNLNLSNTIDFQNNSYDIIKKIEAKVNDGDIRGAARLLFSDDAIAPDTPDTFSALTSKHPPQMIPTQLPDPPGPSDQTPEATAEETLAAIMSFRNGSAGGLDGLTPQHYKDLVCGTVGETGRILLDAITRLVNLMLSGRVCEQILDILYGANLFALKKKDGGIRPIAVGNTIRRVVSKICCQHILPDLASKFQPVQLGFGTTGGCEAAVHATRTFLNNNAGEVLLKVDVRNAFNSLDRKALLTQVKEHVSPIYNYVSQCYNQSSKLLYQNTFINSAVGCQQGDPLGPAIFSLAIHPVISSLTSKLNIWYLDDGTVGGEATSVFNDLEIIINKFSELGLELNFSKCELFVSELLSQEDKNSIISKFNILAPDIRIVDKESLRLLGAPILDDAVPRFVSDQVAKFTHSSERMNKINPHMALCVIRHCLFVPQLTYTLRCSPIWKFPNLVDTLDTVLRQSLTTVLNCSFDDRSWSQATLPVRFGGLGVRKISSIALPAFLSSVYSTHVLFGNIISPSLGDVEASCLTEARNAWTLACPGRDLPIVLESQKSWDEPLCEQTQKNLLATSSNLADRARLLATGERESGFWLHAIPSANIGTLLDKTTFTLAICLRLGTKTNESHRCQCGASVDQLGHHGLSCRRSAGRWSRHGSLNDVIRRALATVNVPAVLEPNGIARDDGKRPDGMTLIPWQNGRSLVWDATCVDTLAASHIQSTAVTAGVAAATAERNKRRKYAALGEGYIFVPFGVETFGPWGPDARLLYKQIASRLVDASGDPRAGAYLGQRISLAIQRGNAASVLGTLPSDSDDLNKVFYLI

SEQ ID NO: 25603 - protein, 959 aa, Ypsolopha scabrella
MSQTAGPSTAAGSQSSLNDVQCPDCKKSCKGQRGLNIHRSKVHLNSQVTNSSPAAQGATGIPHDKPFWQFLGDLKGNLPRVKRIPRGARTTVAASLSQCINSVVHDNSEDSWKHFLTFSYRTLHVRRNKDVKGSLTQKIKNNCKHSDNLNLSNTIDFQNNSYDIIKKIEAKVNDGDIRGAARLLFSDDAIAPDTPDTFSALTSKHPPQIIPTQLPDPPGPSDQTPEATAEETLTAIMSFRNGSAGGLDGLTPQHYKDLVCGTVGETGRILLDAITRLVNLMLSGRVCEQILDILYGANLFALKKKDGGIRPIAVGNTIRRVVSKICCQHILPDLASKFQPVQLGFGTTGGCEAAVHATRTFLNNNAGEVLLKVDVRNAFNSLDRKALLTQVKENVSPIYNYVSQCYNQSSKLLYQNTFINSAVGCQQGDPLGPAIFSLAIHPVISSLTSKLNIWYLDDGTVGGEATSVFNDLEIIINKFSELGLELNFSKCELFVSELLSQEDKNSIISKFNILSPDIRIVDKESLRLLGAPILDDAVPRFVSDQVAKFTHSSERMNKINPHMALCVIRHCLFVPQLTYTLRCSPIWKFPNLVDTLDTVLRQSLTTVLNCSFDDRSWSQATLPVRFGGLGVRKISSIALPAFLSSVYSTHVLFGNIISPSLGDVEASCLMEARNAWTLACPGRDLPIVLESQKSWDEPLCEQTQKNLLATASNLADRARLLATGERESGFWLHAIPSANIGTLLDKTTFTLAICLRLGTKTNESHRCQCGASVDQLGHHGLSCRRSAGRWSRHGSLNDVIRRALATVNVPAVLEPNGIARDDGKRPDGMTLIPWQNGRSLVWDVTCVDTLAASHIQSTAVTAGVAAATAERNKRRKYAALGEGYIFVPFGVETFGPWGPDARLLYKQIASRLVDASGDPRAGAYLGQRISLAIQRGNAASVLGTLPSDSDDLNKVFYLI

SEQ ID NO: 25604 - protein, 959 aa, Ypsolopha scabrella
MSQTAGPSTAAGSQSSLNDVQCPDCKKSYKGQRGLNIHRSKVHLNSQVTNSSPAAQGDTGIPHDKPFWQFLGDLKGNLPLVKRIPRGARTTVAASLSQCINSVVHDNSEDSWKHFLTFSYRTLHVRRNKDVKGSLAQKIKNNCKHSDNLNLSNTIDFQNNSYDIIKKIEAKVNDGDIRGAARLLFSDDAIAPDTPDTFSALTSKHPPQMIPTQLPDPPGPSDQTPEATAEETLAAIMSFRNGSAGGLDGLTPQHYKDLVCGTLGETGRILLDAITRLVNLMLSGRVCEQILDILYGANLFALKKKDGGIRPIAVGNTIRRVVSKICCQHILPDLASKFQPVQLGFGTTGGCEAAVHATRTFLNNNAGEVLLKVDVRNAFNSLDRKALLTQVKEHVSPIYNYVSQCYNQSSKLLYQNTFINSAVGCQQGDPLGPAIFSLAIHPVISSLTSKLNIWYLDDGTVGGEATSVFNDLEIIINKFSELGLELNFSKCELFVSELLSQEDKNSIISKFYILAPDIRIVDKESLRLLGAPILDDAVPRFVSDQVAKFTHSSERMNKINPHMALCVIRHCLFVPQLTYTLRCSPIWKFPNLVDTLDTVLRQSLTTVLNCSFDDRSWSQATLPVRFGGLGVRKISSIALPAFLSSVYSTHVLFGNIISPSLGDVEASCLTEARNAWTLACPGRDLPIVLESQKSWDEPLCEQTQKNLLATASNLADRARLLATGERESGFWLHAIPSANIGTLLDKTTFTLAICLRLGTKTNESHRCQCGASVDQLGHHGLSCRRSAGRWSRHGSLNDVIRRALATVNVPAVLEPNGIARDDGKRPDGMTLIPWQNGRSLVWDATCVDTLAASHIQSTAVTAGVAAATAERNKRRKYAALGEGYIFVPFGVETFGPWGPDARLLYKQIASRLVDASGDPRAGAYLGQRISLAIQRGNAASVLGTLPSDSDDLNKVFYLI

SEQ ID NO: 25605 - protein, 959 aa, Ypsolopha scabrella
MSQTAGPSTAAGSQSSLNDVQCPDCKKSYKGQRGLNIHRSKVHLNSQVTNSSPAAQGDTGIPHDKPFWQFLGDLKGNLPRVKRIPRGARTTVAASLSQCINSVVHDNSEDSWKHFLTFSYRTLHVRRNKDVKGSLTQKIKNNCKHSDNLNLSNTIDFQNNSYDIIKKIEAKVNDGDIRGAARLLFSDDAIAPDTPDTFSALTSKHPPQMIPTQLPDPPGPSDQTPEATAEETLAAIMSFRNGSAGGLDGLTPQHYKDLVCGTVGETGRILLDAITRLVNLMLSGRVCEQILDILYGANLFALKKKDGGIRPIAVGNTIRRVVSKICCQHILPDLASKFQPVQLGFGTTGGCEAAVHATRTFLNNNAGEVLLKVDVRNAFNSLDRKALLTQVKEHVSPIYNYVSQCYNQSSKLLYQNTFINSAVGCQQGDPLGPAIFSLAIHPVISSLTSKLNIWYLDDGTVGGEATSVFNDLEIIINKFSELGLELNFSKCELFVSELLSQEDKNSIISKFNILAPDIRIVDKESLRLLGAPILDDAVPRFVSDQVAKFTHSSERMNKINPRMALCVIRHCLFVPQLTYTLRCSPIWKFPNLVDTLDTVLRQSLTTVLNCSFDDRSWSQATLPVRFGGLGVRKISSIALPAFLSSVYSTHVLFGNIISPSLGDVEASCLTEARNAWTLACPGRDLPIVLESQKSWDEPLCEQTQKNLLATSSNLADRARLLATGERESGFWLHAIPSANIGTLLDKTTFTLAICLRLGTKTNESHRCQCGASVDQLGHHGLSCRRSAGRWSRHGSLNDVIRRALATVNVPAVLEPNGIARDDGKRPDGMTLIPWQNGRSLVWDATCVDTLAASHIQSTAVTAGVAAATAERNKRRKYAALGEGYIFVPFGVETFGPWGPDARLLYKQIASRLVDASGDPRAGAYLGQRISLAIQRGNAASVLGTLPSDSDDLNKVFYLI

SEQ ID NO: 25606 - protein, 959 aa, Ypsolopha scabrella
MSQTAGPSTAAGSQSSLNDVQCPDCKKSYKGQRGLNIHRSKVHLNSQVTNSSPAAQGDTGIPHDKPFWQFLGDLKGNLPRVKRIPRGARTTVAASLSQCINSVVNDNSEDSWKHFLTFSYRTLHVRRNKDVKGSLTQKIKNNCKHSDNLNLSNTIDFQNNSYDIIKKIEAKVNDGDIRGAARLLFSDDAIAPDTPDTFSALTSKHPPQMIPTQLPDPPGPSDQTPEATAEETLAAIMSFRNGSAGGLDGLTPQHYKDLVCGTVGETGRILLDAITRLVNLMLSGRVCEQILDILYGANLFALKKKDGGIRPIAVGNTIRRVVSKICCQHILPDLASKFQPVQLGFGTTGGCEAAVHATRTFLNNNAGEVLLKVDVRNAFNSLDRKALLTQVKEHVSPIYNYVSQCYNQSSKLLYQNTFINSAVGCQQGDPLGPAIFSLAIHPVISSLTSKLNIWYLDDGTVGGEATSVFNDLEIIINKFSELGLELNFSKCELFVSELLSQEDKNSIISKFNILAPDIRIVDKESLRLLGAPILDDAVPRFVSDQVAKFTHSSERMNKINPHMALCVIRHCLFVPQLTYTLRCSPIWKFPNLVDTLDTVLRQSLTTVLNCSFDDRSWSQATLPVRFGGLGVRKISSIALPAFLSSVYSTHVLFGNIISPSLGDVEASCLTEARNAWTLACPGRDLPIVLESQKSWDEPLCEQTQKNLLATSSNLADRARLLATGERESGFWLHAIPSANIGTLLDKTTFTLAICLRLGTKTNESHRCQCGASVDQLGHHGLSCRRSAGRWSRHGSLNDVIRRALATVNVPAVLEPNGIARDDGKRPDGMTLIPWQNGRSLVWDATCVDTLAASHIQSTAVTAGVAAATAERNKRRKYAALGEGYIFVPFGVETFGPWGPDARLLYKQIASRLVDASGDPRAGAYLGQRISLAIQRGNAASVLGTLPSDSDDLNKVFYLI

SEQ ID NO: 25607 - protein, 959 aa, Ypsolopha scabrella
MSQTAGPSTAAGSQSSLNDVQCPDCKKSYKGQRGLNIHRSKVHLNSQVTNSSPAAQGDTGIPHDKPFWQFLGDLKGNLPRVKRIPRGARTTVAASLSQCINSVVHDNSEDSWKHFLTFSYRTLHVRRNKDVKGSLTQKIKNNCKNSDNLNLSNTIDFQNNSYDIIKKIEAKVNDGDIRGAARLLFSDDAIAPDTPDTFSALTSKHPPQMIPTQLPDPPGPSDQTPEATAEETLAAIMSFRNGSAGGLDGLTPQHYKDLVCGTVGETGRILLDAITRLVNLMLSGRVCEQILDILYGANLFALKKKDGGIRPIAIGNTIRRVVSKICCQHILPDLASKFQPVQLGFGTTGGCEAAVHATRTFLNNNAGEVLLKVDVRNAFNSLDRKALLTQVKEHVSPIYNYVSQCYNQSSKLLYQNTFINSAVGCQQGDPLGPAIFSLAIHPVISSLTSKLNIWYLDDGTVGGEATSVFNDLEIIINKFSELGLELNFSKCELFVSELLSQEDKNSIISKFNILAPDIRIVDKESLRLLGAPILDDAVPRFVSDQVAKFTHSSERMNKINPHMALCVIRHCLFVPQLTYTLRCSPIWKFPNLVDTLDTVLRQSLTTVLNCSFDDRSWSQATLPVRFGGLGVRKISSIALPAFLSSVYSTHVLFGNIISPSLGDVEASCLTEARNAWTLACPGRYLPIVLESQKSWDEPLCEQTQKNLLATASNLADRARLLATGERESGFWLHAIPSANIGTLLDKTTFTLAICLRLGTKTNESHHCQCGASVDQLGHHGLSCRRSAGRWSRHGSLNDVIRRALATVNVPAVLEPNGIARDDGKRPDGMTLIPWQNGRSLVWDATCVDTLAASHIQSTAVTAGVAAATAERNKRRKYAALGEGYIFVPFGVETFGPWGPDARLLYKQIASRLVDASGDPRAGAYLGQRISLAIQRGNAASVLGTLPSDSDDLNKVFYLI

SEQ ID NO: 25608 - protein, 960 aa, Ypsolopha scabrella
MSQTDGPCAPASSQSQQSAEDRLQCPDCLKTFKGQRGLNIYKGKLHRLLSQNTGIVSLNPQNHKPPLSERLGKLKNNIQVIKRIPRGARITVAASLSQSIKNVILYNDSQNWENLLTFAYRTLHVSRGRDSPGSLTQKIKDNCKEPGDLDLDITKTKPHKPPSINIIKKIEGKVNDVDIKGAAQLLFSDDCMAPDTSDTLAALASKHPLPAMGTQLPDPPNPLDRTPETTAEETLAAIMSFRNGSAGGLDGLTLQHLKDLLSKTVGETGRTLLDDITRLANLMLSGKVCEEITDILYGANLIALKKKDGGIRPIAVGNTIRRIVSKICCIHILPELSAKFQPVQLGFGCRGGCEAAVHAARTFLADDSSELLLKVDVCNAFISVGRDALLTQVKENSPAIYNYIYQCYSKPTKLIYKNEILQSATGCQQGDPLGPAIFSLAIHPVITTLNSKFNVWYLDDGTIGGDAITVLNDLQSITHQFQQLGLQLNFSKCELFLSDSTSTEEKNDIFLKFKNLAPDIKILDKQSLRLLGAPIHEESIPAYVNKQISRFIASSERLLKINPHMALFIIRYCLFVPNLTYVLRCSFMWKFNTLLKLLDNTIAQTLSSLLNCSFTERSWDQATLPVRFGGLGIRKISSVALPAFLSSINGTNALFGNIISPSLGDVEALGLTKARDAWTLACPGEALPIVLNSQKLWDEPLCKKLQQNLLETAVNPVERARLLAVGEHEAGYWLQAMPSASIGTLLDKTTFSMAVCLRLGIPVNVPHRCQCGTSVDELGHHGLSCRRSAGRLSRHASINDVIRRALATVKVPAILEPQGIARDDGKRPDGMTLVPWKNGHSLVWDATCVDTLAPSHTPATATKAGAAAATAESAKRRKYGALGASYIFAPFGVETPGPWGPEARRLFHDLSSRLVDASDDPRAGAYLGQRISLAIQRGNAASVLGALPFGSDLEKDFYLI

SEQ ID NO: 25609 - protein, 959 aa, Ypsolopha scabrella
MSQTAGPSTAAGSQSSLNDVQCPDCKKSYKGQRGLNIHRSKVHLNSQVTNSSPAAQGDTGIPHDKPFWQFLGDLKGNLPRVKRIPRGARTTVAASLSQCINSVVHDNSEDSWKHFLTFSYRTLHVRRNKDVKGSLTQKIKNNCKHSDNLNLSNTIDFQNNSYDIIKKIEAKVNDGDIRGAARLLFSDDAIAPDTPDTFSALTSKHPPQMIPIQLPDPPGPSDQTPEATAEETLAAIMSFRNGSAGGLDGLTPQHYKDLVCGTVGETGRILLDAITRLVNLMLSGRVCEQILDILYGANLFALKKKDGGIRPIAVGNTIRRVVSKICCQHILPDLASKFQPVQLGFGTTGGCEAAVHATRTFLNNNAGEVLLKVDVRNAFNSLDRKALLTQVKEHVSPIYNYVSQCYNQSSKLLYQNTFINSAVGCQQGDPLGPAIFSLAIHPVISSLTSKLNIWYLDDGTVGGEATSVFNDLEIIINKFSEIGLELNFSKCELFVSELLSQEDKNSIISKFNILAPDIRIVDKESLRLLGAPILDDAVPRFVSDQVAKFTHSSERMNKINPHMALCVIRHCLFVPQLTYTLRCSPIWKFPNLVDTLDTVLRQSLTTVLNCSFDDRSWSQATLPVRFGGLGVRKISSIALPAFLSSVYTTHVLFGNIISPSLGDVEASCLTEARNAWTLACPGRDLPIVLESQKSWDEPLCEQTQKNLLATASNLADRARLLATGERESGFWLHAIPSANIGTLLDKTTFTLAICLRLGTKTNESHRCQCGASVDQLGHHGLSCRRSAGRWSRHGSLNDVIRRALATVNVPAVLEPNGIARDDGKRPDGMTLIPWQNGRSLVWDATCVDTLAASHIQSTAVTAGVAAATAERKKRRKYAALGEGYIFVPFGVETFGPWGPDARLLYKQIASRLVDASGDPRAGAYLGQRISLAIQRGNAASVLGTLPSDSDDLNKVFYLI

SEQ ID NO: 25610 - protein, 960 aa, Ypsolopha scabrella
MSQTDGPCAPASSQNQQSAEDRLQCPDCLKTFKGQRGLNIHKGKLHRLLSQNTGIVSLNPQNHKPPLSERLGKLKNNIQVIKRIPRGARITVAASLSQSIKNVILYNDSQNWENLLTFAYRTLHVSRGRDSPGSLTQKIKDNCKEPGDLDLDITKTKPHKPPSINIIKKIEGKVNDGDIKGAAQLLFSDDCMAPDTSDTLAALASKHPLPAMGTQLPDPPNPSDRTPETTAEETLAAIMSFRNGSAGGLDGLTPQHLKDLLSKTVGETGRTLLDDITRLANLMLSGKVCEEITDILYGANLIALKKKDGGIRPIAVGNTIRRIVSKICCIHILPELSAKFQPVQLGFGCRGGCEAAVHAARTFLADDSSELLLKVDVCNAFNSVGRDALLTQVKENSPAIYNYIYQCYSKPTKLIYKNEILQSATGCQQGDPLGPAIFSLAIHPVITTLNSKFNVWYLDDGTIGGDAITVLNDLQSITHQFQQLGLQLNFSKCELFLSDSISTEEKNDIFLKFKNLAPDIKILDKQSLRLLGAPIHEESIPAYVNEQISRFIASSERLLKINPHMALFIIRYCLFVPNLTYVLRCSFMWKFNTLLKLLDNTIAQTLSSLLNCSFTERSWDQATLPVRFGGLGIRKISSVALPAFLSSINGTNALFGNIISPSLGDVEALGLTEARDAWTLACPGEALPIVLNSQKLWDEPLCRKLQQNLLETAVNPVERARLLAVGEHEAGYWLQALPSTSIGTLLDKTTFSMAVCLRLGIPVNVPHRCQCGTSVDELGHHGLSCRRSAGRLSRHASINDVIRRALATVNVPAILEPQGIARDDGKRPDGMTLVPWKNGHSLVWDATCVDTLAPSHIPATATKAGAAAATAELAKRRKYGALGASYIFAPFGVETLGPWGPEARRLFHDLSSRLVDASGDPRAGAYLGQRISLAIQRGNAASVLGALPFGSDLEKVFYLI

SEQ ID NO: 25611 - protein, 959 aa, Ypsolopha scabrella
MSQTAGPSTAAGSQSSLNDVQCPDCKKSYKGQRGLNIHRSKVHLNSQVTNSSPAAQGDTGIPHDKPFWQFLGDLKGNLPRVKRIPRGARTTVAASLSQCINSVVHDNSEDSWKHFLTFSYRTLHVRRNKDVKGSLTQKIKNNCKHSDNLNLSNTIDFQNNSYDIIKKIEAKVNDGDIRGAARLLFSDDAIAPDTPDTFSALTSKHPPQMIPIQLPDPPGPSDQTPEATAEETLAAIMSFRNGSAGGLDGLTPQHYKDLVCGTVGETGRILLDAITRLVNLMLSGRVCEQILDILYGANLFALKKKDGGIRPIAVGNTIRRVVSKICCQHILPDLASKFQPVQLGFGTTGGCEAAVHATRTFLNNNAGEVLLKVDVRNAFNSLDRKALLTQVKEHVSPIYNYVSQCYNQSSKLLYQNTFINSAVGCQQGDPLGPAIFSLAIHPVISSLTSKLNIWYLDDGTVGGEATSVFNDLEIIINKFSELGLELNFSKCELFVSELLSQEDKNSIISKFNILAPDIRIVDKESLRLLGAPILDDAVPRFVSDQVAKFTHSSERMNKINPHMALCVIRHCLFVPQLTYTLRCSPIWKFPNLVDTLDTVLRQSLTTVLNCSFDDRSWSQATLPVRFGGLGVRKISSIALPAFLSSVYSTHVLFGNIISPSLGDVEASCLTEARNAWTLACPSRDLPIVLESQKSWDEPLCEQTQKNLLATASNLADRARLLATGERESGFWLHAIPSANIGTLLDKTTFTLAICLRLGTKTNESHRCQCGASVDQLGHHGLSCRRSAGRWSRHGSLNDVIRRALATVNVPAVLEPNGIARDDGKRPDGMTLIPWQNGRSLVWDATCVDTLAASHIQSTAVTAGVAAATAERKKRRKYAALGEGYIFVPFGVETFGPWGPDARLLYKQIASRLVDASGDPRAGAYLGQRISLAIQRGNAASVLGTLPSDSDDLNKVFYLI

SEQ ID NO: 25612 - protein, 959 aa, Ypsolopha scabrella
MSQTAGPSTAAGSQSSLNDVQCPDCKKSYKGQRGLNIHRSKVHLNSQVTNSSPAAQGDTGIPHDKPFWQFLGDLKGNLPRVKRIPRGARTTVAASLSQCINSVVHDNSEDSWKHFLTFSYRTLHVRRNKDVKGSLTQKIKNNCKHSDNLNLSNTNDFQNNSYDIIKKIEAKVNDGDIRGAARLLFSDDAIAPDTPDTFSALTSKHPPQMIPIQLPDPPGPSDQTPEATAEETLAAIISFRNGSAGGLDGLTPQHYKDLVCGTVGETGRILLDAITRLVNLMLSGRVCEQILDILYGANLFALKKKDGGIRPIAVGNTIRRVVSKICCQHILPDLASKFQPVQLGFGTTGGCEAAVHATRTFLNNNAGEVLLKVDVRNAFNSLDRKALLTQVKEHVSPIYNYVSQCYNQSSKLLYQNTFINSAVGCQQGDPLGPAIFSLAIHPVISSLTSKLNIWYLDDGTVGGEATSVFNDLEIIINKFSELGLELNFSKCELFVSELLSQEDKNSIISKFNILAPDIRIVDKESLRLLGAPILDDAVPRFVSDQVAKFTHSSERMNKINPHMALCVIRHCLFVPQLTYTLRCSPIWKFPNLVDTLDTVLRQSLTTVLNCSFDDRSWSQATLPVRFGGLGVRKISSIALPAFLSSVYSTHVLFGNIISPSLGDVEASCLTEARNAWTLACPGRDLPIVLESQKSWDEPLCEQTQKNLLATASNLADRARLLATGERESGFWLHAIPSANIGTLLDKTTFTLAICLRLGTKTNESHRCQCGASVDQLGHHGLSCRRSAGRWSRHGSLNDVIRRALATVNVPAVLEPNGIARDDGKRPDGMTLIPWQNGRSLVWDATCVDTLAASHIQSTAVTAGVAAATAERKKRRKYAALGEGYIFVPFGVETFGPWGPDARLLYKQIASRLVDASGDPRAGAYLGQRISLAIQRGNAASVLGTLPSDSDDLNKVFYLI

SEQ ID NO: 25613 - protein, 960 aa, Ypsolopha scabrella
MSQTDGPCAPASSQSQQSAEDRLQCPDCLKTFKGQRGLNIHKGKLHRLLSQNTGIVSLNPQNHKPPLSERLGKLKNNIQVIKRIPRGARITVAASLSQSIKNVILYNDSQNWENLLTFAYRTLHVSRGRDSPGSLTQKIKDNCKEPGDLDLDITKTKPHKPPSNNIIKKIEGKANDGDIKGAAQLLFSDDCMAPDTSDTLAALASKHPLPAMGTQLPDPPNPSDRTPETTAEETLAAIMSFRNGSAGGLDGLTPQHLKDLLSKTVGETGRTLLDDITRLANLMLSGKVCEEITDILYGANLIALKKKDGGIRPIAVGNTIRRIVSKICCIHILPELSAKFQPVQLGFGCRGGCEAAVHAARTFLADDSSELLLKVDVCNAFNSVGRDALLTQVKENSPAIYNYIYQCYSKPTKLIYKNEILQSATGCQQGDPLGPAIFSLAIHPVITTLNSKFNVWYLDDGTIGGDAITVLNDLQSITHQFQQLGLQLNFSKCELFLSDSISTEEKNDIFLKFKNLAPDIKILDKQSLRLLGAPIHEESIPAYVNEQISRFIASSERLLKINPHMALFIIRYCLFVPNLTYVLRCSFMWKFNTLLKLLDNTIAQTLSSLLNCSFTERSWDQATLPVRFGGLGIRKISSVALPAFLSSINGTNALFGNIISPSLGDVEALGLTEARDAWTLACPGEALPIVLNSQKLWDEPLCRKLQQNLLETAVNPVERARLLAVGEHEAGYWLQAMPSTSIGTLLDKTTFSMAVCLRLGIPVNVPHRCQCGTSVDELGHHGLSCRRSAGRLSRHASINDVIRRALATVNVPAILEKQGIARDDGKRPDGMTLVPWKNGHSLVWDATCVDTLAPSHIPATATKAGAAAATAELAKRRKYGALGASYIFAPFGVETLGPWGPEARRLFHDLSSRLVDASGDPRAGAYLGQRISLAIQRGNAASVLGALPFGSDLEKVFYLI

SEQ ID NO: 25614 - protein, 959 aa, Ypsolopha scabrella
MSQTAGPSTAAGSQSSLNDVQCPDCKKSYKGQRGLNIHRSKVHLNSQVTNSSPAAQGDTGIPHDKPFWQFLGDLKGNLPRVKRIPRGARTTVAASLSQCINSVVHDNSEDSWKHFLTFSYRTLHVRRNKDVKGSLTQKIKNNCKHSDNLNLSNTIDFQNNSYDIIKKIEAKVNDGDIRGAARLLFSDDAIAPDTPDTFSALTSKHPPQMIPIQLPDPPGPSDQTPEATAEETLAAIMSFRNGSAGGLDGLTPQHYKDLVCGTVGETGRILLDAITRLVNLMLSGRVCEQILDILYGANLFALKKKDGGIRPIAVGNTIRRVVSKICCQHILPDLASKFQPVQLGFGTTGGCEAAVHATRTFLNNNAGEVLLKVDVRNAFNSLDRKALLTQVKEHVSPIYNYVSQCYNQSSKLLYQNTFINSAVGCQQGDPLGPAIFSLAIHPVISSLTSKLNIWYLDDGTVGGEATSVFNDLEIIINKFSELGLELNFSKCELFVSELLSQEDKNSIISKFNILAPDIRIVDKESLRLLGAPILDDAVPRFVSDQVAKFTHSSERMNKINPHMALCVIRHCLFVPQLTYTLRCSPIWKFPNLVDTLDTVLRQSLTTVLNCSFDDRSWSQATLPVRFGGLGVRKISSIALPAFLSSVYTTHVLFGNIISPSLGDVEASCLTEARNAWTLACPGRDLPIVLESQKSWDEPLCEQTQKNLLATASNLADRARLLATGERESGFWLHAIPSANIGTLLDKTTFTLAICLRLGTKTNESHRCQCGASVDQLGHHGLSCRRSAGRWSRHGSLNDVIRRALATVNVPAVLEPNGIARDDGKRPDGMTLIPWQNGRSLVWDATCVDTLAASHIQSTAVTAGVAAATAERKKRRKYAALGEGYIFVPFGVETFGPWGPDARLLYKQIASRLVDASGDPRAGAYLGQRISLAIQRGNAASVLGTLPSDSDDLNKVFYLI

SEQ ID NO: 25615 - protein, 769 aa, Ypsolopha scabrella
MAPDTSDTLAALASKHPLPAMGTQLPDPPNPSDRTPETTAEETLAAIMSFRNGSAGGLDGLTPQHLKDLLSKTVGETGRTLLDDITRLANLMLSGKVCEEITDILYGANLIALKKKDGGIRPIAVGNTIRRIVSKICCIHILPELSAKFQPVQLGFGCRGGCEAAVHAARTFLADDSSELLLKVDVCNAFNSVGRDALLTQVKENSPAIYNYIYQCYSKPTKLIYKNEILQSATGCQQGDPLGPAIFSLAIHPVITTLNSKFNVWYLDDGTIGGDAITVLNDLQSIIHQFQQLGLQLNFSKCELFLSDSISTEEKNDIFLKLKNLAPDIKILDKQSLRLLGAPIHEESIPAYVNEQISRFIASSERLLKINPHMALFIIRYCLFVPNLTYVLRCSFMWKFNTLLKLLDNTIAQTLSSLLNCSFTERSWDQATLPVRFGGLGIRKISSVALPAFLSSINGTNALFGNIISPSLGDVEALGLTEARDAWTLACPGEALPIVLNSQKLWDEPLCRKLQQNLLETAVNPVERARLLAVGEHEAGYWLQAMPSTSIGTLLDKTTFSMAVCLRLGIPVNVPHRCQCGTSVDELGHHGLSCRRSAGRLSRHASINDVIRRALATVNVPAILEPQGIARDDGKRPDGMTLVPWKNGHSLVWDATCVDTLAPSHIPATATKAGAAAATAELAKRRKYGALGASYIFAPFGVETLGPWGPEARRLFHDLSSRLVDASGDPRAGAYLGQRISLAIQRGNAASVLGALPFGSDLEKVFYLI

SEQ ID NO: 25616 - protein, 960 aa, Ypsolopha scabrella
MSQTDGPCAPASSQSQQSAEDRLQCPDCLKTFKGQRGLNIHKGKLHRLLSQNTGIVSLNPQNHKPPLSERLGKLKNNIQVIKRIPRGARITVATSLSQSIKNVILYNDSQNWENLLTFAYRTLHVSRGRDSPGSLTQKIKDNCKEPGDLDLDITKTKPHKPPSINIIKKIEGKVNDGDIKGAAQLIFSDDCMAPDTSDTLAALASKHPLPAMGTQLPDPLNPSDRTPETTAEETLAAIMSFRNGSAGGLDGLTPQHLKDLLSKTVGETGRTLLDDITRLANLMLSGKVCEEITDILYGANLIALKKKDGGIRPIAVGNTIRRIVSKICCIHILPALSAKFQPVQLGFGCRGGCEAAVHAARTFLADDSSELLLKVDVCNAFNSVGRDALLTQVKENSPAIYNYIYQCYSKPTKLIYKNEILQSATGCQQGDPLGPAIFSLAIHPVITTLNSKFNVWYLDDGTIGGNAITVFNDLQSITHQFQQLGLQLNFSKCELFLSDSISTEEKNDIFLKFKNLAPDIKILDKQSLRLLGAPIHEESIPAYVNEQISRFIASSERLLKINPHMALFIIRYCLFVPNLTYVLRCSFMWKFNTLLKLLDNTIAQTLSSLLNCSFTERSWDQATLPVRFGGLGIRKISSVALPAFLSSINGTNALFGNIISPSLGDVEALGLTEARDAWTLACPGEALPIVLNSQKLWDEPLCRKLQQNLLETAVNPVERARLLAVGEHEAGYWLQAMPSTSIGTLLDKTTFSMAVCLRLGIPVNVPHRCQCGTSVDELGHHGLSCRRSAGRLSRHASINDVIRRALATVNVPAILEPQGIARDDGKRPDGMTLVPWKNGHSLVWDATCVDTLAPSHIPATATKAGAAAATAELAKRRKYGALGASYIFAPFGVETLGPWGPEARRLFHDLSSRLVDASGDPRAGAYLGQRISLAIQRGNAASVLGALPFGSDLEKVFYLI

SEQ ID NO: 25617 - protein, 959 aa, Ypsolopha scabrella
MSQTAGPSTAAGSQSSLNDVQCPDCKKSYKGQRGLNIHRSKVHLNSQVTNSSPAAQGDTGIPHDKPFWQFLGDLKGNLPRVKRIPRGARTTVAASLSQCINSVVHDNSEDSWKHFLTFSYRTLHVRRNKDVKGSLTQKIKNNCKHSDNLNLSNTNDFQNNSYDIIKKIEAKVNDGDIRGAARLLFSDDAIAPDTPDTFSALTSKHPPQMIPIQLPDPPGPSDQTPEATAEETLAAIMSFRNGSARGLDGLTPQHYKDLVCGTVGETGRILLDAITRLVNLMLSGRVCEQILDILYGANLFALKKKDGGIRPIAVGNTIRRVVSKICCQHILPDLASKFQPVQLGFGTTGGCEAAVHATRTFLNNNAGEVLLKVDVRNAFNSLDRKALLTQVKEHVSPIYNYVSQCYNQSSKLLYQNTFINSAVGCQQGDPLGPAIFSLAIHPVISSLTSKLNIWYLDDGTVGGEATSVFNDLEIIINKFSELGLELNFSKCELFVSELLSQEDKNSIISKFNILAPDIRIVDKESLRLLGAPILDDAVPRFVSDQVAKFTHSSERMNKINPHMALCVIRHCLFVPQLTYTLRCSPIWKFPNLVDTLDTVLRQSLTTVLNCSFDDRSWSQATLPVRFGGLGVRKISSIALPAFLSSVYSTHVLFGNIISPSLGDVEASCLTEARNAWTLACPGRDLPIVLESQKSWDEPLCEQTQKNLLATASNLADRARLLATGERESGFWLHAIPSANIGTLLDKTTFTLAICLRLGTKTNESHRCQCGASVDQLGHHGLSCRRSAGRWSRHGSLNDVIRRALATVNVPAVLEPNGIARDDGKRPDGMTLIPWQNGRSLVWDATCVDTLAASHIQSTAVTAGVAAATAERKKRRKYAALGEGYIFVPFGVETFGPWGPDARLLYKQIASRLVDASGDPRAGAYLGQRISLAIQRGNAASVLGTLPSDSDDLNKVFYLI

SEQ ID NO: 25618 - protein, 959 aa, Ypsolopha scabrella
MSQTAGPSTAAGSQSSLNDVQCPDCKKSYKGQRGLNIHRSKVHLNSQVTNSSPAAQGATGIPHDKPFWQFLGDLKGNLPRVKRIPRGARTTVAASLSQCINSVVHDNSEDSWKHFLTFSYRTLHVRRNKDVKGSLTQKIKNNCKHSDNLNLSNTIDFQNNSYDIIKKIEAKVNDGDIRGAARLLFSDDAIAPDTPDTFSALTSKHPPQIIPTQLPDPPGPSDQTPEATAEETLTAIMSFRNGSAGGLDGLTPQHYKDLVCGTVGETGRILLDAITRLVNLMLSGRVCEQILDILYGANLFALKKKDGGIRPIAVGNTIRRVVSKICCQHILPDLASKFQPVQLGFGTTGGCEAAVHATRTFLNNNAGEVLLKVDVRNAFNSLDRKALLTQVKENVSPIYNYVSQCYNQSSKLLYQNTFINSAVGCQQGDPLGPAIFSLAIHPVISSLTSKLNIWYLDDGTVGGEATSAFNDLEIIINKFSELGLELNFSKCELFVSELLSQEDKNSIISKFNILAPDIRIVDKESLRLLGAPILDDAVPRFVSDQVAKFTHSSERMNKINPHMALCVIRHCLFVPQLTYTLRCSPIWKFPNLVDTLDTVLRQSLTTVLNCSFDDRSWSQATLPVRFGGLGVRKISSIALPAFLSSVYSTHVLFGNIISPSLGDVEASCLTEARNAWTLACPGRDLPIVLESQKSWDEPLCEQTQKNLLATASNLADRARLLATGERESGFWLHAIPSANIGTLLDKTTFTLAICLRLGTKTNESHHCQCGASVDQLGHHGLSCRRSAGRWSRHGSLNDVIRRALATVNVPAVLEPNGIARDDGKRPDGMTLIPWQNGRSLVWDATCVDTLAASHIQSTAVTAGVAAATAERNKRRKYAALGEGYIFVPFGVETFGPWGPDARLLYKQIASRLVDASGDPRAGAYLGQRISLAIQRGNAASVLGTLPSDSDDLNKVFYLI

SEQ ID NO: 25619 - protein, 959 aa, Ypsolopha scabrella
MSQTAGPSTAAGSQSSLNDVQCPDCKKSYKGQRGLNIHRSKVHLNSQVTNSSPAAQGDTGIPHDKPFWQFLGDLKGNLPRVKRIPRGARTTVAASLSQCINSVVHDNSEDSWKHFLTFSYRTLHVRRNKDVKGSLTQKIKNNCKHSDNLNLSNTIDFQNNSYDIIKKIEAKVNDGDIRGAARLLFSDDAIAPDTPDTFSALTSKHPPQMIPIQLPDPPGPSDQTPEATAEETLAAIMSFRNGSAGGLDGLTPQHYKDLVCGTVGETGRILLDAITRLVNLMLSGRVCEQILDILYGANLFALKKKDGGIRPIAVGNTIRRVVSKICCQHILPDLASKFQPVQLGFGTTGGCEAAVHATRTFLNNNAGEVLLKVDVRNAFNSLDRKALLTQVKEHVSPIYNYVSQCYNQSSKLLYQNTFINSAVGCQQGDPLGPAIFSLAIHPVISSLTSKLNIWYLDDGTVGGEATSVFNDLEIIINKFSELGLELNFSKCELFVSELLSQEDKNSIISKFNILAPDIRIVDKESLRLLGAPILDDAVPRFVSDQVAKFTHSSERMNKINPHMALCVIRHCLFVPQLTYTLRCSPIWKFPNLVDTLDTVLRQSLTTVLNCSFDDRSWSQATLPVRFGGLGVRKISSIALPAFLSSVYTTHVLFGNIISPSLGDVEASCLTEARNAWTLACPGRDLPIVLESQKSWDEPLCEQTQKNLLATASNLADRARLLATGERESGFWLHAIPSANIGTLLDKTTFTLAICLRLGTKTNESHRCQCSASVDQLGHHGLSCRRSAGRWSRHGSLNDVIRRALATVNVPAVLEPNGIARDDGKRPDGMTLIPWQNGRSLVWDATCVDTLAASHIQSTAVTAGVAAATAERKKRRKYAALGEGYIFVPFGVETFGPWGPDARLLYKQIASRLVDASGDPRAGAYLGQRISLAIQRGNAASVLGTLPSDSDDLNKVFYLI

SEQ ID NO: 25620 - protein, 959 aa, Ypsolopha scabrella
MSQTAGPSTAAGSLSSLNDVQCPDCKKSYKGQRGLNIHRSKVHLNSQVTNSSPAAQGDTGIPHDKPFWQFLGDLKGNLPRVKRIPRGARTTVAASLSQCINSVVHDNSEDSWKHFLTFSYRTLHVRRNKDVKGSLTQKIKNNCKHSDNLNLSNTIDFQNNSYDIIKKIEAKVNDGDIRGAARLLFSDDAIAPDTPDTFSALTSKHPPQMIPTQLPDPPGPSDQTPEATAEETLAAIMSFRNGSAGGLDGLTPQHYKDLVCGTVGETGRILLDAITRLVNLMLSGRVCEQILDILYGANLFALKKKDGGIRPIAVGNTIRRVVSKICCQHILPDLASKFQPVQLGFGTTGGCEAAVHATRTFLNNNAGEVLLKVDVRNAFNSLDRKALLTQVKEHVSPIYNYVSQCYNQSSKLLYQNTFINSAVGCQQGDPLGPAIFSLAIHPVISSLTSKLNIWYLDDGTVGGEATSVFNDLEIIINKFSELGLELNFSKCELFVSELLSQEDKNSIISKFNILAPDIRIVDKESLRLLGAPILDDAVPRFVSDQVAKFTHSSERMNKINPHMALCVIRHCLFVPQLTYTLRCSPIWKFPNLVDTLDTVLRQSLTTVLNCSFDDRSWSQATLPVRFGGLGVRKISSIALPAFLSSVYSTHVLFGNIISPSLGDVEASCLTEARNAWTLACPGRDLPIVLESQKSWDEPLCEQTQKNLLATSSNLADRARLLATGERESGFWLHAIPSANIGTLLDKTTFTLAICLRLGTKTNESHRCQCGASVDQLGHHGLSCRRSAGRWSRHGSLNDVIRRALATVNVPAVLEPNGIARDDGKRPDGMTLIPWQNGRSLVWDATCVDTLAASHIQSTAVTAGVAAATAERNKRRKYAALGEGYIFVPFGVETFGPWGPDARLLYKQIASRLVDASGDPRAGAYLGQRISLAIQRGNAASVLGTLPSDSDDLNKVFYLI

SEQ ID NO: 25621 - protein, 904 aa, Ypsolopha scabrella
MSQTAGPSTAAGSQSSLNDVQCPDCKKSYKGQRGLNIHRSKVHLNSQVTNSSPAAQGDTGIHHDKPFWQFLGDLKGNLPRVKRIPHGARTSVAASLSQCINSVVHDNSEDSWKHFLTFSYRTLHVRRNKDVKGSLTQKIKNNCKHSDNLNLSNTIDFQNNSYDIIKKIEAKVNDGDIRGAARLLFSDDAIAPDTPDTFSALMSKHPPQMIPTQLPDPPGPSDQTPEATAEETLAAIMSFRNGSAGGLDGLTPQHYKDLVCGTMGETGRILLDAITRLVNLMLSGRVCEQILDILYGANLFALKKEDGGIRPIAVGNTIRRVVSKICCQHILPDLASKFQPVQLGFGTTGGCEAAVHATRTFLNNNAGEVLLKVDVRNAFNSLDRKALLTQVKEHVSPIYNYISQCYNQSSKLLYQNTFINSAVGCQQGDPLGPAIFSLAIHPVISSLTSKLNIWYLDDGTVGGEATSVFNDLEIIINKFSELGLELNFSKCELFVSELLSQEDKNSIISKFNILAPDIRIVDKESLRLLGAPILDDAVPRFISDQVAKFTHSSERMNKINPHMALCVIRHCLFVPQLTYTLRCSPIWKFPNLVDTLDTVLRQSLTTVLNCSFDDRSWSQAKLPVRFGGLGVRKISSIALPAFLSSVYSTHVLFGNIISPSLGDVEASCLTEARNAWTLACPGRDLPIVLESQKSWDEPLCEQTQKNLLATASNLADRARLLATGERESGFWLHAIPSANIGTLLDKTTFTLAICLRLGTKTNESHRCQCGASVDQLGHHGLSCRRSAGHWSRHGSLNDVIRRALATVNVPAVLEPNGIARDDGKRPDGMTLIPGQNGRSLVWDATCVDTLAASHIQSTALTAGVAAATAERNKRRKYAALGEGYIFVPFGVETFGPWGPDARLL

SEQ ID NO: 25622 - protein, 960 aa, Ypsolopha scabrella
MSQTDGPCAPASSQSQQSAEDRLQCPDCLKTFKGQRGLNIHKGKLHRLLSQNTGIVSLNPQNHKPPLSERLGKLKNNIQVIKRIPRGARITVAASLSQSIKNVILYNDSQNWENLLTFAYRTLHVSRGRDSPGSLTQKIKDNCKEPGDLDLDITKTKPHKPPSINIIKKIEGKVNDGDIKGAAQLLFSDDCMAPDTSDTLAALASKHPLPAMGTQLPDPPNPSDRTPETTAEETLAAIMSFRNGSAGGLDGLTPQHLKDLLSKTVGETGRTLLDDITRLANLMLSGKVCEEITDILYGANLIALKKKDGGIRPIAVGNTIRRIVSKICCIHILPELSAKFQPVQLGFGCRGGCEAAVHAVRTFLADDSSELLLKVDVCNAFNSVGRDALLTQVKENSPAIYNYIYQCYSKPTKLIYKNEILQSATGCQQGDPLGPAIFSLAIHPVITTLNSKFNVWYLDDGTIGGDAITVLNDLQSITHQFQQLGLQLNFSKCELFLSDSISTEEKNDIFLKFKNLAPGIKILDKQSLRLLGAPIHEESIPAYVNEQISRFIASSERLLKINPHMALFIIRYCLFVPNLTYVLRCSFMWKFNTLLKLLDNTIAQTLSSLLNCSFTERSWDQATLPVRFGGLGIRKISSVALPAFLSSINGTNALFGNIISPSLGDVEALGLTEARDAWTLACPGEALPIVLNSQKLWDEPLCRKLQQNLLETAVNPVERARLLAVGEHEAGYWLQAMPSTSIGTLLDKTTFSMAVCLRLGIPVNVPHRCQCGTSVDELGHHGLSCRRSAGRLSRHASINDVIRRALATVNVPAILEPQGIARDDGKRPDGMTLVPWKNGHSLVWDATCVDTLAPSHIPATATKAGAAASTAELAKRRKYGALGASYIFAPFGVETLGPWGPEARRLFHDLSSRLVDASGDPRAGAYLGQRISLAIQRGNAASVLGALPFGSDLEKVFYLI

SEQ ID NO: 25623 - protein, 960 aa, Ypsolopha scabrella
MSQTDGPCAPASSQSQQSAEDRLQCPDCLKTFKGQRGLNIHKGKLHRLLSQNTGIVSLNPQNHKPPLSERLGKLKNNIQVIKRIPRGARITVAASLSQSIKNVILYNDSQNWENLLTFAYRTLHVSRGRDSPGSLTQKIKDNCKEPGDLDLDITKTKPHKPPSINIIKKIEGKVNDGDIKGAAQLLFSDDCMAPDTSDTLAALASKHPLPAMGTQLPDPPNPSDHTPETTAEETLAAIMSFRNGSAGGLDGLTPQHLKDLLSKTVGETGRTLLDDITRLANLMLSGKVCEEITDILYGANLIALKKKDGGIRPIAVGNTIRRIVSKICCIHILPELSAKFQPVQLGFGCRGGCEAAVHAARTFLADDSSELLLKVDVCNAFNSVGRDALLTQVKENSPAIYNYIYQCYSKPTKLIYKNEILQSATGCQQGDPLGPAIFSLAIHPVITTLNSKFNVWYLDDGTIGGDAITVLNDLQSITHQFQQLGLQLNFSKCELFLSDSISTEEKNDIFLKFKNLAPDIKILDKQSLRLLGAPIHEESIPAYVNEQISRFIASSERLLKINPHMALFIIRYCLFVPNLTYVLRCSFMWKFNTLLKLLDNTIAQTLSSLLNCSFTERSWDQATLPVRFGGLGIRKISSVALPAFLSSINGTNALFGNIISPSLGDVEALGLTEARDAWTLACPGEALPIVLNSQKLWDEPLCRKLQQNLLETAVNPVERARLLAVGEHEAGYWLQAMPSTSIGTLLDKTTFSMAVCLRLGIPVNVPHRCQCGTSVDELGHHGLSCRRSAGRLSRHASINDVIRRALATVNVPAILEPQGIARDDGKRPDGMTLVPWKNGHSLVWDATCVDTLAPSHIPATAKKAGAAAATAELAKRRKYGALGASYIFAPFGVETLGPWGPEARRLFHDLSSRLVDASGDPRAGAYLGQRISLAIQRGNAASVLGALPFGSDLEKVFYLI

SEQ ID NO: 25624 - protein, 751 aa, Ypsolopha scabrella
MIPTQLPDPPGPSDQTPEATAEETLAAIMSFRNGSAGGLDGLTPQHYKDLVCGTVGETGRILLDAITRLVNLMLSGRVCEQILDILYGANLFALKKKDGGIRPIAVGNTIRRVVSKICCQHILPDLASKFQPVQLGFGTTGGCEAAVHATRTFLNNNAGEVLLKVDVRNAFNSLDRKALLTQVKEHVSPIYNYVSQCYNQSSKLLYQNTFINSAVGCQQGDPLGPAIFSLAIHPVISSLTSKLNIWYLDDGTVGGEATSVFNDLEIIINKFSELGLELNFSKCELFVSELLSQEDKNSIISKFNILAPDIRIVDKESLRLLGAPILDDAVPRFVSDQVAKFTHSSERMNKINPHMALCVIRHCLFVPQLTYTLRCSPIWKFPNLVDTLDTVLRQSLTTVLNCSFDDRSWSQATLPVRFGGLGVRKISSIALPAFLSSVYSTHVLFGNIISPSLGDVEASCLTEARNAWTLACPGRDLPIVLESQKSWDEPLCEQTQKNLLATSSNLADRARLLATGERESGFWLHAIPSANIGTLLDKTTFTLAICLRLGTKTNESHRCQCGASVDQLGHHGLSCRRSAGRWSRHGSLNDVIRRALATVNVPAVLEPNGIARDDGKRPDGMTLIPWQNGRSLVWDATCVDTLAASHIQSTAVTAGVAAATAERNKRRKYAALGEGYIFVPFGVETFGPWGPDARLLYKQIASRLVDASGDPRAGAYLGQRISLAIQRGNAASVLGTLPSDSDDLNKVFYLI

SEQ ID NO: 25625 - protein, 959 aa, Ypsolopha scabrella
MSQTAGPSTAAGSQSSLNDVQCPDCKKSYKGQRGLNIHRSKVHLNSQVTNSSPAAQGDTGIPHDKPFWQFLGDLKGNLPRVKRIPRGARTTVAASLSQCINSVVHDNSEDSWKHFLTFSYRTLHVRRNKDVKGSLTQKIKNNCKHSDNLNLSNTIDFQNNSYDIIKKIEAKVNDGDIRGAARLLFSDDAIAPDTPDTFSALTSKHPPQMIPTQLPDPPGPSDQTPEATAEETLAAIMSFRNGSAGGLDGLTPQHYKDLVCGTVGETGRILLDAITRLVNLMLSGRVCEQILDILYGANLFALKKKDGGIRPIAVGNTIRRVVSKICCQHILPDLASKFQPVQLGFGTTGGCEAAVHATRTFLNNNAGEVLLKVDVRNAFNSLDRKALLTQVKEHVSPIYNYVSQCYNQSSKLLYQNTFINSAVGCQQGDPLGPAIFSLAIHPVISSLTSKLNIWYLDDGTVGGEATSVFNDLEIIINKFSELGLELNFSKCELFVSELLSQEDKNSIISKFNILAPDIRIVDKESLRLLGAPILDDAVPRFVSDQVAKFTHSSERMNKINPHMALCVIRHCLFVPQLTYTLRCSPIWKFPNLVDTLDTVLRQSLTTVLNCSFDDRSWSQATLPVRFGGLGVRKISSIALPAFLSSVYSTHVLFGNIISPSLGDVETSCLTEARNAWTLACPGRDLPIVLESQKSWDEPLCEQTQKNLLATSSNLADRARLLATGERESGFWLHAIPSANIGTLLDKTTFTLAICLRLGTKTNESHRCQCGASVDQLGHHGLSCRRSAGRWSRHGSLNDVIRRALATVNVPAVLEPNGIARDDGKRPDGMTLIPWQNGRSLVWDATCVDTLAASHIQSTAVTAGVAAATAERNKRRKYAALGEGYIFVPFGVETFGPWGPDARLLYKQIASRLVDASGDPRAGAYLGQRISLAIQRGNAASVLGTLPSDSDDLNKVFYLI

SEQ ID NO: 25626 - protein, 751 aa, Ypsolopha scabrella
MIPTQLPDLPGPSDQTPEATAEETLAAIMSFRNGSAGGLDGLTPQHYKDLVCGTVGETGRILLDAITRLVNLMLSGRVCEQILDILYGANLFALKKKDGGIRPIAVGNTIRRVVSKICCQHILPDLASKFQPVQLGFGTTGGCEAAVHATRTFLNNNAGEVLLKVDVRNAFNSLDRKALLTQVKEHVSPIYNYVSQCYNQSSKLLYQNTFINSAVGCQQGDPLGPAIFSLAIHPVISSLTSKLNIWYLDDGTEGGEATSVFNDLEIIINKFSELGLELNFSKCELFVSELLSQEDKNSIISKFNILAPDIRIVDKESLRLLGAPILDDAVPRFVSDQVAKFTHSSERMNKINPHMALCVIRHCLFVPQLTYTLRCSPIWKFPNLVDTLDTVLRQSLTTVLNCSFDDRSWSQATLPVRFGGLGVRKISSIALPAFLSSVYSTHVLFGNIISPSLGDVEASCLTEARNAWTLACPGRDLPIVLESQKSWDEPLCEQTQKNLLATASNLADRARLLATGERESGFWLHAIPSANIGTLLDKTTFILAICLRLGTKTNESHRCQCGASVDQLGHHGLSCRRSAGRWSRHGSLNDVIRRALATVNVPAVLEPNGIARDDGKRPDGMTLIPWQNGRSLVWDATCVDTLAASHIQSTAVTAGVAAATAERNKRRKYAALGEGYIFVPFGVETFGPWGPDARLLYKQIASRLVDASGDPRAGAYLGQRISLAIQRGNAASVLGTLPSDSDDLNKVFYLI

SEQ ID NO: 25627 - protein, 723 aa, Ypsolopha scabrella
MSFRNGSAGGLDGLTPQHYKDLVCGTVGETGRILLDAITRLVNLMLSGRVCEQILDILYGANLFALKKKDGGIRPIAVGNTIRRVVSKICCQHILPDLASKFQPVQLGFGTTGGCEAAVHATRTFLNNNAGEVLLKVDVRNAFNSLDRKALLTQVKENVSPIYNYVSQCYNQSSKLLYQNTFINSAVGCQQGDPLGPAIFSLAIHPVISSLTSKLNIWYLDDGTVGGEATSVFNDLEIIINKFSELGLELNFSKCELFVSELLSQEDKNSIISKFNILSPDIRIVDKESLRLLGAPILDDAVPRFVSDQVAKFTHSSERMNKINPHMALCVIRHCLFVPQLTYTLRCSPIWKFPNLVDTLDTVLRQSLTTVLNCSFDDRSWSQATLPVRFGGLGVRKISSIALPAFLSSVYSTHVLFGNIISPSLGDVEASCLMEARNAWTLACPGRDLPIVLESQKSWDEPLCEQTQKNLLATASNLADRARLLATGERESGFWLHAIPSANIGTLLDKTTFTLAICLRLGTKTNESHRCQCGASVDQLGHHGLSCRRSAGRWSRHGSLNDVIRRALATVNVPAVLEPNGIARDDGKRPDGMTLIPWQNGRSLVWDATCVDTLAASHIQSTAVTAGVAAATAERNKRRKYAALGEGYIFVPFGVETFGPWGPDARLLYKQIASRLVDASGDPRAGAYLGQRISLAIQRGNAASVLGTLPSDSDDLNKVFYLI

SEQ ID NO: 25628 - protein, 959 aa, Ypsolopha scabrella
MSQTAGPSTAAGSQSSLNDVQCPDCKKSYKGQRGLNIHRSNVHLNSQVTNSSPAAQGDTGIPHDKPFWQFLGNLKGNLPRVKRIPRGARTTVAASLSQCINSVVHDNSEDSWKHFLTFSYRTLHVRGNKDVKGSLTQKIKNNCKHSDNLNLSNTMDFQNNSYDIIKKIEAKVNDGDIRGAARLLFSDDAIAPDTPDTFSALTSKHPPQMIPTQLPDPPGPSDQTPEATAEETLAAIMSFRNGSAGGLDGLTPQHYKDLVCVTVGETGRILLDAITRLVNLMLSGRVCEQILDILYGANLFALKKKDGGIRPIAVGNTIRRVVSKICCQRILLDLASKFQPVQLGFGTTGGCEAAVHATRTFLNNNAGEVLLKVDVRNAFNSLDRKALLTQVKEHVSPIYSYISQCYNQSSKLLYQNTFINSAVGCQQGDPLGPAIFSLAIHPVISSLTSKLNIWYLDDGTVGGEATSVFNDLEIIINKFSELGLELNFSKCELFVSELLSQEDKNSIISKFNILAPDIRIVDKESLRLLAAPILDDAVPRFVSDQVAKFTHSSERMNKINPHMALCVIRHCLFVPQLTYTLRCSPIWKFPNLVDTLDTVLRQFLTTVLNCSFDDRSWSQATLPVRFGGLGVRKISSIALPAFLSSVYSTHVLFGNIISPSLGDVEASCLTEARNAWTLACPGRDLPIVLESQKSWDEPLCEQTQKNLLATASNLADRARLLATGERESGFWLHAIPSANIGTLLDKTTFTHAICLRLSTKTNESHRCQCGASVDQLGHHGLSCRRSAGRWSRHGSLNDVIRRALATVNVLAVLEPNGIARDDGKRPDGMTLIPWQNGRSLVWDATCVDTLAASHIQSTAVTAGVAAATAERNKRRKYAALGEGYIFVPFGVETFGPWGPDARLLYKQIASRLVDASGDPRAGAYLGQRISLAIQRGNAASVLGTLPSNSDDLNKVFYLI

SEQ ID NO: 25629 - protein, 959 aa, Ypsolopha scabrella
MSQTAGPSTAAGSQSSLNDVQCPDCKKSYKGQRGLNIHRSKVHLNSQVTNSSPAAQGDTGIPHDKPFWQFLGDLKGNLPRVKRIPRGARTTVAASLSQCINSVVHDNSEDSWKHFLTFSYRTLHVRRNKDVKGTLTQKIKNNCKHSDNLNLSNTIDFQNNSYDIIKKIEAKVNDGDIRGAARLLFSDDAIAPDTPDTFSALTSKHPPQMIPTQLPDPPGPSDQTPEATAEETLAAIMSFRNGSAGGLDGLTPQHYKDLVCGTVGETGRILLDAITRLVNLMLSGRVCEQILDILYGANLFALKKKDGGIRPIAVGNTIRRVVSKICCQHILPDLASKFQPVQLGFGTTGGCEAAVHATRTFLNNNAGEVLLKVDVRNAFNSLDRKALLTQVKEHVSPIYNYVSQCYNQSSKLLYQNTFINSAVGCQQGDPLGPAIFSLAIHPVISSLTSKLNIWYLDDGTVGGEATSVFNDLEIIINKFSELGLELNFSKCELFVSELLSQEDKNSIISKFNILAPDIWIVDKESLRLLGAPILDDAVPRFVSDQVAKFTHSSERMNKINPHMALCVIRHCLFVPQLTYTLRCSPIWKFPNLVDTLDTVLRQSLTTVLNCSFDDRSWSQATLPVRFGGLGVRKISSIALPAFLSSVYSTHVLFGNIISPSLGDVEASCLTEARNAWTLACPGRDLPIVLESQKSWDEPLCEQTQKNLLATSSNLADRARLLATGERESGFWLHAIPSANIGTLLDKTTFTLAICLRLGTKTNESHRCQCGASVDQLGHHGLSCRRSAGRWSRHGSLNDVIRRALATVNVPAVLEPNGIARDDGKRPDGMTLIPWQNGRSLVWDATCVDTLAASHIQSTAVTAGVAAATAERNKRRKYAALGEGYIFVPFGVETFGPWGPDARLLYKQIASRLVDASGDPRAGAYLGQRISLAIQRGNAASVLGTLPSDSDDLNKVFYLI

SEQ ID NO: 25630 - protein, 959 aa, Ypsolopha scabrella
MSQTAGPSTAAGSQSSLNDVQCPDCKKSYKGQRGLNIHRSKVHLNSQVTNSSPAAQGDTGIPHDKPFWQFLGDLKGNLPRVKRIPRGARTTVAASLSQCINSVVHDNSEDSWKHFLTFSYRTLHVRRNKDVKGSLTQKIKNNCKHSDNLNLSNTIDFQNNSYDIIKKIEAKVNDGDIRGAARLLFSDDAIAPDTPDTFSALTSKHPPQMIPTQLPDPPGPSDQTPEATAEETLAAIMSFRNGSAGGLDGLTPQHYKDLVCGTVGETGRILLDAITRLVNLMLSGRVCEQILDILYGANIFALKKKDGGIRPIAVGNTIRRVVSKICCQHILPDLASKFQPVQLGFGTTGGCEAAVHATRTFLNNNAGEVLLKVDVRNAFNSLDRKALLTQVKEHVSPIYNYVSQCYNQSSKLLYQNTFINSAVGCQQGDPLGPAIFSLAIHPVISSLTSKLNIWYLDDGTVGGEATSVFNDLEIIINKFSELGLELNFSKCELFVSELLSQEDKNSIISKFNILAPDIRIVDKESLRLLGAPILDDAVPRFVSDQVAKFTHSSERMNKINPHMALCVIRHCLFVPQLTYTLRCSPIWKFPNLVDTLDTVLRQSLTTVLNCSFDDRSWSQATLPVRFGGLGVRKISSIALPAFLSSVYSTHVLFGNIISPSLGDVEASCLTEARNAWTLACPGRDLPIVLESQKSWDEPLCEQTQKNLLATSSNLADRARLLATGERESGFWLHAIPSANIGTLLDKTTFTLAICLRLGTKTNESHRCQCGASVDQLGHHGLSCRRSAGRWSRHGSLNDVIRRALATVNVPAVLEPNGIARDDGKRPDGMTLIPWQNGRSLVWDATCVDTLAASHIQSTAVTAGVAAATAERNKRRKYAALGEGYIFVPFGVETFGPWGPDARLLYKQIASRLVDASGDPRAGAYLGQRISLAIQRGNAASVLGTLPSDSDDLNKVFYLI

SEQ ID NO: 25631 - protein, 960 aa, Ypsolopha scabrella
MSQTDGPCAPASSQSQQSAEDRLQCPDCLKTFKGQRGLNIHKGKLHRLLSQNTGIVSLNPQNHKPPLSERLGKLKNNIQVIKRIPRGARITVAASLSQSIKNVILYNDSQNWENLLTFAYRTLHVSRGRDSPGSLTQKIKDNCKEPGDLDLDITKTKPHKPPSINIIKKIEGKVNDGDIKGAAQLLFSDDCMAPDTSDTLAALASKHPLPAMGTQLPDPPNPSDRTPETTAEETLAAIMSFRNGSAGGLDGLTPQHLKDLLSKTVGETGRTLLDDITRLANLMLSGKVCEEITDILYGANLIALKKKDGGIRPIAVGNTIRRIVSKICCIHILPELSAKFQPVQLGFGCRGGCEAAVHAARTFLADDSSELLLKVDVCNAFNSVGRDALLTQVKENSPAIYNYIYQCYSKPTKLIYKNEILQSATGCQQGDPLGPAIFSLAIHPVITTLNSKFNVWYLDDGTIGGDAITVLNDLQSITHQFKQLGLQLNFSKCELFLSDSISTEEKNDIFLKFKNLAPDIKILDKQSLRLLGAPIHEESIPAYVNEQISRFIASSERLLKINPHMALFIIRYCLFVPNLTYVLRCSFMWKFNTLLKLLDNTIAQTLSSLLNCSFTERSWDQATLPVRFGGLGIRKISSVALPAFLSSINGTNALFGNIISPSLGDVEALGLTEARDAWTLACPGEALPIVLNSQKLWDEPLCRKLQQNLLETAVNPVERGRLLAVGEHEAGYWLQAMPSTSIGTLLDKTTFSMAVCLRLGIPVNVPHRCQCGTSVDELGHHGLSCRRSAGRLSRHASINDVIRRALATVNVPAILEPQGIARDDGKRPDGMTLVPWKNGHSLVWDATCVDTLAPSHIPATATKAGAAAATAELAKRRKYGALGASYIFAPFGVETLGPWGPEARRLFHDLSSRLVDASGDPRAGAYLGQRISLAIQRGNAASVLGALPFGSDLEKVFYLI

SEQ ID NO: 25632 - protein, 959 aa, Ypsolopha scabrella
MSQTAGPSTAAGSQSSLNDVQCPDCKKSYEGQRVLNIHRSKVHLNSQVTNSSPAAQGDTGIPHDKPFWQFLGDLKGNLPRVKRIPRGARTTVAASLSQCINSVVHDNSEDSWKHFLTFSYRTLHVRRNKDVKGSLTQKIKNNCKHSDNLNLSNTIDFQNNSYDIIKKIEAKINDGDIRGAARLLFSDDAIAPDTPDTFSALTSKHPPQMIPTQLPDPPGPSDQTPEATAEETLAAIMSFRNGSAGGLDGLTPQHYKDMVCGTVGETGRILLDAITRLVNLMLSGRVCEQILDILYGANLFALKKKYGGIRPIAVGNTIRRVVSKICCQHILPDLASKFQPVQLGFGTTGGCEAAVHATRTFLNNNAGEVLLKVDVRNAFNSLDRKALLTQVKEHVSPIYNYVSQCYNQSSKLLYQNTFINWAVGCQQGDPLGPAIFSLAIHPVISSLTSKLNIWYLDDGTVGGEATSVFNDLEIIINKFSELGLELNFSKCELFVSELLSQEDKNSIISKFNILAPDIRIVDKESLRLLGAPILDDAVPRFVSDQVAKFTHSSERMNKINPHMALCVIRHCLFVPQLTYTLRCSPIWKFPNLVDTLDTVLRQSLTTVLNCSFDDRSWSQATLPVRFGGLGVRKISSIALPAFMSSVYSTHVLFGNIISPSLGDVETSCLTEARNAWTLACPGRDLPIVLESQKSWDEPLCEQTQKNLLATASNLADRARLLATGERESGFWLHAIPSANIGTLLDKTTFTLAICLRLGTETNESHRCQCGASVDHLGHHGLSCRRSAGRWSRHGSLNDVIRRALATVNVPAVLEPNGIARDDGKRPDGMTLIPWQNGRSLVWDATCVDTLAASHIQSTAVTAGVAAATAERNKRRKYAALGEGYIFVPFGVETFGPWGPDARLLYKQIASRLVDASGDPRAGAYLGQRISLAIQRGNAASVLGTLPSDSDDLNKVFYLI

SEQ ID NO: 25633 - protein, 904 aa, Ypsolopha scabrella
MLQTDGPCAPASSQSQQSAEDRLQCPDCLKTFKGQRGLNIHKGKLHRLLSQNTGIVSLNPQNHKPPLSERLGKLKNSIQVIKRIPRGARITVAASLSQSIKNVILYNDSQNWENLLTFAYRTLHVSRGRDSPGSLTQKIKDNCKEPGDLDLDITKTKPHKPPSINIIKKIEGKVNDGDIKGAAQLLFSDDCMAPDTSDTLAALASKHPLPAMGTQLPDPPNPSDRIPETTAEETLAAIMSFRNGSAGGLDGLTPQHLKDLLSKTVEETGRTLLDDITRLANLMLSGKVCEEITDILYGANLIALKKKDGGIRPIAVGNTIRRIVSKICCIHILPELSAKFQPVQLGFGYRGGCEAAVHAARTFLADDSSELLLKVDVCNAFNSVGRDALLTQVKENSPAIYNYIYQCYSKPTKLIYKNEILQSTTGCQQGDPLGPAIFSLAIHPVITTLNSKFNVWYLDDGTIGGDAITVLNDLQSITHQFQQLGLQLNFSKCELFLSDSISTEEKNDIFLKFNNLAPDIKILDKQSLRLLGAPIHEESIPAYVNEQISRFIASSERLLKINPHMALFIIRYCLFVPNVTYVLRCSFMWKFNTLLKLLDNTIAQTLSSLLNCSFTERSWDQATLPVRFGGLGIRKISSVALPAFLSSVNGTNALFGNIISPSLGDVEALGLTEARDAWTLACPGEALPIVLNSQKLWDEPLCRKLQQNLLETAVNPVERARLLAVGEHEAGYWLQAMPSASIGTLLDKTTFSMAVCLRLGIPVNVPHRCQCGTSVDELGHHGLSCRRSAGRLSRHASINDVIRRALATVNVPAILEPQGIARDDGKRPDGITLVPWKNGHSLVWDATCVDTLAPSHIPATATKAGAAEATAESAKRRKYGALGASYIFAPFGVETLGPWGPEAR

SEQ ID NO: 25634 - protein, 959 aa, Ypsolopha scabrella
MSQTAGPSTAAGSQSSLNDVQCPDCKKSYKGQRGLNIHRSKVHLNSQVTNSSPAAQGDTGIPHDKPFWQFLGDLKGNLPRVKRIPRGARTTVAASLSQCINSVVHDNSEDSWKHFLTFSYRTLHVRRNKDVKGSLTQKIKNNCKHSDNLNLSNTIDFQNNSYDIIKKIEAKVNDGDIRGAARLLFSDDAIAPDTPDTFSALTSKHPPQMIPTQLPDPPGPSDQTPEATAEETLAAIMSFRNGSAGGLDGLTPQHYKDLVCGTVGETGRILLDAITRLVNLMLSGRVCEQILDILYGANLFALKKKDGGIRPIAVGNTIRRVVSKICCQHILPDLASKFQPVQLGFGTTGGCEAAVHATRTFLNNNAGEVLLKVDVRNAFNSLDRKALLTQVKEHVSPIYNYVSQCYNQSSKLLYQNTFINSAVGCQQGDPLGPAIFSLAIHPVISSLTSKLNIWYLDDGTVGGEATSVFNDLEIIINKFSELGLELNFSKCELFVSELLSQEDKNSIISKFNILAPDIRIVDKESLRLLGAPILDDAVPRFVSDQVAKFTHSSERMNKINPHMALCVIRHCLFVPQLTYTLRCSPIWKFPNLVDTLDTVLRQSLTTVLNCSFDDRSWSQATLPVRFGGLGVRKISSIALPAFLSSVYSTHVLFGNIISPSLGDVEASCLTEARNAWTLACPGRDLPIVLESQKSWDEPLCEQTQKNLLATSSNLADRARLLATGERESGFWLHAIPSANIGTLLDKTTFTLAICLRLGTKTNESHRCQCGASVDQLGHHGLSCRRSAGRWSRHGSLNDVIQRALATVNVPAVLEPNGIARDDGKRPDGMTLIPWQNGRSLVWDATCVDTLAASHIQSTAVTAGVAAATAERNKRRKYAALGEGYIFVPFGVETFGPWGPDARLLYKQIASRLVDASGDPRAGAYLGQRISLAIQRGNAASVLGTLPSDSDDLNKVFYLI

SEQ ID NO: 25635 - protein, 726 aa, Ypsolopha scabrella
MSFRNGSAGGLDGISPQHLKDLTNGTTGVAGRTLLEDITRLANLMLSGGVCEGITDLLYGLYGASLCALKKKDGGVRPIAVGNTFRRMVSKICCKNIVADLSTKFRPTQLGFGSKGGCEAAVHAARTFLEHDTGEVLLKVDVKNAFNSVDRGTLLTEVKNNCAPIYNYVFQYYSRPTKLIYRDHLLESAVGCQQGDPLGPAIFSLAINPIVKDLNSKFNIWYLDDGTIGGDSTSVLNDLENIVQKFGQIGLELNYSKCELYLSKSISSFDRNNVIEKFNNVAANIKILENESLRLLLAPVLNESIPRYVNDQISRFLHASDLLTKINPHIALFIIRFCLFVPKLTYVLRCCPLWKFDTLLKIIDNTLQQSIVTIINCSLTDRCWVQATLPVRFGGLGIRKISSVALPAFLSSVHSTHVLYGTIIFPSLGDVEASCSTDARDAWVQACPGENLPTDLTKQKQWDEPICRQVQSSLLDTATNPADRARLLASGERESWFWLHAVPSINIGTQLDRVSFSLAVSLRLGAKTNEPHRCRCGTNVDQLGHHGLSCQRSAGRLPRHASINDVIRRALATVNVPAILEPKGITRDDGKRPDGMTLIPWKNGRAMVWDATCVDTLAPSHTGATAVRAGAAAAAAERNKRHKYAALSSDCIFVPFGVETLGPWGPDAKLLFKELSTRLIDVCGDPKAGAYLGQRISLAIQRGNAASLLGTLPHDGGDLDRIFYLV

SEQ ID NO: 25636 - protein, 960 aa, Ypsolopha scabrella
MSQAAGPSSAPAGTGSQLSSDVQCPECNKPFKGQRGLKIHIGKQHNKNKPTQTSSDPVQTPIPNGPPLWKELGTLKSTTAVLKRIPRGARTSVATSLSKTIKEVLNNNDENSWKQLLTFAFRILHVKRGREDNGSLTQKIKNNCLSNKTIIPQYDNSTVHFTYNLNKRIENKFNDGDIRGAAHLLFTTDTLAPDTPETLSALASKHPPPAATSQLPDAPCPSDSTPTATVNEVLAAVMSFRNGSAGGLDGISPQHLKDLTSGTTGVAGRTLLEDITRLANLMLSGGVCEGITDLLYGASLCALKKKDGGVRPIAVGNTFRRMVSKICCKNIVADLSTKFRPTQLGFGSKGGCEAAVHAARTFLEHDTGEVLLKVDVKNAFNSVDRGTLLTEVKNNCAPIYNYVFQCYSRPTKLIYRDHLLESAVGCQQGDPLGPAIFSLAINPIVKDLNSKFNIWYLDDGTIGGDSTSVLNDLENIVQKFGQIGLELNYSKCELYLSKSISSFDRNNIIEKFNNVAANIKILDNESLRLLGAPVLNESIPRYVNDQISRFLHASDLLTKINPHIALFIIRFCLFVPKLTYVLRCCPLWKFDTLLKIIDNTLQQSIVTIINCSLTDRCWVQATLPVRFGGLGIRKISSVALPAFLSSVHSTHVLYGTIIFPSLGDVEASCSTDARDAWVQACPGENLPTDLTKQKQWDEPICRQVQSSLLDTATNPADRARLLASGERESGFWLHAVPSINIGTQLDRVSFSLAVSLRLGAKTNEPHHCRCGTNVDQLGHHGLSCQRSAGRLPRHASINDVIRRALATVNVPAILEPKGITRDDGKRPDGMTLIPWKNGRALVWDATCVDTLAPSHTGVTAVRAGAAAAAAERNKRHKYAALSSDCIFVPFGVETLGPWGPDAKLLFKELSTRLVDVCGDPKAGAYLGQRISLVIQRGNAASLLGTLPHDGGDLDRIFYLV

SEQ ID NO: 25637 - protein, 960 aa, Ypsolopha scabrella
MSQAAGPSSAPAGTGSQLSSDVQCPECNKPFKGQRGLKIHIGKQHNKNKPTQTSSDPVQTPIPNGPPLWKELGTLKSTTAVLKRIPRGARTSVATSLSKTIKEVLNNNDENSWKQLLTFAFRILHVKRGREDNGSLTQKIKNNCLSNKTIIPEYDNSTVHFTYNLNKRIENKFNDGDIRGAAHLLFTTDTLAPDTPETLSALASKHPPPAATSQLPDAPCPSDSTPTATVNEVLAAVMSFRNGSAGGLDGISPQHLKDLTSGTTGVAGRTLLEDITRLANLMLSGGVCEGITDLLYGASLCALKKKDGGVRPIAVGNTFRRMVSKICCKNIVADLSTKFRPTQLGFGSKGGCEAAVHAARTFLEHDTGEVLLKVDVKNAFNSVDRGTLLTEVKNNCAPIYNYVFQCYSRPTKLIYRDHLLESAVGCQQGDPLGPAIFSLAINPIVKDLNSKFNIWYLDDGTIGGDSTSVLNDLENIVQKFGQIGLELNYSKCELYLSKSISSFDRNNIIEKFNNVAANIKILDNESLRLLGAPVLNESIPRYVNDQISRFLHASDLLTKINPHIALFIIRFCLFVPKLTYVLRCCPLWKFDTLLKIIDNTLQQSIVTIINCSLTDRCWVQATLPVRFGGLGIRKISSVALPAFLSSVHSTHVLYGTIIFPSLGDVEASCSTDARDAWVQACPGENLPTDLTKQKQWDEPICRQVQSSLLDTATNPADRARLLASGERESGFWLHAVPSINIGTQLDRVSFSLAVSLRLGAKTNEPHRCRCGTNVDQLGHHGLSCQRSAGRLPRHASINDVIRRALATVNVSAILEPKGITRDDGKRPDGMTLIPWKNGRALVWDATCVDTLAPSHTGVTAVRAGAAAAAAERNKRHKYAALSSDCIFVPFGVETLGPWGPDAKLLFKELSTRLVDVCGDPKAGAYLGQRISLAIQRGNAASLLGTLPHDGGDLDRIFYLV

SEQ ID NO: 25638 - protein, 960 aa, Ypsolopha scabrella
MSQAAGPSSAPAGTGSQLSSDVQCPECNKPFKGQRGLKIHIGKQHNKNKPTQTSSDPVQTPIPNGPPLWKELGTLKSTTAVLKRIPRGARTSVATSLSKTIKEVLNNNDENSWKQLLTFAFRILHVKRGREDNGSLTQKIKNNCLSNKTIIPQYDNSTVHFTYNLNKRIENKFNDGDIRGAAHLLFTTDTLAPDTPETLSALASKHPPPAATSQLPDAPCPSDSTPTATVNEVLAAVMSFRNGSAGGLDGISPQHLKDLTSGTTGVAGRTLLEDITRLANLMLSGGVCEGITDLLYGASLCALKKKDGGVRPIAVGNTFRRMVSKICCKNIVADLSTKFRPTQLGFGSKGGCEAAVHAARTFLEHDTGEVLLKVDVKNAFNSVDRGTLLTEVKNNCAPIYNYVFQCYSRPTKLIYRDHLLESAVGCQQGDPLGPAIFSLAINPIVKDLNSKFNIWYLDDGTIGGDSTSVLNDLENIVQKFGQIGLELNYSKCELYLSKSISSFDRNNIIEKFNNVAANIKILDNESLRLLGAPVLNESIPRYVNDQISRFLHASDLLTKINPHIALFIIRFCLFVPKLTYVLRCCPLWKFDTLLKIIDNTLQQSIVTIINCSLTDRCWVQATLPVRFGGLGIRKISSVALPAFLSSVHSTHVLYGTIIFPSLGDVEASCSTDARDAWVQACPGENLPTDLTKQKQWDEPICRQVQSSLLDTATNPADRARLLASGERESGFWLHAVPSINIGTQLDRVSFSLAVSLRLGAKTNEPHRCRCGTNVDQLGHHGLSCQRSAGRLPRHASINDVIRRALATVNVPAILEPKGITRDDGKRPDGMTLIPWKNGRALVWDATCVDTLAPSHTGVTAVRAGAAAAAAERNKRHKYAALSSDCIFVPFGVETLGPWGPDAKLLFKELSTRLVDVCGDPKAGAYLGQRISLAIQRGNAASLLGTLPHDGGDLDRIFYLV

SEQ ID NO: 25639 - protein, 954 aa, Ypsolopha scabrella
MSQAAGPSSAAAGSQSSDTRCPECNKVFKGQRDLNIHIGKLHGKNKQNFSNSVSPPITQDDPLWSKLGFLKSTTPVVKRITRGARTTVAASLSSCLKDVINNNDHKSWEQLLTFAFRILHVKRGRDENSSLTQKIKNNCSSKNEITPDYEQNIQNYAGDFNKRIEKKFNDGDIRGAAHLLFSTDTLAPNTPETLLALASKHPPPAATSQIPDAPCPSDPTPTTTVKETLAAVMSFRNGSAGGLDGISPQHLKDLLCGASGTAGLALLEDITRLANLMLSGEVLEGVTDVLYGANLCALKKKDGGVRPIAVENTFRRMVSKICCKNILADLSTKFQPFQLGFGSNGGCEAAVHAARTFLEHDAGEVLLKVVVKNAFNSVDRGTLLSEVKNNCPSIYNYIYQCYSSPTKLYKDNLIYSSVGCQQSDPLGPAIFSLAINPIIQNLNFKFNIWYLDDGTIGGDSLSVLNDLENIIKKFGEIGLELNFSKCELFVSKSIPYSESKDIISKFNSLAPNLKILNNESLRLLGAPVLNESIPGFVNDQVSKFVNCSDRLTKINPHMAFFIIHFCLFVPKLTYVLRCCPLWKFDTLLKIMDNTLQQTLVRILNCSLTDRCWTQASLSVRFGGLGIRKISSVALPAFLSSVYSTHHLFGTVIFPSLGDIETSCLTEARDSWVQACPGEDLPTDLTLQRLWDEPFCCKVQNDLLETASDSADRARILASGERESGFWLHVVPSTNIGTQLDRVTISLAISLRLGARTNEPHRCRCGTEVDQHGHHGLSCRRSAGRFPRHTSLNDVIRRALATVNVPAILEPVCLSRDDGKRPNGMILIPWKNGRTLVWDATCVDTLAPSHTGVTAVRAGAAAAAAEAHKRRGYAGLSLDCIFAPFGVETLRLWGPEAKLLFKELAARLVDVCGDPKAGAYFGQRISLAIQRGNAASLLGPLPYDEGDMANIFYLV

SEQ ID NO: 25640 - protein, 954 aa, Ypsolopha scabrella
MSQVAGQSHTGAGQNQSSDDRVQCPECHKFFRGQRGLKIHTGIKHPKIKSTPILAGTSQNSVLWKELGQLKYTTPIVKRIPRGARATVAASLSKCIKGVLDENDEEHWKQLLTFSYRILHVGKRKSQSGSLTQKIKNNCSLILMVPTPDFERIINYSTDLNKKIENKFNDGDIRGAAHLLFSHDTMAPDTPETLFALASKHPPSTATCPLPDPPHPSDRTPEALADETLAAIMSFRNGSAAGLDGISPQHLKDLLCGSTGQSGRLLLEDITQLVNLMLSGGVCEDITDLLYGANLCALKKKDGGIRPIAVGNTFRHLVSKICCRHIMNDLTPKLQPIQLGFGIKGGSEAAIHAARTFFDHDAGEVLLKVDVKNAFNSVDRGALLTEIKKNAPALYNYMYQCYGRPSNLIFKNNLIKSAVGCQQGDPLGPAIFSLAINPIISALNSKFNVWYLDDGTIGGEATSVFTDLENLIKKFKDIGLEINFSKCELFISNNLASLKKDQIIKKFNSIAPNIKILNNDSLRLLGAPVLNESIPGYVNEQITKFIGISDRLIKINPHIALFIIRYCLFVPKLTHVLRCCPLWKHENFLNIFDNILHKTLETILNCSLADRCWSQATLPVRLSGLGIRKISSVALPAFLSSIHSTNDLFGTLIRPSLGDVEASCLMEARDAWIVACPGKNLPTDLNSQRLWDEPICSQIQKQLLDSATNSVDRARLLVSSERESGYWLHALPSANIGTQLDRVTFTLAVSLRLGARTNEPHRCRCGTNVNQLGHHGLSCQRSAGRLSRHASLNDVIRRAFATVSVPAILEPNGIARSDGKRPDGMTLIPWKCGKSLVWDATCVDTLAPSHIQATAARAGAAAAAAEATKRRKYAELGSEYMFAPFGVETLGPWGPDAKRLFKEISSRLVDVSGDPRAGAYLGQRLSLAIQRGNAASLLGTLPHDGGDLANIFYL

SEQ ID NO: 25641 - protein, 954 aa, Ypsolopha scabrella
MSQVAGQSHTGAGQNQSSDDRVQCPECHKFFRGQRGLKIHTGIKHPKIKSTPISAGTSQNSVLWKELGQLKYTTPIVKRIPRGARATVAASLSKCIKGVLDENDEEHWKQLLTFSYRILHVGKRKSQSGSLTQKIKNNCSLIQMVPTPDFERIINYSTDLNKKIEIKFNDGDIRGAAHLLFSHDTMAPDTPETLFALASKHPPSTATCPLPDPPHPSDRTPEALADETLAAIMSFRNGSAAGLDGISPQHLKDLLCGSTGQSGRLLLEDITQLVNLMLSGGVCEDITDLLYGANLCALKKKDGGIRPIAVGNTFRRLVSKICCRHIMNDLTPKLQPIQLGFGIKGGCEAAIHAARTFLDHDAGEVLLKVDVKNAFNSVDRGALLTEIKKNAPALYNYMYQCYGRPSNLIFKNNLIKSAVGCQQGDPLGPAIFSLAINPIISALNSKFNVWYLDDGTIGGEATSVFTDLENLIKKFKDIGLEINFSKCELFISNNLASLKKDQIIKKFNSIAPNIKILNNDLLRLLGAPVLNESIPGYVNEQITKFIGISDRLIKINPHIALFIIRYCLFVPKLTYVLRCCPLWKHENFLNIFDNILHKTLETILNCSLADRCWSQATLPVRLGGLGIRKISSVALPAFLSSIHSTNDLFGTVIRPSLGDVEASCLMEARDAWIVACPGKNLPTDLTSQRLWDEPICSQIQKQLLDSATNSVDRARLLASGERESGYWLHALPSANIGTQLDRVTFTLAVSLRLGARTNEPHRCRCGTNVNQLGHHGLSCQRSAGRLSRHASLNDVIRRAFATVSVPAILEPNGIARSDGKRPDGMTLIPWKCGKSLVWDATCVDTLAPSHIQATAARAGAAAAAAEATKRRKYAELGSEYMFAPFGVETLGPWGPDAKRLFKEISSRLVDFSGDPRAGAYLGQRLSLAIQRGNAASLLGTLPHDGGDLANIFYL

SEQ ID NO: 25642 - protein, 954 aa, Ypsolopha scabrella
MSQVAGQSHTGAGQNQSSDDRVQCPECHKFFRGQRGLKIHTGIKHPKIKSTPILAGTSQNSVLWEELGQLKYTTPIVKRIPRGARATVAASLSKCIKGVLDENDEEHWKQLLTFSYRILHVGKRKSQSGSLTQKIKNNCSLIQMVPTPDFERIINYSTDLNKKIEIKFNDGDIRGAAHLLFSHDTMAPDTPETLFALASKHPPSTATCPLPDPPHPSDRTPEALADETLAAIMSFRNGSAAGLDGISPQHLKDLLCGSTGQSGRLLLEDITQLVNLMLSGGVCEDITDLLYGANLCALKKKDGGIRPIAVGNTFRRLVSKICCRHIMNDLTPKLQPIQLGFGIKGGCEAAIHAARTFLDHDAGEVLLKVDVKNAFNSVDRGVLLTEIKKNAPALYNYMYQCYGRPSNLIFKNNLIKSAVGCQQGDPLGPAIFSLAINPIISALNSKFNVWYLDDGTIGGEATSVFTDLENLIKKFKDIGLEINFSKCELFISNNLASLKKDQIIKKFNSIAPNIKILNNDSLRLLGAPVLNESIPGYVNEQITKFIGISDRLIKINPHIALFIIRYCLFVPKLTYVLRCCPLWKHENFLNIFDNILHKTLETILNCSLADRCWSQATLPVRLGGLGIRKISSVALPAFLSSIHSTNDLFGTLIRPSLGDVEASCLMEARDAWIVACPGKNLPTDLNSQRLWDEPICSQIQKQLLDSATNSVDRARLLASGERESGYWLHALPSANIGTQLDRVTFTLAVSLRLGARTNEPHRCRCGTNVNQLGHHGLSCQRSAGRLSRHASLNDVIRRAFATVSVPAILEPNGIARSDGKRPDGMTLIPWKCGKSLVWDATCVDTLAPSHIQATAAKAGAAAAAAEATKRRKYAELGSEYMFAPFGVETLGPWGPDAKRLFKEISSRLVDVSGDPRAGAYLGQRLSLAIQRGNAASLLGTLPHDGGDLANIFYL

SEQ ID NO: 25643 - protein, 954 aa, Ypsolopha scabrella
MSQVAGQSHTGAGQNQSSDDRVQCPECHKFFRGQRGLKIHTGIKHPKIKSTPISAATSQNSVLWKELGQLKYTTPIVKRIPRGARATVAASLSKCIKGVLDENDEEHWKQLLTFSYRILHVGKRKSQSGSLTQKIKNNCSLIQMVPTPDFERIINYSTDLNEKIEIKFNDGDIRGAAHLLFSHDTMAPDTPETLFALASKHPPSTATCPLPDPPHPSDRTPEALADETLAAIMSFRNGSAAGLDGISPQHLKDLLCGSTGQSGRLLLEDITQLVNLMLSGGVCEDITDLLYGANLCALKKKDGGIRPIAVGNTFRRLVSKICCRHIMNDLTPKLQPIQLGFGIKGGCEAAIHAARTFLDHDAGEVLLKVDVKNAFNSVDRGALLTEIKKNAPALYNYMYQCYGRPSNLIFKNNLIKSAVGCQQGDPLGPAIFSLAINPIISALNSKFNVWYLDDGTIGGEATSVFTDLDNLIKKFKDIGLEINFSKCELFISNNLASLKKDQIIKKFNSIAPNIKILNNDSLRLLGAPVLNESIPGYVNEQITKFIGISDRLIKINPHIALFIIRYCLFVPKLTYVLRCCPLWKHENFLNIFDNILHKTLETVLNCSLADRCWSQATLPVRLGGLGIRKISNVALPAFLSSIHSTNDLFGTLIRPSLGDVEASCLMEARDAWIVACPGKNLPTDLNSQRLWDEPICSQIQKQLLDSATNSVDRARLLASGERESGYWLHALPSANIGTQLDRVTFTLAVSLRLGARTNEPHRCRCGTNVNQLGHHGLSCQRSAGRLSRHASLNDVIRRAFATVSVPAILEPNGIARSDGKRPDGMTLIPWKCGKSLVWDATCVDTLAPSHIQATAARAGAAAAAAEATKRRKYAELGSEYMFAPFGVETLGPWGPDAKRLFKEISSRLVDVSGDPRAGAYLGQRLSLAIQRGNAASLLGTLPHDGGDLANIFYL

SEQ ID NO: 25644 - protein, 954 aa, Ypsolopha scabrella
MSQVAGQSHTGAGQNQSSDDRVQCPECHKFFRGQRGLKIHTGIKHPKIKSTPISAGTSQNSVLWKELGQLKYTTPIVKRIPRGARATVAASLSKCIKGVLDENDEEHWKQLLTFSYRILHVGKRKSQSGSLTQKIKNNCSLIQMVPTPDFERIINYSTDLNKKIEIKFNDGDIRGAAHLLFSHDTMAPDTPETLFALASKHPPSTATCPLPDPPHPSDRTPEALADETLAAIMSFRNGSAAGLDGISPQHLKDLLCGSTGQSGRLLLEDITQLVNLMLSGGVCEDITDLLYGANLCALKKKDGGIRPIAVGNTFRRLVSKICCRHIMNDLTPKLQPIQLGFGIKGGCEAAIHAARTFLDHDAGEVLLKVDVKNAFNSVDRGALLTEIKKNAPALYNYMYQCYGRPSNLIFKNNLIKSAVGCQQGDPLGPAIFSLAINPIISALNSKFNVWYLDDGTIGGEATSVFTDLENLIKKFKDIGLEINFSKCELFISNNLASLKKDQIIKKFNSIAPNIKILNNDSLRLLGAPVLNESIPGYVNEQITKFIGISDRLIKINPHIALFIIRYCLFVPKLTYVLRCCPLWKHENFLNIFDNILHKTLETILNCSLADRCWSQATLPVRLGGLGIRKISSVALPAFLSSIHSTNDLFGTLIRPSLGDVEASCLMEARDAWIVACPGKNLPTDLNSQRLWDEPICSQIQKQLLDSATNSVDRARLLASGERESGYWLHALPSANIGTQLDRVTFTLAVSLRLGARTNEPHRCRCGTNVNQLGHHGLSCQRSAGRLSRHASLNDVIRRAFATVSVPAILEPNGIARSDGKRPDGMTLIPWKCGKSLVWDATCVDTLAPSHIQATAARAGAAAAAAEATKRRKYAELGSEYMFAPFGVETLGPWGPDAKRLFKEISSRLVDVSGDPRAGAYLGQRLSLAIQRGNAASLLGTLPHDGGDLANIFYL

SEQ ID NO: 25645 - protein, 954 aa, Ypsolopha scabrella
MSQVAGQSHTGAGQNQSSDDRVQCPECHKFFRGQRGLKIHTGIKHPKIKSTPISAGTSQNSVLWKELGQLKYTTPIVKRIPRGARATVAASLSKCIKGVLDENDEEHWKQLLTFSYRILHVGKRKSQSGSLTQKIKNNCSLIQMVPTPDFERIINYSTDLNKKIEIKFNDGDIRGAAHLLFSHDTMAPDTPETLFALASKHPPSTATCPLPDPPHPSDRTPEVLADETLAAIMSFRNGSAAGLDGISPQHLKDLLCGSTGQSGRLLLEDITQLVNLMLSGGVCEDITDLLYGANLCALKKKDGGIRPIAVGNTFRRLVSKICCRHIMNDLTPKLQPIQLGFGIKGGCEAAIHAARTFLDHDAGEVLLKVDVKNAFNSVDRGALLTEIKKNAPALYNYMYQCYGRPSNLIFKNNLIKSAVGCQQGDPLGPAIFSLAINPIISALNSKFNVWYLDDGTIGGEATSVFTDLENLIKKFKDIGLEINFSKCELFISNNLASLKKDQIIKKFNSIAPNIKILNNDSLRLLGAPVLNESIPGYVNEQITKFIGISDRLIKINPHIALFIIRYCLFVPKLTYVLRCCPLWKHENFRNIFDNILHKTLETILNCSLADRCWSQATLPVHLGGLGIRKISSVALPAFLSSIHSTNDLFGTLIRPSLGDVEASCLMEARDAWIVACPGKNLPTDLNSQRLWDEPICSQIQKQLLDSATNSVDRARLLASGERESGYWLHALPSANIGTQLDRVTFTLAVSLRLGARTNEPHRCRCGTNVNQLGHHGLSCQRSAGRLSRHASLNDVIRRAFATVSVPAILEPNGIARSDGKRPDGMTLIPWKCGKSLVWDATCVDTLAPSHIQATAARAGAAAAAAEATKRRKYAELGSEYMFAPFGVETLGPWGPDAKRLFKEISSRLVDVSGDPRAGAYLEQRLSLAIQRGNAASLLGTLPHDGGDLANIFYL

SEQ ID NO: 25646 - protein, 954 aa, Ypsolopha scabrella
MSQVAGQSHTGAGQNQSSDDRVQCPECHKFFRGQRGLKIHTGIKHPKISSTPISAGTSQNSVLWKELGQLKYTTPIVKRIPRGARATVAASLSKCIKGVLDENDEEHWKQLLTFSYRILHVGKRKSQSGSLTQKIKNNCSLIQMVPTPDFERIINYSTDLNKKIEIKFNDGDIRGAAHLLFSHDTMAPDTPETLFALASKHPPSTATCPLPDPPHPSDRTPEALADETLAAIMSFRNGSAAGLDGISPQHLKDLLCGSTGQSGRLLLEDITQLVNLMLSGGVCEDITDLLYGANLCALKKKDGGIRPIAVGNTFRRLVSKICCRHIMNDLTPKLQPIQLGFGIKGGCEAAIHAARTFLDHDAGEVLLKVDVKNAFNSVDRGALLTEIKKNAPALYNYMYQCYGRPSNLIFKNNLIKSAVGCQQGDPLGPAIFSLAINPIISALNSKFNVWYLDDGTIGGEATSVFTDLENLIKKFKDIGLEINFSKCELFISNNLASLKKDQIIKKFNSIAPNIKILNNDSLRLLGAPVLNESIPGYVNEQITKFIGISDRLIKINPHIALFIIRYCLFVPKLTYVLRCCPLWKHENFLNIFDNILHKTLETILNCSLADRCWSQATLPVRLGGLGIRKISSVALPAFLSSIHSTNDLFGTLIRPSLGDVEASCLMEARDAWIVACPGKNLPTDLNSQRLWDEPICSQIQKQLLDSATNSVDRARLLASGERESGYWLHALPSANIGTQLDRVTFTLAVSLRLGARTNEPHRCRCGTNVNQLGHHGLSCQRSAGRLSRHASLNDVIRRAFATVSVPAILEPNGIARSDGKRPDGMTLIPWKCGKSLVWDATCVDTLAPSHIQATAARAGAAAAAAEATKRRKYAELGSEYMFAPFGVETLGPWGPDAKRLFKEISSRLVDVSGDPRAGAYLGQRLSLAIQRGNAASLLGTLPHDGGDLANIFYL

SEQ ID NO: 25647 - protein, 954 aa, Ypsolopha scabrella
MSQVAGQSHTGAGQNQSSDDRVQCPECHKFFRGQRGLKIHTGIKHPKIKSTPISAGTSQNSVLWKELGQLKYTTPIVKRIPRGARATVAASLSKCIKGVLDENDEEHWKQLLTFSYRILHVGIRKSQSGSLTQKIKNNCSLIQMVPTPDFERIINYSTDLNKKIEIKFNDGDIRGAAHLLFSHDTMAPDTPETLFALASKHPPSTATCPLPDPPHPSDRTPEALADETLAAIMSFRNGSAAGLDGISPQHLKDLLCGSTGQSGRLLLEDITQLVNLMLSGGVCEDITDLLYGANLCALKKKDGGIRPIAVGNTFRRLVSKICCRHIMNDLTPKLQPIQLGFGIKGGCEAAIHAARTFLDHDAGEVLLKVDVKNAFNSVDRGALLTEIKKNAPALYNYMYQCYGRPSNLIFKNNLIKSAVGCQQGDPLGPAIFSLAINPIISALNSKFNVWYLDDGTIGGEATSVFTDLENLIKKFKDIGLEINFSKCELFISNNLASLKKDQIIKKFNSIAPNIKILNNDSLRLLGAPVLNESIPGYVNEQITKFIGISDRLIKINPHIALFIIRYCLFVPKLTYVLRCCPLWKHENFLNIFDNILHKTLETILNCSLADRCWSQATLPVRLGGLGIRKISSVALPAFLSSIHSTNDLFVTLIRPSLGDVEASCLMEARDAWIVACPGKNLPTDLNSQRLWDEPICSQIQKQLLDSATNSVDRARLLASGERESGYWLHALPSANIGTQLDRVTLTLAVSLRLGARTNEPHRCRCGTNVNQLGHHGLSCQRSAGRLSRHASLNDVIRRAFATVSVPAILEPNGIARSDGKRPDGMTLIPWKCGKSLVWDATCVDTLAPSHIQATATRAGAAAAAAEATKRRKYAGLGSEYMFAPFGVETLGPWGPDAKRLFKEISSRLVDVSGDPRAGAYLGQRLSLAIQRGNAASLLGTLPHDGGDLANIFYL

SEQ ID NO: 25648 - protein, 811 aa, Ypsolopha scabrella
MVPTPDFERIINYSTDLNKKIEIKFNDGDIRGAAHLLFSHDTMAPDTPETLFALASKHPPSTATCPLPDPPHPSDRTPEALADETLAAIMSFRNGSAAGLDGISPQHLKDLLCGSTGQSGRLLLEDITQLVNLMLSGGVCEDITDLLYGANLCALKKKDGGIRPIAVGNTFRRLVSKICCRHIMNDLTPKLQPIQLGFGIKGGCEAAIHAARTFLDHDAGEVLLKVDVKNAFNSVDRGALLTEIKKNAPALYNYMYQCYGRPSNLIFKNNLIKSAVGCQQGDPLGPAIFSLTINPIISALNSKFNVWYLDDGTIGGEATSVFTDLENLIKKFKDIGLEINFSKCELFISNNLASLKKDQIIKKFNSIAPNIKILNNDSLRLLGAPVLNESIPGYVNEQITKFIGISDRLIKINPHIALFIIRYCLFVPKLTYVLRCCPLWKHENFLNIFDNILHKTLETILNCSLADRCWSQATLPVRLGGLGIRKISSVALPAFLSSIHSTNDLFGTLIRPSLGDVEASCLMEARDAWIVACPGKNLPTDLNSQRLWDEPICSQIQKQLLDSATNSVDRARLLASGERESGYWLHALPSANIGTQLDRVTFTLAVSLRLGARTNEPHRCRCGTNVNQLGHHGLSCQRSAGRLSRHASLNDVIRRAFATVSVPAILEPNGIARSDGKRPDGMTLIPWKCGKSLVWDATCVDTLAPSHIQATAARAGAAAAAAEATKRRKYAELGSEYMFAPFGVETLGPWGPDAKRLFKEISSRLVDVSGDPRAGAYLGQRLSLAIQRGNAASLLGTLPHDGGDLANIFYL

SEQ ID NO: 25649 - protein, 954 aa, Ypsolopha scabrella
MSQVAGQSHTGAGQNQSSDDRVQCPECHKFFRGQRGLKIHTGIKHPKIKSTPISAGTSQNSVLWKELGQLKYTTPIVKRIPRGARATVAASLSKCIKGVLDENDEEHWKQLLTFSYRILHVGKRKSQSGSLTQKIKNNCSLIQMVPTPDFERIINYSTDLNKKIEIKFNDGDIRGAAHLLFSHDTMAPDTPETLFALASKHPPSTATCPLPEPPHPSDRTPEALADETLAAIMSFRNGSAAGLDGISPQHLKDLLCGSTGQSGRLLLEDITQLVNLMLSGGVCEDITDLLYGANLCALKKKDGGIRPIAVGNTFRRLVSKICCRHIMNDLTPKLQPIQLGFGIKGGCEAAIHAARTFLDHDAGEVLLKVDVKNAFNSVDRGALLTEIKKNAPALYNYMYQCYGRPSNLIFKNNLIKSAVGCQQGDPLGPAIFSLAINPIISALNSKFNVWYLDDGTIGGEATSVFTDLENLIKKFKDIGLEINFSKCELFISNNLASLKKDQIIKKFNSIAPNIKILNNDSLRLLGAPVLNESIPGYVNEQITKFIGISDRLIKINPHIALFIIRYCLFVPKLTYVLRCCPLWKHENFLNIFDNILHKTLETILNCSLADRCWSQATLPVRLGGLGIRKISSVALPAFLSSIHSTNDLFGTLIRPSLGDVEASCLMEARDAWIVACPGKNLPTDLNSQRLWDEPICSQIQKQLLDSATNSVDRARLLASGERESGYWLHALPSANIGTQLDRVTFTLAVSLRLGARTNEPHRCRCGTNVNQLGHHGLSCQRSAGRLSRHASLNDVIRRAFATVSVPAILEPNGIARSDGKRPDGMTLIPWKCGKSLVWDATCVDTLAPSHIQATAARAGAAAAAAEATKRRKYAELGSEYMFAPFGVETLGPWGPDAKRLFKEISSRLVDVSGDPRAGAYLGQRLSLAIQRGNAASLLGTLPHDGGDLANIFYL

SEQ ID NO: 25650 - protein, 1124 aa, Adalia bipunctata
MNGSSRELPSVGPAQSRTRVRQHWTRDMNVSLINAYYQVTEGETNTKKYADRLVERWTESYPTKNFTGKHLIAQVKNIKVRKLLAPDELAAMKAEAIRRSPTSAIRNIRRSINRRSTVHPQMIMFEEESEPEPDEVSAEILALFGETSYKWRGVSMNARPEIARMKGSSEQKSLMQIINNALKETIESSVDFEELCHTVYCAATVANTIQQTKPNTKNQNIQQPRPPWEERLERKITALRREIGILHTFATAENPSKKVEKKVRAYAKKNGLKKNSPNFHQNLKIHGERLKQKIAALGKRLRRYHKRTQRYRNNNLFANNQKAFFRSLEEEIEEAENPPSPEVMEEYWSTVWSQSIEHNRKASWIDSEVQKLSNLQEMEAVIITEEDVRGTVKRLKNWTSPGVDGIHNYWWKVLTSTHKVLARLTQNALINPQDIPRYFTQGITYMLPKGGEHSLAKNYRPITCLPSAYKIMTSTISYKISGHLKKHHIMAWEQNGCKSKGRGSKELLIIDDVLTKQAKKRKKNLSMAWVDYQKAYDSVPHSWLLEVLGIYKVDQRVIELLRYLMSSWRTNIVVNNKSTSYKTGEVKIKRGIFQGDSLSPLWFCMAMNILSSILNRSAYGYSMNDRTTLTHLFYMDDLKIYARGRKQLEGLLELVRKFSDDIGMSLGMEKCAAVNIKRGKFTEETDIELKDGRQIAGLKEEDRYRYLGIQQTFEIKQQENKEEAKKELYRRVRKVLKTQLSARNKMEAINIWAIPSFTYTAAILKWSKTDLQLVDRWIRTSLTEYGMLHPNSAVERVYLPRKQGGRGLTSVEDTCLREERNIKTYFLNSCLPVHQWVAAQESIERLAQTNDIDESENSVEKLRQNWQRRALHGRFYASLHQEEVDQMSSNTYLNQGYLFPQTEGTLLAIQDQVIPTRTYIKNVMKQPVADTKCRLCKSAEESVQHLTSGCSAIAGTKYLARHNNMGKVVHQLLCLQNQLLPHFTPHHVYVPQTVMENEKVKIYWDLTVVTDRAVEHNRPDMVVFNKTSNTAIIIDFTVPQDYNLGKAYGEKINKYEALSREIRDMWRLGKVEIMPLIISANGLVHRGTTRHLQELKLPKNTINWMQKAVILGTVNIVRQVIYPH

SEQ ID NO: 25651 - protein, 1131 aa, Coccinella septempunctata
MNGSSRELPSAGPAQSRTRVRQHWTRDMNVCLINAYYQVTEGETNTKRYADRLVERWTESYPTMNFTGKHLIAQIKNIKVRKLLAPDELAAMKTEAIRRSPISAIKNIRRSINRRSTVHPQMIVFEESEQANGEPEPDEVSAEILALFQETNFKWRGVSMSARPEIAKMKGSRETKNLMQIINDALRETIESSVDFEELCHIVYCAAIVANTIQQTTPKTKNQNNHQQPRPPWEERLERKITALRREIGILHTFTTTENLSKKVEKKVGAYAKKIGLKKNCPNFHQNLKTYVERLKQKIAALGKRLRRYHKRTQRYRNNNLFANNQRAFFRSLEGEIDGAENPPSPEVMEEYWSTVWSQSIEHNRKASWIETEVQKLGNLQEMEAVVITEEDVRGTVKRLKNWTSPGVDGIHNYWWKVLTSTHKVLARLTQDALMNPRDIPRYFKQGITYMLPKGGERSQAKNYRPITCLPSAYKIMTSTISFKISGHLKKHHIMAWEQNGCKSKGRGSKELLIIDDVLTKQAKKKKKNLSMAWVDYRKAYDSVPHSWLLEVLEIYKVDRRVIELLRYLMSSWRTNIVVNNKSTSYKTREVKIQRGIFQGDSLSPLWFCMAMNILSSILNRSAYGYSMNDRTTLTHLFYMDDLKIYARGRRQLEGLLELVRKFSDDIGMSLGLEKCAAVNIKRGKFAEETDIELKDGRQIAGLKEEDRYRYLGIQQTFEINQQENKEEAKKELYRRVRKVLKTQLSARNKMEAINIWAIPSFTYTAAILKWSKTDLQLVDRWIRTSLTEYGMLHPNSAIERIYLPRKQGGRGLTSVEDSCLKEERNIKTYFHNSYLPVHQWVAAQESIERLAQTNDTDESVTESSVEKLKQNWQRKALHGRFYASLHQEEVDQISSNTYLSQGYLFPQTEGTLLAIQDQVIPTRTYIKSIMKQPVADTKCRLCRSVEESVQHLTSGCSAIAGTKYLTRHNNMGKVVHQLLCLQNQLLPHFTPHHVYAPQTVMENEKVKIYWDLTVITDRAVEHNRPDMVVLNKTSNTAIIIDFAVPQDYNLGKAYGEKINKYEALSREIKDMWRLGKVEIMPLIISANGLVHRNTTRHLQELKLPKNTINWMQKAVILGTVNIVRQVIYPH

SEQ ID NO: 25652 - protein, 1134 aa, Coccinella septempunctata
MAGSSAEHPSMDPAQTRTRVRQHWTREMNIGLINAYYKVTQGETNTKKYAELLASRWVEMYPDKKFTGKHLIAQVKNIKTRKLLAPDELEAMKADAIRSSPVTNVRTIRRSLQGRSSIRPQELRFSENDENNQMQELNIPDEATEGILSLFRETKIKWEGTTMEARPKIGRIKNNPETKAMMHAMDTALKETISASADLEELCLVVYCAAVTANTIQQTTPGTEKRGRKQDRKPPWEKRLEKRVEELRREIGVLHAYLHEQKPSKRVERKTKVYSKRAGLKKNDANYRTNMRTHLEKLKQKIAALGNRLRRYHKRTLRYRQNNIFANNQREFYRSLEEEPKKNTDPPATGKMIEYWSRVWSHSATHNENASWIKTEAEQQRNLQEMGPVCTTEENVRDTVKRLKNWAAPGVDGIHNFWWKALPSTHEVLSRFIQKALENPQTVPHFFTRGITYMVPKKGDPSKPENYRPITCLPSIYKIFTSTISYQIGLHLKKNNIMAWEQNGCKNKGKGSKELLIIDKAVTGQAKSRKKNISMAWIDYQKAYDSIPHSWLLHVLEIYRVNRRIIDLLGSLMSSWRTTITMTEKAASYHTEELRIRRGIFQGDSLSSRWFCLAVNILSKILNRSAYGYSINDITKLSHLFYMDDLKLYARGRKQLEGELELVRKFSEDIGMSFGLQKCAVIEVKRGKMVEGGNIRISDGREIAELSFGERYKYLGIQQTYEIKQRENKEGAKNELMRRVRKILKTQLSAKNKIEALNIWAIPSFTYTAGVLTWSKTDLQQMDRCIRTTLTEHGMLHPNSATERLYLPRKQGGRGLTSIEQACLQEETHLRAYFRGAHLPVHRWVATQRDIHILDREEGAGEPETENRIERLELSWQAKALHGRFYASLHQPEVDLAQSNTYLTLGYLYPQTEGTLFAIQDQVVPTRNYSKYIMKLPVENTKCRLCSIAEETVQHISSACSAIAATKYLARHNNMGKVVHQLLGLQFQLLPHFTPHHLYSPQTLMENENFKLYWDMTVITDIGVEHNRPDVVVWNKMENTVVILDFAVPLDCNLKKSYGEKINKYEALSRQMRDMWKLNRVDIKPLIISTNGLVHKNTVKHLRELKLPEGTITWMQKAVILGTVNIIRQVIYPH

SEQ ID NO: 25653 - protein, 1134 aa, Coccinella septempunctata
MAGSSAEHPSMDPAQTHTRVRQHWTREMNIGLINAYYKVTQGETNTKKYAELLASRWVEMYPDKKFTGKHLIAQVKNIKTRKLLAPDELEAMKADAIRSSPVTNVRTIRRSLQGRSSIRPQELRFSENDENNQMQELNIPDEATEGILSLFRETKIKWEGTTMEARPKIGRIKNNPETKAMMHAMDTALKETISASADLEELCLVVYCAAVTANTIQQTTPGTEKRGRKQDRKPPWEKRLEKRVEELRREIGVLHAYLHEQKPSKRVERKTKVYSKRAGLKKNDANYRTNMRTHLEKLKQKIAALGNRLRRYHKRTLRYRQNNIFANNQREFYRSLEEEPKKNTDPPATGKMIEYWSRVWSQSATHNENASWIKTEAEQQRNLQEMGPVCTTEENIRDTVKRLKNWAAPGVDGIHNFWWKALPSTHEVLSRFIQKALENPQTVPHFFTRGITYMVPKKGDPSKPENYRPITCLPSIYKIFTSTISYQIGLHLKKNNIMAWEQNGCKNKGKGSKELLIIDKAVTGQAKSRKKNISMAWIDYQKAYDSIPHSWLLHVLEIYRVNRRIIDLLGSLMSSWRTTITMTEKAASYHTEELRIRRGIFQGDSLSSRWFCLAVNILSKILNRSAYGYSINDITKLSHLFYMDDLKLYARGRKQLEGELELVRKFSEDIGMSFGLQKCAVIEVKRGKMVEGGNIRISDGREIAELSFGESYKYLGIQQTYEIKQRENKEGAKNELMRRVRKILKTQLSAKNKIEALNIWAIPSFTYTAGVLTWSKTDLQQMDRGIRTTLTEHGMLHPNSATERLYLPRKQGGRGLTSIEQACLQEETHLRAYFRGAHLPVHRWVATQRDIHILDREEGAGEPETENRIERLELSWQAKALHGRFYASLHQPEVDLAQSNTYLTLGYLYPQTEGTLFAIQDQVVPTRNYSKYIMKLPVENTKCRLCSIAEETVQHISSACSAIAATKYLARHNNMGKVVHQLLGLQFQLLPHFTPHHLYSPQTVMENENFKLYWDMTVITDIGVEHNRPDVVVWNKMENTVVILDFAVPLDCNLKKSYGEKINKYEALSRQMRDMWKLNRVDIKPLIISTNGLVHKNTVKHLRELKLPEGTITWMQKAVILGTVNIIRQVIYPH

SEQ ID NO: 25654 - protein, 1206 aa, Harmonia axyridis
MMSTWTVSEIKIIQDYITNKSGPITVDDHKILQQTLVKRSLPSIKKKCLDLKHSINTNQPCRIKQSSSWTSDEERRLVENYINRNEKQVTKRIRAILNAFPGRTEKALATKLRDKYPEIYYGKNIPTENETQNVEESQAERSQQRDPSIESTLKCAINQTQDGDICHNTIPESDDLTTVCLKELNESELVKVRTKFDTLFRRIPKKKRNIKKFYVRPCHLNYIEYVDRVLGENISKIENGSVSHIKKRKDIKKTIYVAGLLLQKHILGKTDRQDPSYIKTEKKIKSLELRVKNAEAVVNWKGGIFKKQWKDEVEEMRKLKMKPKQYIVSTNDRIRILKEKAEHQRKQAQAQKIRYLFNNRPSMKILEKSVVASPESSVVTEHYTKMYTQCNESHETPIFNSWLQKFQKFTNGRDYSGQLEEQNLERIINEAITKTSPWKSPGEDCIPNNLYKVLPCAKEYLKKFIISIVQGKQDLSEADVRANIVLVHKKGDENDPANYRPIALLNTEYKILTSTIASILKNHLPEWAIPKEQLARQHIWGTIHGMLVDKSVTQLARMRRKKNYSAWYDFKKAYDSISHRQLKRLIGNLPLDQNIKKVLRGSMNLWSVQIKIGKDKTNPIYVKRGVYQGDSISPLLFILISGGIIEHIKTSPTIMKSTRGQHDILAFMDDIKCHANTKQSMKIITKELEKCSAEIGLSLNVNKCGIYSRNGLEPQEDVHDVHFLPEIREGYRYLGLAQLERDTTDNLENITEKIKKKSETIFGSNLTTRQKIQLFNSSIIPAAIYVLGNLFPEEKRATTLKNCRDLDTMFRKMLVDYDMKGKTTSNARVYLSPLMGGLGMKSVEIETEIHYIRKGIYLQSHPDMTNVYEAYKSLQGAGWRNPLSDCHFVLEKYGCNTEQYPMGSYKKSSDNIIKIIRKQHHDQLIEKWSENMNYGRIVADEGNKITFPAFTSPYMDSWRLSLLHSAAEEQLHGLGCIPGRTRVCRRGCGNTETAYHVTSSCPTNMYISRHDNVVHWLLKTILTTTNAPEDIIMGLQFGKATLMTDYEQQGRSISIRAGHKILTEKKMYHNKPDIMIKLSNPDRIILIEVAIAHIQNYRLQEKIKRNRYAVNSTIKIDNKNVDNVVRDVNIVGELEKIHRCPVDLGIFVVGCSGEMIVTEEQVKFAKILSKVLGLTNSEIQHLFTKRSYSVCLSTSQILLKHLNLKI

SEQ ID NO: 25655 - protein, 1199 aa, Propylea japonica
MATWKVSEIEIIRDYITNKQGPITADDHKILQQTLTKRSIPAIKKKCLELKNSNNANHPCKPKQTTTWTTEEEERLVYEYSNRDEKQVTKRIKAIINSFPDRTEKAIATKLREKYPDIYYMKRAPIQLETNESEAPIDTETKESNPNAEAINHSQVDVNTCHITNPAVEVRETVSTKELDESELVKVRMKFDTLYRRIPKKKRKIRKFYIRPCHQNYLAYVNRILEENISKIENGPLTYINKRKNIKKMIYAAGILLENFTLQKNERRKPKFVVTNKKIESLEQRVKNTESIMNWKGGIFKKQYKQELEEMRKLKMKPKQYIISTKDRIRILKEKAEHQREQAHIQQLRYSFNNRPSTKILEKPIFKSPDLPEVYDYFRKLYAQPEESHETPIFNSWLQKFQKFSEGHSYHEQLEEAQLRSTIEEAISRTSPWKSPGEDCIPNYLYKILPCAKEYLTRFIILTAQGKQDLTEADVRANIVLIHKKGDSNNPANYRPIALLNTEYKILTSTIASILKKYLPEWAIPKEQLARQNIWGTIHGMLMDKSVTQLARMRRKKNYSTWFDFEKAYDSISHRQLKRLIGKLPLHQNLKKMLKGSMNLWSVQVRVDKDKKTKPIYVKRGVYQGDSISPLLFILISASIIEYIKTSPTIIRSTRGQHSILAFMDDFKCHANTKQSMKIILDELKRSAAEIGLSLNVNKCGIYSRNGLESQEDDDIPFLPEIKEGYTYLGLTQLERDTTQNLENISTKIKEKTSIIFDSPLTTRQKIHLFNNTIIPAVIYVLGNLYPDEKRATTLKNCRDLDTMFRKMLIDFNMKGKTTSNARVYLSPIQGGLGMKSVELETEIHYIRKGVYLQHHPDMTNVHKSYKVLQDAGWRNPLSDCQFVLEKYGYKEDHLNLDEYKKICDKIISHVRRQHSDQLLGKWSENMHYGRIVANEGKKITFPAFESPYMDSWRLSLLHSAAEEQLHGLGCIPGRTRACRRGCGNTETAYHVISSCPTNMYISRHDNVVHWLLKTILTSTNAPEEIITGLQFGKATLMTDYKLQERDISVRAGAKILSEKKLYHNKPDIMIKLSNPDRIILIEVAIAHIQNYRLQEKIKRNRYAVNSTIKIDNKNVDSVSRDVNLVSELEKIHRCPVDFGIFVVGCCGEVIKTEEQVKFASILSKVIGLTESEIQHLISKCSYSVCLSTSHILLRHLNS

SEQ ID NO: 25656 - protein, 1205 aa, Harmonia axyridis
MSAWTVCEIKIIQDYITNKSGPITVDDHKILQQTLVKRSLPSIKKKCLDLKHSINTDQPCRIKQSSSWTSDEERRLVEHYINRDEKQVTKRIKAIIHAFPGRTEKALATKLRDKYPEIYYGKNIPTENETQNVEESQAERSQQREPSIESTLKCAINQTQDGDICHNTIPASDDLTTVCLKELNESELVKVRTKFDTLFRRIPKKKRNIKKFYVRPCHLNYIEYVDRVLGENISKIENGFFSHIKKRKEIKKTIYVAGLLLQKHILGKTDRQDPIYIKTEKKIKSLELRVKNAEAVVNWKGGIFKKQWKDEVEEMRKLKMKPKQYIVSTNDRIRILKEKAEHQRKQAQAQKIRYLFNNRPSMKILQKSVVASPEPSVVTEYYTKMYTQCNESHETPIFNSWLQKFQKFTNGRDYSGQLEEQNLERIINEAITKTSPWKSPGEDCIPNYLYKVLPCAKEYLKKFIISIVRGKQDLSEADVRANIVMVHKKGDENDPANYRPIALLNTEYKILTSTIASILKNHLPEWAIPKEQLARQHIWGTIHGMLVDKSVTQLARMRRKKNYSAWYDFKKAYDSISHRQLKRLIGNLPLDQNIKKVLRGSMNLWSVQIKIGKDKTNPIYVKRGVYQGDSISPLLFILISAGIIDHIKTSPTIMKSTRGQHDILAFMDDIKCHANTKQSMKIITTELEKCSAEIGLSLNVNKCGIYSRKGLEPQEDVNDVPFLPEIKEGYTYLGLAQLERDTTVNLENITEKIRQKSETIFESNLTTRQKIQLFNSSIIPAAIYVLGNLFPEEKRATTLKNCRDLDTMFRKMLVDYDMKGKTTSNARVYLSPLMGGLGMKSVEIETEIHYIRKGIYLQSHPDMTNVYEAYKSLQGAGWRNPLSDCQFVLEKYGCNTEQYPMGSYKKSSDNIIKVIRKHHHDHLIEKWSENMNYGRIVADEGNKITFPAFTSPYMDSWRLSLLHSAAEEQLHGLGCIPGRTRVCRRGCGNNETAYHVTSSCPTNMYISRHDNVVHWLLKTILTTTNAPEDIIMGLQFGKATLMADYEQQGRGISIRAGHKILTEKKMYHNKPDIMIKLSNPDRIILIEVAIAHIQNYRLQEKIKRNRYAVNSTIKIDNKNVDNVVRDVNIVGELEKIHRCPVDLGIFVVGCSGEMIVTEEHVKFAKILSKVLGLTNSEIQHLFTKCSYSVCLSTSQILLKHLNLKM

SEQ ID NO: 25657 - protein, 1207 aa, Harmonia axyridis
MSTWTVSEIKIIQDYITNKSGPITVDDHNILQQTLVKRSLPSIKKKCLDLKHSINTEQPCKTKQSSSWTSDEERRLVELYINRDEKQVTKRIRAILNAFPGRTEKAIATKLREKYPEIYYGKNIPTKIDPRTQNVEESQAERSQQRDPSIESTLKCAINQTQDGDICHNTIPESDDLTTVCLKELNESELVKVRTKFDTLFRRIPKKKRSIKKFYVRPCHLNYIEYVDRVLGENISKIENGFVSHIKKRKEIKKTIYVAGLLLQKHILGKTDRQDPIYIKTEKKIKSLELRVKNAEAVVNWKGGIFKKQWKDEVEEMRKLKMKPKQYIVSTNDRIRILKEKAEHQRKQAQAQKIRYLFNNRPSMKILEKSVVASPEPSVVTEHYTKMYTQCNESHETPIFNSWLQKFQKFTNGRDYSGQLEEQNLERIINEAITKTSPWKSPGEDCIPNYLYKVLPCAKEYLKKIIISIVRGKQDLSEADVRANIVLVHKKGDENDPANYRPIALLNTEYKILTSTIASILKNHLPEWAIPKEQLARQHIWGTIHGMLVDKSVTQLARMRRKKNYSAWYDFKKAYDSISHRQLKRLIGNLPLDQNIKKVLRGSMNLWSVQIKIGKDKTNPIYVKRGVYQGDSISPLLFILISAGIIDHIKTSPTIMKSTRGQHDILAFMDDIKCHANTKQRMKIITKELEKCSAEIGLSLNVNKCGIYSRKGLEPQEDVNDVPFLPEIKEGYTYLGLAQLERDTTVNLENITEKIRQKSETIFGSNLTTRQKIQLFNSSIIPAAIYVLGNLFPEEKRATTLKNCRDLDTMFRKMLVDYDMKGKTTSNARVYLSPLMGGLGMKSVEIETEIHYIRKGIYLQSHPDMTNVYEAYKSLQGAGWRNPLSDCQFVLEKYGCNTEQYPMGSYKKSSDNIIKVIRKHHHDHLIEKWSENMNYGRIVADEGNKITFPAFTSPYMESWRLSLLHSAAEEQLHGLGCIPGRTRVCRRGCGNNETAYHVTSSCPTNMYISRHDNVVHWLLKTILTTTNAPEDIIMGLQFGKATLMADYEQQGRGISIRAGHKILTEKKMYHNKPDIMMKLSNPDRIILIEVAIAHIQNYRLQEKIKRNRYAVNSTIKIDNKNVDNVVRDVNIVGELEKIHRCPVDLGIFVVGCSGEMIVTEEQVKFAKILSKVLGLTNSEIQHLFTKCSYSVCLSTSQILLKHLNLKM

SEQ ID NO: 25658 - protein, 1328 aa, Enchytraeus crypticus
MSRQNWPLSQTIGKLNGVCRVCLAVRQVHLRDGLIHKHGPRKSPCPGSGQPPLAHNISLNSRSTIPSPDHSISSQPDNLTDSSNAKFDHTVNCSAGSNLAANCKRKSCRTGSNSTASRNFIVSNAVGSSSFNANSASSKSSDLICPHDTDSSTDSSAIRHPTLSQPIIKHIPRSARAPCARALFAILTNISRNSENLVNWDNLFNFAFSTLSVPAKVGNKVSLANLIRNRLSKDQITHNIDVPQEEALGKKRLFCKSSLSASVQSKLEEGNIRAAVRILCSDDSLAENNENTFKQLLDKHPTKAESPNNLSSTPTPAIQVEEDIVLKAVLSFTAGTAGGPDGLRPQHLKDLVSCKEVGAQLLTAITVFINCLIRGGCPIQVRPVLFGANLIAIQKKNGDIRPIAIGYTWRRLAAKCVNMYALPKISDYLRPIQLRAGVSGGCEAAIHATRQFITNLTPGFSVVKLDFANAFNYLSRSKMLETIHRLLPEIFSFCSSAYSQPTLLKFGNQFIHSSEGVQQGDPLGPLLFCLTIQPVLTQLQSTFRLSYLDDLTLGGLDSTVANDVRIILSKGAELGLRLNLNKCEIISKTITHDDPLLESLMKTSITDAELLGAPLTVGHAMDAKLEKHVADLQRAAVRLKDIQRHDALILLRYSVSAPKVMHTLRSSPCFQHPLLQNIDKILRDCLCSLINADLSDSQWQQASLPVRNGGLGIRSISQLSPSAYLSSYNSTRSLQEEILRSSVSSIDPVYIKAAESMWCSEVEASAPVGPAAGIQRNWDDCIVKKSFNQILNSLSDLKEKARLIAVSPPHSSDWLHALRIASCGLRLDDESIRIAVGLRLGTKLCEIHQCVCGSLVDPKGHHGRSCRKSAGRSSRHHNINHIIWHALIKANIPSKLEPTGISRSDGKRPDGLTLIPWKGGKSLLWDVTVTDTVAKSYLNVSSVSAGGAAELAADRKISKYHELSRSYCFIPLALETLGPMNKEGSEFISSLGHHLSAATGDKRETSLLRQRLSICLQRYNSICVRGTFSANRTDVTTENTLASDYLIRSTSLSNSLAHTQNLISPRHSSTVYPHAQLRSEYHHHGQTDNEVLHAHQLVSEDLHELQPELTAPARGLAKADATEESDVIKRVLSTSPSTDAYPPQSALFKYDAHNPYKTSDLTSTPTVTAIYKESSLGLLESDSEAIQSVRRGYKPISLRRLEQGVLGYSLRERFSAASQPCPPRCTNAVSPRCSKAETLMGASRDGRNKFHSSRKRQVSRLTLVDPRRNLSSQPVEGLEESESVVKRMNEMFTNRTWVTTYHNDQRRVKTVKAKYYGTHERTMEQRPD

SEQ ID NO: 25659 - protein, 1128 aa, Enchytraeus crypticus
MSRQNWPLSQTIGKLNGVCRVCLAVRQVHLRDGLIHKHGPRKSPCPGSGQPPLAHNISLNSRSAIPSPDHSISSQPDNLTDSSNAKFDHTVNCSAGSNLAGNCKRKSCRTGRNSTASRNFIVSNAVGSSSFNANSASSKSSDLICPHGTDSSTDSSAIRHPTLSQPIIKHIPRSARAPCARALIAILTNISRNSENLVNWDNLFNFAFSTLSVPAKVGNKVSLANLIRNRLSKDQITHNIDVPQEEALGKKRLFCKSSLSASVQSKLEEGNIRAAVRILCSDDSLAENNENTFKQLLDKHPTKAESPNNLSSTPTPAIQVEEDIVLKAVLSFTAGTAGGLDGLRPQHLKDLVSCKEVGVQLLTTITAFINCLIRGGCPIQVRPVLFGANLIAIQKKNGDIRPIAIGYTWRRLAAKCVNMYALPKISDYLRPIQLGVGVSGGCEAAIHATRQFITNLTPGFSVVKLDFANAFNCLSRSKMLETIHRLLPEIFSFCSSAYSQPILLKFGNQFIHSSEGVQQEDPLGPLLFCLTIQPVLTQLQSTFRLSYLDDLTLGGLDSTVANDVRIILSKGAELGLRLNLNKCEIISKTITHDDPLLESLMKTSITDAELLGAPLTVGHAMDAKLEKHVADLQRAAVRLKDIQRHDALILLRYSVSAPKVMHTLRSSPCFQHPLLQNIDKILRDCLCSLINADLSDSQWQQASLPVRNGGLGIRSISQLSPSAYLSSYNSTRSLQEEILRSSVSSIDPVFIKAAESMWCSEVEASALVGPAAGIQRYWDDCIVKKSFNQILNSLSDLKEKARLIAVSSPHSSDWLHALPIASCGLRLDDESIRIAVGLRLGTKLCEIHQCVCGSLVDPKGHHGLSCRKSAGRSSRHHNINHIIWHALIKANIPSKLEPTGISRSDGKRPDGLTLIPWKGGKSLLWDVTVTDTVAKSYLNVSSVSAGGAAELAADRKISKYHELSRSYCFIPLALETLGPMNKEGSEFISSLGHHLSAATGDKRETSFLRQRLSICLQRYNSICVRGTFSANRTDSYVTTENTLASDYLIRSTSLSNSLAHTQNLISPRHSSTVYPHAQLRSEYHHHGQTDNEVLHAHQLVSEDLHELNPNLRHLPEVLPRLMQRKKVM

SEQ ID NO: 25660 - protein, 1461 aa, Enchytraeus crypticus
MSRQNWPLSQTIGKLNGVCRVCLVVRQVHLRDGFIHKHGPRKSPCPGSGQPPLAQNISLNSRSAIPSPDHSISSQPDNLTDSSNAKFDHTVNCSAGSNLAANCKRKSCRTGRNSTASRNFIVSNAVGRCSFNANPASSKSSDLICPHDTDSSTDSSAIRHPTLSQPIIKYILRSARAPCARALIAILTNISRNSENLVNWDNLFNFASSTLSVPARVGNKVSLANLIRNRLSKDQISHNIDVPQEEALGKKRLFCKSSLSASVQSKLEEGNIRAAVRILCSDDSLAENNENTFKQLLDKHPTKAVSPNNLSSTPTPAILVEEDIVLKAVLSFTAVTAGGPDGFRLHLKDLISCKEVGAQLLTAITAFINCLIRGGCPIQVRPVLFGANLIAIQKKIGDIRPIAIGYTWRRLAAKCVNMYALPKISDYLRPIQLGVGVSGGCEAAIHATRQFITNLTPGFSVVKLDFANAFNCLSRSKMLETIHRLLPEIFSFCSSAYSQPTLLKFGNQFIHSSEGVQQGDPLGPLLFCLTIQPVLTQLQSTFRLSYLDDLTLGGLDSTVANDVRIILSKGAELGLRLNLNKCEIISKTITHDDPLLESLMKTSITDAELLGAPLTVGHAMDTKLEKHVADLQRAAARLKDIQRHDALILLRYSVSAPKVMHTLRSSPCFQHPLLQNIDKILRDCLCSLINADLSDSQWQQASLPVRNGGLGIRSISQLSPSAYLSSYNSTRSLQEEILRSSVSSIDPVYIKAAESMWCSEVEASAPVGPAAGIQRNWDDCIVKKSFNQILNSLSDLKEKARLIAVSSPHSSDWLHALPIASCGLRLDDESIRIAVGLRLGTKLCEIHQCVCGSLVDPKGHHGLSCRKSAGRSSRHHNINHIIWHALIKANIPSKLEPTGISRSDGKRPDGLTLIPWKGGKSLLWDVTVTDTVAKSYLNVSSVSAGGAAELAADRKISKYHELSRSYCFIPLALETLGPMNKEGSEFISSLGHHLSAATGDKRETSFLRQRLSICLQRYNSICVRGTFSANRTDSYVTTENTLASDYLIRSTSLSNSLAHTQNLISPRHSSTIYPHAQLRSEYHHHGQTDNEVLHAHQLVSEDLHELQPELTAPARGLAKADATEESDVIKRVLSTSPSTDAYPPQSALFKYDAHNPYKTSDLTSTPTVTAIYKESSLGLLESDSEAIQSVCRGYKPISLRRLEQGVLGYSLRERFSAASQPCPPRRTNAVSTRCSKAETLMGASRDGRNKFHSSRKRQVSRLSLVDPRRNLSSQPVEGLEESESVVKRMNEIFTNRTWVATYHNDQRRIKTVKAKNYGTHERTMEQRPDECGGSSGTLAGYPSSPSHMSRSPCNQRHAPSNPSHASPRHSLQSLSRNTTGEAGRRALGLTSEHAESANGIVERIYSVAESEPGELQDTELEELNEQITGEQLNLDNEITDVLGDGRDVVQKHYVDAVSVLT

SEQ ID NO: 25661 - protein, 1441 aa, Enchytraeus crypticus
MSSCAASPLEGWFIHKHGPRKSPCPGSGQPPLAQNISLNSRSAIPSPDHSISSQSDNLTDSSNAKFDHTVNCCAGSNLSANCKRKSCRTGRNSTASRNFIVSNAVGSSSFNANPASSKSSDLICPHDTDSSTDSSAIRHPTLSQPIIKYISRSARAPCARALIAILTNISRNSENLVNWDNLFNFASSTLSVPAKVGNKVSLANLIRNRLSKDQISHNIDVPQEEALGKKRLFCKSSLSASVQSKLEEGNVRAAVRILCSDDSLAENNENTFKQLLDKHPTKAVSPNNLSSTPTPAILVEEDIVLKAVLSFTAGTAGGPDGFRPQHLKDLISCKEVGAQLLTAITAFINCLIRGGCPIQVRPVLFGANLIAIQKKNGDIRPIAIGYTWRRLAAKCVNMYALPKISDYLRPIQLGVGVSGGCEAAIHATRQFITNLTPGFSVVKLDFANAFNCLSRSKMLETIHRLLPEIFSFCSSAYSQPTLLKFGNQFIHSSEGVQQGDPLGPLLFCLTIQPVLTQLQSTFRLSYLDDLTLGGLDSTVANDVRIILSKGAELGLRLNLNKCEIISKTITHDDPLLESLMKTSITDAELLGAPLTVGHAMDTKLEKHVADLQRAAARLKDIQRHDALILLRYSVSAPKVMHTLRSSPCFQHPLLQNIDKILRDCLCSLINADLSDSQWQQASLPVRNGGLGIRSISQLSPSAYLSSYNSTRSLQEEILRSSVSSIDPVYIKAAESMWCSEVEASAPVGPAAGIQRNWDDCIVKKSFNQILNSLSDLKEKARLIAVSSPHSSDWLHALPIASCGLRLDDESIRIAVGLRLGTKLCEIHQCVCGSLVDPKGHHGLSCRKSAGRSSRHHNINHIIWHALIKANIPSKLEPTGISRSDGKRPDGLTLIPWKGGKSLLWDVTVTDTVAKSYLNVSSVSAGGAAELAADRKISKYHELSRSYCFIPLALETLGPMNKEGSEFISSLGHHLSAATGDKRETSFLRQRLSICLQRYNSICVRGTFSANRTDSYVTTENTLASDYLIRSTSLSNSLAHTQNLISPRHSSTIYPHAQLRSEYHHHGQTDNEVLHAHQLVSEDLHELQPELTAPARGLAKADATEESDVIKRVLSTSPSTDAYPPQSALFKYDAHNPYKTSDLTSTPTVTAIYKERSLGLFESDSEAIQSVCRGYKPISLRRLEQGVLGYSLRERFSAASQPCPPRRTNAVSPRCSKAETLMGASRDGRNKFHSSRKRQVSRLSLVDPRRNLSSQPVEGLEESESVVKRMNEIFTNRTWVATYHNDQRRIKTVKAKNYGTHERTMEQRPDECGGSSGTLAGYPSSPSHMSRSPCNQRHAQSNPSHASPRHSLQSLSRNTTGEAGRRALGLMSEHAESANGIVERIYSVAESEPGELQDTELEELNEQITGEQLNLDNEITDVLGDGRDVVQKHYVDAVSVLT

SEQ ID NO: 25662 - protein, 720 aa, Apotomis turbidana
MSFKNGSAGGLDGLSPQHLKDLLGNSSGDAGGLLLDSITQLINLMLSGKVCSDVLSVLYGANLCALKKKDGGIRPIAVGFTFRRICSKICCRYIFEPLTKKLQPIQLGFGSKGGCEAAVHAARAFVNDDSCEVLLKVDVKNAFNSVDRGALLKQVNDATPSIYKYLWQCYHESSQLLFKNHPLLSAVGCQQGDPLGPAIFSLAIHPVISSLKSQFNSWYLDDGTLGGDWKTVLADLKILNDSFSSIGLELNFSKCELFISNNIAASDSDTNNIIHRFNSLAPNIKIIDKTTLRLLGAPIFPESIPPLIKEHQTTHKDYSDRLLKIHPHMALAVIKFCLFVPKFTYILRCSPIWKYPHLIEPLDSVLKTTLTSILNINLDSRAWNQASLPIRYGGLGIRQVVSVALPAFLSSFHSTQDLANKNFSPSSNNDCIVCVNEAREEWTRACLNAPFPVSTKSQRLWDEPLCQLVLKDLTDTAQNSTERARLLAVAEPESGFWLHALPSPNIGTLLDKTTLTLVTSLRLGTKTTEPHRCRCGSTVDELGHHGLCCQKSAGRISRHASLNDVIRRALVSVNVPAILEPNGIARDDGKRPDGMTLVPWRLGRTLIWDATCVDTLAASHLQATSSKAGAAAATAENLKRRKYAALGEGYIFAPFGVETFGPWGPGAKILFKEISERLVEASGDQRAGSYFGQRLSLVIQRGNAASLLGTIYTEGDLAGI

SEQ ID NO: 25663 - protein, 686 aa, Apotomis turbidana
MSFKNGSAGGLDGLSPQHLKDLLGNSSGDAGGLLLDSITQLINLMLSGKVCSDILSVLYGANLCALKKKDGGIRPIAVGFTFRRICSKICCRYIFEPLTKKLQPIQLGFGSKGGCEAAVHAARAFVNDDSCEVLLKVDVKNVFNSVDRGALLKQVNDATPSIYKYLWQCYHESSQLLFKNHPLLSAVGCQQGDPLGPAIFSLAIHPVISSLKSQFNSWYLDDGTLGGDWKTVLADLKILNDSFSSIGLELNFSKCELFISNNIAASDSDTNNIIHRFNSLAPNIKIIDKTTLRLLGAPIFPESIPPLIKEHQTTHKDYSDRLLKINPHMALAVIKFCLFVPKFTYILRCSPIWKYPHLIEPLDSVLKTTLTSILNINLDSRAWNQASLPIRYGGLGIRQVVSVALPAFLSSFHSTQDLANKIFSPSSNNDCIVCVNEDREEWTRACLNAPFPVSTKSQRLWDEPLCQLVLKDLTDTAQNSTERARLLAVAEPESGFWLHALPSPNIGTLLDKTALTLATSLRLGTKTTEPHRCRCSSTVDELGHHGLCCQKSAGRLSRHASLNDVIRRALVSVNVPAILEPNGIARDDGKRPDGMTLVPWRLGRTLIWDATCVDTLAASHLQAGAAAATAENLKRRKYAALGEGYIFVPFGVETFGPWGPFSLKRYRNAWSKLQVTRGLAATLDSD

SEQ ID NO: 25664 - protein, 924 aa, Apotomis turbidana
MSQTASTSTISSANPLSSNNVPGDFKQCPLCPQPRFFRGNKGLNIHNARAHNIKASQSQHHLNYHTRSSLQNISNGSFFDNFPAWLGSQKQATPVVKRIPRGARIAVANALNQAIARVVIENSYESWTQLLSFSFRVLHTNSDNSVSLTQKIKHNCQTPSNPVSIQPQLHAQPKTSSESKLLKKVEHKIIDGDIKGAAQLLFSSDVVAPDNPDTVTALQSKHPLPAATLRLPDPPDPAAPHLIATKKDVLAAVMSFKNTHSSASAGGLDGLSPQHLKDLLGNSSGDAGGLLLDSITELINLMLSGKVCSDILSVLYGANLCALKKKDGGIRPIAVGFTFRRICSKICCRYIFEPLTKKLQPIQLGFGSKGGCEAAVHAARAFVNDDSGEVLLKVDVKNAFNSVDRGALLKQVNDATPSIYKYLWQCYHESSQLLFKNHPLLSAVGCQQGDPLGPAIFSLAIHPVISSLKSQFNSWYLDDGTLGGDWKTVLADLKILNDSFSSIGLELNFSKCELFISNNIAASDSDTNNIIHRFNSLAPNIKIIDKTTLRLLGAPIFPESIPPLIKEHQTTHKDYSDRLLKINPHMALAVIKLCLFVPKFTYILRCSPIWKYPHLIEPLDSVLKTTLTSILNINLDSRAWNQASLPIRYGGLGIRQVVSVALPAFLSSFHSTQDLANKIFSPSSNNDCIVCVNEAREEWTRACLNAPFPVSTKSQRLWDEPLCQLVLKDLTDTAQNSTERARLLAVAEPESGFWLHALPSPNIGTLLDKTALTLATSLRLGTKTTEPHRCRCGSTVDELGHHGLCCQKSAGRISRHASLNDVIRRALVSVNVPAILEPNGIARDDGKRPDGMTLVPWRLGRTLIWDATCVDTLAASHLQATSSKAGAAAATAENLKRRKYAALGEGYIFAPFGVETFGPWGPGA

SEQ ID NO: 25665 - protein, 972 aa, Pammene fasciana
MSQTPSTSTHTNRISNNVTEDLIPCPQCSQSRLYKGRKGLNIHIARTHKTQSQTCQHSQQLNTGPTHIGSSLNIDVNFPAWLSLQRNATSIVKRIPKGARISVANALSQTISKTVNENSVESWTRLFSFSYRILHASDDNDNISLTQKIKSNCIHPIDPAPHPQLKPSSKEDTKLFKIVEQKVIDGDIKGAAQMLFSSDVVAPDTSDTVSALLSKHPLPAASLYHPDPPDSEAPHLTATKKDVLAAVMSFKNGSAGGLDGLSPQHLKDLLVGSTGDAGERLLDGITELVNLMLSGKVCSGVLGLLYGANLCALKKKDGGIRPIAVGLTFRRLCSKICCKNIFSPLTAKFQPLQLGFGSKGGREAAVHAARAFVGDESCEVLLKVDVKNAFNSVDRGALLTQVQDATPLIYKYLWQCYHEPTHLLFKTHRFSSAVGCQQGDPLGPAIFSLAIHPTISNLKSKFNTWYLDDGTLGGDWKTVLDDLKNLTDSFSSIGLQLNFSKCELFINKPIPATELQHIISNFNTISPNIKIIDKNSLRLLGAPIFPESIPALIDEHLNTHKAYSDRLLKISAHMALIIIKFCLFVPKFTYILRCSPVWKHPHLIEPLDSTLKNTLSSILNIHLDNRAWTQASLPIRHGGLGIRQVVSVALPAFLSSIHSTQNLANRVFCPSASNECSTTMNEAKDIWVESCPGNQLPVFLNSQRQWDEPLCKSTLKELLDTAQSSAERARLLAVIEPEAGYWLHALPSPNIGTLLNKSTLTLATCLRLGTKTNESHRCRCGATVDELGHHGLSCQRSAGRISRHASLNDVIRRALASVSVPAILEPNGVVRDDGKRPDGMTLIPWRLGRTLVWDATCVDTLAPSHLQATSSKAGAAATVAEQHKRRKYSVLGEGYIFAPFGVETLGPWGPSAKSLFKEISKRLVDVSGNQRAGSFFGQRISLAIQRGNAASLLGTMTHEGDLGSIILSVSLF

SEQ ID NO: 25666 - protein, 970 aa, Cydia splendana
MSQTPSSSAHQNVSHNSVTGTLVQCPLCPQSRLYKGSKGLNIHITRIHQTQTQCANTGPGPTHIPVVNLNTPDLETTDNFLSWLGEQKNATAIVRRIPKGARISVANALSQKISKTVNENTIDCWIQLFSFCFQILHTTDSKDNISLTQKIKSNCIHPTDPATRPQPNRGPKDESKLFKVVEQKIIDGNIKGAAQMLFSSDVVAPDCPDTVAALTSKHPLPAASLRLPEPPEPDAPHLIANKKDVLAAVMSFQNGSAGGLDGLSPQHLKDLLCGATGDAGERLLGGITQLINLMLSGKVCSEVLGILYGANLCALKKKDGGIRPIAVGFTFRRICSKICCKHIFPSLTKKFQPFQLGFGSKGGCEAAVHAARAFVNDDSCEVLLKVDVKNAFNSVDRGALLTQIQDATPLIYKYLWQCYHQSTNLLFKTHHLASAVGCQQGDPLGPAIFSLAIHPIISNLNSKFNSWYLDDGTLGGDWRSVLDDLRSLTDSFNTIGLELNFTKCELFINNPLPNTDLQSIISNFNTLAPNIKIIDKTSLRLLGAPIFPESIEPIISEHLITHKAYSDRLLKISAHMALVIIKFCLFVPKFTYILRCSPVWKYPHLIEPLDSVLKLTLSSILNINVDNRAWTQASLPIRHGGLGIRQVVSVALPAFLSSFHSTQDLANKIFCPPADNICIQIQIEAKNAWTQACPENPIPAFVHSQKLWDEPLCRVTLKALIDNAQSPAERARLLAVSEPESGLWLHALPSPNIGTLLERTTLALATSLRLGVKTNEPHRCRCGSIVDELGHHGLSCQRSAGRISRHASLNDVIRRALASVSVPAILEPNGIARDDGKRPDGMTLIPWRLGRTLVWDATCVDTLAPSHLQATSVKAGAAATTAERNKRRKYAVLGEGYIFAPFGVETLGPWGPSAKSLFKEISQRLIDTSGDRRAGSYLGQRISLAIQKGNAASLLGTITHEGDLGSIFYL

SEQ ID NO: 25667 - protein, 967 aa, Cydia splendana
MSQTPSSSAHQNVSHNSVTGTLVQCPLCPQSRLYKGSKGLNIHITRVHQTQTQCANTGPTHIPVNLNTPDLETTYNFLTWLGEQKNATAIVRRIPKGARISVANALNQTISKTVNENTIDTWIQLFSFSFQILHTADSEDNISLTQKIKSNCFHPSDPAPRPQPNRGTKDDSKLFKVVEQKIIDGNIKGAAQMLFSSDVVAPDCPDTVAALASKHPLPAASLRLPEPPEPDAPHLVANKKDVLAAVMSFKNGSAGGLDGLSPQHLKDLLCGATGDAGERLLDSITQLINLMLSGKVCSEVLRILYGANLCALKKKDGGIRPIAVGFTFRRICSKICCKHIFPSLTKKFQPCQLGFGSKGGCEAAVHAARAFVDDDSCEVLLKVDVKNAFNSVDRGALLTQIQDATPLIYKYLWQCYHQSSNLLFKTHRLASAVGCQQGDPLGPAIFSLAIHPIISNLNSKFNSWYLDDGTIGGDWRSVLDDLRNLTDSFSTIGLELNFTKCELYINNHLPTTDLHNIISNFNTLAPNIKIVDKTSLRLLGAPIFPESIEPIISEHLNTHKAYSDRLLKINAHMALVIIKFCLFVPKFTYILRCSPVWKYPHLIEPLDSVLKVTLSSILNVNLDNRAWTQASLPIRHGGLGIRQVVSIALPAFLSSFHSTQDLANKIFCPPSDNICIQIQNEAKNAWTQACPENPIPAFVQSQKLWDEPLCRATLKALIDNTQSSAERARLLAVSEPESGLWLHALPSPNIGTLLEKTTLTLATSLRLGVKTNEPHRCRCGSNVDELGHHGLSCQRSAGRISRHASLNDVIRRALASVSVPAILEPNGIARDDGKRPDGMTLIPWRLGRTLVWDATCVDTLAPSHLQATSVRAGAAATTAEQNKRRKYAVLGEGYIFAPFGVETLGPWGPSAKALFKEISQRLIDTTGDQRAGSYLGQRISLAIQKGNAASLLGTITNEGDMGSIFYL

SEQ ID NO: 25668 - protein, 975 aa, Cydia splendana
MLPSLMSQTPSTSAHQNGPSTASNNATEDLLPCPHCPPSRRLYKGSRGLNVHITRIHITQSQTSQQSQHINTAPTHIRNDNTINNLPDWLGSQRNATPIVKRIPKGARISVANALCPIILKTVSENSFQSWAQLLSFTYRTLHVSDINNNMSLTQKIKSNCTLPTDPVPRPQSNRTPNNNKIFKIVEQKVTEGDIKGAAQMLFSSDVVAPDTPDTISALISKHPLPAASLRLPDPPDPGAPHLIATKKDVLAAVMSFKNGSAGGLDGLSPQHLKDLLCGATGDVGEHLLDAITQLVNIMLSGKVCDEVLDILYGANLCALKKKDGGIRPIAIGLTFRRICSKICCKSIFPTLTKKFQPLQLGFGSKGGCEAAVHATRAFVVDDACEVLLKVDVKNAFNSVDRGALLTQIQDATPLIYKYLWQCYHQPSHLLFKTNRLSSAVGCQQGDPLGPAIFSLAIHPVISDLKSKFNSWYLDDGTLGGDWKTVLDDLKNLTDSFSAIGLELNFSKCELFINKPLPAVDLKNIISCFNILAPNIKIIDRQSLRLLGAPIFPESFPPLINEHLSIHQAYSDRLLKISSHMALVIIKFCLFVPKFTYILRCSPIWKHPHLIEPLDSVLKTTLSSILNIHLDNRAWTQASLPIRHGGLGIRQVVSVALPAFLASFHSTQNLAAKIFCPAAGNECTTTLNEAQDVWLQSCPGSPLPVSLKSQKQWDEPLCRSTLKELTDSAQSSAERARLLAVAEPEAGYWLHALPSANIGTLLDKTTLTLATCLRLGTKTNEPHRCRCGTMVDDLGHHGLSCQRSAGRISRHASLNDVIRRALASVSVPAILEPNGIARDDGKRPDGMSLIPWKLGRTLVWDATCVDTLAPSHLQATSVKAGAAATTAELNKRRKYAVLGEGYIFAPFGVETLGPWGPSAKSLYKEISERLIDASGDQRAGSYFGQRLSLAIQRGNAASLLGTITHDSDLGSIFYL

SEQ ID NO: 25669 - protein, 970 aa, Cydia splendana
MSQTPSSSAHQNVSHNSVTGTLVQCPLCPQSRLYKGSKGLNIHITRIHQTQTQCANAGPGPTHIPVVNLNTPDLETTDNFLSWLGEQKNATAIVRRIPKGARISVANALSQKISKTVNENTIDCWIQLFSFCFQILHTTDSRDNISLTQKIKSNCIHPTDPAPRPQPNRGPKDESKLFKVVEQKIIDGNIKGAAQMLFSSDVVAPDCPDTVAALTSKHPLPAASLRMPEPPEPDAPHLIANKKDVLAAVMSFQNGSAGGLDGLSPQHLKDLLCGATGDAGERLLDGITQLINLMLSGKVCSEVLGILYGANLCALKKKDGGIRPIAVGFTFRRICSKICCKHIFPSLTKKFQPFQLGFGSKGGCEAAVHAARAFVNDDSCEVLLKVDVKNAFNSVDRGALLTQIQDATPLIYKYLWQCYHQSTNLLFKTHHLASAVGCQQGDPLGPAIFSLAIHPIISNLNSKFNSWYLDDGTLGGDWRSVLDDLRSLTDSFNTIGLELNFTKCELFINNPLPTTDLQSIISNFNTLAPNIKIIDKTSLRLLGAPIFPESIEPIISEHLITHKAYSDRLLKISAHMALVIIKFCLFVPKFTYILRCSPVWKYPHLIEPLDSVLKLTLSSILNINLDNRAWTQASLPIRHGGLGIRQVVSVALPAFLSSFHSTQDLANKIFCPPADNICIQIQIEAKNSWTQACPENPIPAFVHSQKLWDEPLCRVTLKALIDNAQSPAERARLLAVSEPESGLWLHALPSPNIGTLLERTTLALATSLRLGVKTNEPHRCRCGSIVDELGHHGLSCQRSAGRISRHASLNDVIRRALASVSVPAILEPNGIARDDGKRPDGMTLIPWRLGRTLVWDATCVDTLAPSHLQATSVKAGAAATTAEQNKRRKYAVLGEGYIFAPFGVETLGPWGPSAKRLFKEISQRLIDTSGDRRAGSYLGQRISLAIQKGNAASLLGTITHEGDLGSIFYL

SEQ ID NO: 25670 - protein, 962 aa, Notocelia uddmanniana
MSQTSSTATSLNQTSDNVTGGFIQCPQCPKPRFFRGSRGLNIHNARVHKIQTQPSQSVSAVQTHTGTDLNTIDNLVAWLGAQKQATPIVKRIPRGARISVANALNQIISKIVTENSPESWTQLFSFAYKILHTNSNDRTSLTKKIKANCLHPSNPAPFHPIPGSREDTKIFRKVEQKVIDGDIKGAAQLLFSSDVVAPDTPDTVSALLSKHPLPAASHIPDPPDLDAPHLTASKKDVLAAVMSFKNGSAGGLDGLSPQHLKDLLGGATGDTGSHLLDGITQLVNLMLSGKVCSAVLGILYGANLCALKKKDGGIRPIAVGFTLRRICSKICCKHIFPTLSKKFQPTQLGFGSKGGCEAAVHAARAFVNDDSCEVLLKVDVKNAFNSVDRGTLLTQVQVATPLIYNYIWQCYHQPTHLLFKTHRLSSAVGCQQGDPLGPAIFSLAIHPVISNLNSKFNSWYLDDGTLGGDWKTVLDDLRSLSDAFSAIGLELNFSKCELFINKSLPTTNLQSIISIFNSLAPNIKIIDRSSLRLLGAPIFPESIPSLISEHLNTHKAYSDRLLKISAHMALVIIKFCLFVPKFTYILRCSPIWKFPHIIEPLDIALKTTLTSILNIHLDSRAWIQASLPIRHGGLGIRQVISVALPAFLSSSFSTQDLASKIFTPANNNDSISCLNEAKDAWMQACPDEPLPVSKKSQRLWDEPLCHSTLKDLVNTAQSTADRARLLAVAEPEAGLWLHAMPSPNIGTLLDKPTLTLATCLRLGSKTNEPHRCRCGANVDSLGHHGLSCQRSAGRISRHASLNDVIRRALASVSVPAVLEPNGIARDDGKRPDGMTLIPWKLGRTLVWDATCVDTLAPSHLQATSSKAGAAAATAEQHKRRKYAVLSEGYMFAPFGVETLGPWGPGAKALYKEIADRLIETSGDQRAGSYFGQRISLSIQRGNAASLLGTIAGDGDLGGIYFL

SEQ ID NO: 25671 - protein, 975 aa, Cydia splendana
MLPSLMSQTPSTSAHQNGPSTASNNATEDLLPCPHCPPSRRLYKGSRGLNVHITRIHITQSQTSQQSQHINTAPTHIRNDNTINNLPDWLGSQRNATPIVKRIPKGARISVANALCPIILKTVSENSFQSWAQLLSFTYRTLHVSDINNNISLTQKIKSNCTLPTDPVPRPQSNRTPNNNKIFKIVEQKVTEGDIKGAAQMLFSSDVVAPDTPETISALISKHPLPAASLRLPDPPDHGAPHLIATKKDVLAAVMSFKNGSAGGIDGLSPQHLKDLLCGATGDVGEHLLDAITQLVNIMLSGKVCDEVLDILYGANLCALKKKDGGIRPIAIGLTFRRICSKICCKSIFPTLTKKFQPLQLGFGSEGGCEAAVHATRAFVVDDACEMLLKVDVKNAFNSVDRGALLTQIQDATPLIYKYLWQCYHQPSHLLFKTNRLSSAVGCQQVDPLGPAIFSLAIHPVISDLKSKFNSWYLDDGTLGGDWKTVLDDLKNLTDSFSAIGLELNFSKCELFINKPLPAVDLKNIISCFNILAPNIKIIDRQSLRLLGAPIFPESFPPLINEHLSIHQAYSDRLLKISSHMALVIIKFCLFVPKFTYILRCSPIWKHPHLIEPLDSVLKTTLSSILNIHLDNRAWTQASLPIRHGGLGIRQVVSVALPAFLASFHSTQNLAAKIFCPAAGNECTTTLNEAQDVWLQSCPGSPLPVSLKSQKQWDEPLCRSTLKELTDSAQSSAERARLLAVAEPEAGYWLHALPSANIGTLLDKTTLTLATCLRLGTKTNEPHRCRCGTMVDDLGHHGLSCQRSAGRISRHASLNDVIRRALASVSVPAILEPNGIARDDGKRPDEMSLIPWKLGRTLVWDATCVDTLAPSHLQATSVKAGAAATTAELNKRRKYAVLGEGYIFAPFGVETLGPWGPSAKSLYKEISERLIDASGDQRAGSYFGQRLSLAIQRGNAASLLGTITHDSDLGSIFYL

SEQ ID NO: 25672 - protein, 968 aa, Pammene fasciana
MSQTPSTSTHTNRISNNVTEDLIPCPQCSQSRLYKGRKGLNIHIARTHKTQSQTCQHSQQLNTGPTHIGSSLNIDVNFPAWLSLQRNATSIVKRIPKGARISVANALSQTISKTVNENSVESWTRLFSFSYRILHASDDNDNISLTQKIKSNCIHPIDPAPHPQLKPSSKEDTKLFKIVEQKVIDGDIKGAAQMLFSSDVVAPDTSDTVSALLSKHPLPAASLYHPDPPDSEAPHLTATKKDVLAAVMSFKNGSAGGLDGLSPQHLKDLLVGSTGDAGERLLDGITELVNLMLSGKVCSGVLGLLYGANLCALKKKDGGIRPIAVGLTFRRLCSKICCKNIFSPLTAKFQPFQLGFGSKGGCEAAVHAARAFVGDESCEVLLKVDVKNAFNSVDRGALLTQVQDATPLIYKYLWQCYHEPTHLLFKTHRLSSAVGCQQGDPLGPAIFSLAIHPTISNLKSKFNTWYLDDGTLGGDWKTVLDDLKNLTDSFSSIGLELNFSKCELFINKPIPATELQHIISNFNTISPNIKIIDKNSLRLLGAPIFPESIPALIDEHLNTHKAYSDRLLKISAHMALIIIKFCLFVPKFTYILRCSPVWKHPHLIEPLDSTLKNTLSSILNIHLDNRAWTQASLPIRHGGLGIRQVVSVALPAFLSSIHSTQNLANRVFCPSASNECSTTMNEAKDIWVESCPGNQLPVFLNSQRQWDEPLCKSTLKELLDTAQSSAERTRLLAVIEPEAGYWLHALPSPNIGTLLDKSTLTLATCLRLGTKTNESHRCRCGATVDELGHHGLSCQRSAGRISRHASLNDVIRRALASVSVPAILEPNGIVRDDGKRPDGMTLIPWRLGRTLVWDATCVDTLAPSHLQATSSKAGAAATVAEQHKRRKYSVLGEGYIFAPFGVETLGPWGPSAKSLFKEISRRLVDVSGNQRAGSFFGQRISLAIQRGNAASLLGTMTHEGDLGSIFYL

SEQ ID NO: 25673 - protein, 962 aa, Notocelia uddmanniana
MSQTSSTATSLNQTSDNVTRGFIQCPQCPQPRFFRGSRGLNIHNARVHKIQTQPSQSVSAVPTHTGTDLNTIDNLVAWLGAQKQATPIVKRIPRGARISVANALNQIISKIVTENSPESWTQLFSFVYKILHTNSNDRTSLTKKIKTNCLHPSNPAPFHPIPGSREDTKIFIKVEQKVIDGDIKGAAQLLFSSDVVAPDTPDTVSALLSKHPLPAASHIPDPPDPDAPHLTASKKDVLAAVMSFKNGSAGGLDGLSPQHLKDLLGGATGDTGSHLLDGITQLVNLMLSGKVCSAVLGILYGANLCALKKKDGGIRPIAVGFTLRRICSKICCKHIFPTLSKKFQPTQLGFGSKGGCEAAVHAARAFINDDSCEVLLKVDVKNAFNSVDRGALLTQVQVATPLIYNYIWQCYHQPTHLLFKTHRLSSAVGCQQGDPLGPAIFSLAIHPVISNLNSKFNSWYLDDGTLGGDWKTVLDNLRSLSDAFSAIGLELNFSKCELFINKSLPTTNLQSIISIFNSLAPNIKIIDRSSLRLLGAPIFPESIPSLISEHLNTHKAYSDRLLKISAHMALVIIKFCLFVPKFTYILRCSPIWKFPHIIEPLDIALKTTLTSILNIHLDSRAWIQAALPIRHGGLGIRQVISVALPAFLSSSFSTQDLASKIFTPSNNNDSISCLNEAKDAWMQACPDEPLPVSKKSQRLWDELLCHSTLKDLVSTAQSTADRARLLAVAEPEAGLWLHAMPSPNIGTLLDKPTLTLATCLRLGSKTNEPHRCRCGANVDSLGHHGLSCQRSAGRISRHASLNDVIRRALASVSVPAVLEPNGIARDDGKRPDGMTLIPWKLGRTLVWDATCVDTLAPSHLQATSSKAGAAAATAEQHKRRKYAVLSEGYMFAPFGVETLGPWGPGAKALYKEIADRLIETSGDQRAGSYFGQRISLSIQRGNAASLLGTIACDGDLGGIYFL

SEQ ID NO: 25674 - protein, 968 aa, Pammene fasciana
MSQTPSTSTHTNRISNNVTEDLIPCPQCSQSRLYKGRKGLNIHIARTHKTQSQTCQHSQQLNTGPTHIGSSLNIDVNFPAWLSLQRNATSIVKRIPKGARISVANALSQTISKTVNENSVESWTRLFSFSYRILHASDDNDNISLTQKIKSNCIHPIDPAPHPQLKPSSKEDTKLFKIVEQKVIDGDIKGAAQMLFSSDVVAPDTSDTVSALLSKHPLPAASLYHPDPPDSEAPHLTATKKDVLAAVMSFKNGSAGGLDGLSPQHLKDLLVGSTGDAGERLLDGITELVNLMLSGKVCSGVLGLLYGANLCALKKKDGGIRPIAVGLTFRRLCSKICCKNIFSPLTAKFQPLQLGFGSKGGCEAAVHAARAFVGDESCEVLLKVDVKNAFNSVDRGALLTQVQDATPLIYKYLWQCYHEPTHLLFKTHRLSSAVGCQQGDPLGPAIFSLAIHPTISNLKSKFNTWYLDDGTLGGDWKTVLDDLKNLTDSFSSIGLELNFSKCELFINKPIPATELQHIISNFNTISPNIKIIDKNSLRLLGAPIFPESIPALIDEHLNTHKAYSDRLLKISAHMALIIIKFCLFVPKFTYILRCSPVWKHPHLIEPLDSTLKNTLSSILNIHLDNRAWTQASLPIRHGGLGIRQVVSVALPAFLSSIHSTQNLANRVFCPSASNECSTTMNEAKDIWVESCPGNQLPVFLNSQRQWDEPLCKSTLKELLDTAQSSAERARLLAVIEPEAGYWLHALPSPNIGTLLDKSTLTLATCLRLGTKTNESHRCRCGATVDELGHHGLSCQRSAGRISRHASLNDVIRRALASVSVPAILEPNGIVRDDGKRPDGMTLIPWRLGRTLVWDATCVDTLAPSHLQATSSKAGAAATVAEQHKRRKYSVLGEGYIFAPFGVETLGPWGPSAKSLFKEISKRLVDVSGNQRAGSFFGQRISLAIQRGNAASLLGTMTHEGDLGSIFYL

SEQ ID NO: 25675 - protein, 979 aa, Notocelia uddmanniana
MVHSPMSQIPSTSAHQNRSSTAFNNIIGDFLHCPHCPQSRLFKGHKGLNIHIARVHKTQSQISQQSQVSQPVNAAPTHIRTCVNTVDNLPAWLGTQRNATPIVKRIPKGARLSVANALSQTISKTVNENSVESWTQLFSFSYKILHTSDNNDNISLTQKIKLNCIHPTDSAPRSQSKRSPKGATKLFQIVEQKVMDGDIKGAAQLLFSSDVVAPDTPDTVSALISKHPLPAASLRLPDPPDSEAPHLIATNKDVLAAVMSFKNGSAGGLDGISPQHLKDLLCGATGDAGKHLLNGITQLVNLMLSGKVCNEVLGILYGANLCALKKKDGGIRPIAVGLTFRRICSKICCKYIFSDLTKKFQPLQLGFGSKGGCEAAVHAARAFVGDDSCEVLLKVDVKNAFNSIDRGELLAQVQDATPLIYKYLWQCYHQPTHLLFKSHRISSAVGCQQGDPLGPAIFSLAIHPTISNLNSKFNSWYLDDGTLGGDWKTVLDDLKNLTDSFSAIGLELNFSKCELFINKPLPAADMQNIIAYFNTLAPNIKIIDKNSLRLLGAPILPESIPPLINDHLNTHKAYSDRLLKINAHMALMIIKFCLFVPKFTYVLRCSPIWQHPHLIEPLDSVLKTTLSSILNIHLDNRAWTQASLPIRHGGLGIRQVVSVALPAFLASFHSTQDLADKIFCSTSDNECTTTLNEAKDMWMQSCPGVPLPVCLKSQKQWDEPLCKSTLKELTDTAQSSAERARLLAVAEPEAGYWLHALPSANIGTLLDKTTLTLATCLRLGTKTNEPHRCRCGAMVNELGHHGLSCQRSAGRISRHASLNDVIRRALASVNVPAILEPNGIARDDGKRPDGMSLIPWKLGRTLVWDATCVDTLAPSHLQATSVKAGAAATTAEQNKRRKYATLGEGYMFAPFGVETLGPWGPSAKFLFKEISQRLTDTSGDQRAGSYFGQRLSLAIQRGNAASLLGTIAHEGDLGTIFYL

SEQ ID NO: 25676 - protein, 968 aa, Pammene fasciana
MSQTPSTSTHTNRISNNVTEDLIPCPQCSQSRLYKGRKGLNIHIARTHKTQSQTCQHSQQLNTGPTHIGSSLNIDVNFPAWLSLQRNATSIVKRIPKGARISVANALSQTISKTVNENSVESWTRLFSFSYRILHASDDNDNISLTQKIKSNCIHPIDPAPHPQLKPSSKEDTKLFKIVEQKVIDGDIKGAAQMLFSSDVVAPDTSDTVSALLSKHPLPAASLYHPDPPDSEAPHLTATKKDVLAAVMSFKNGSAGGLDGLSPQHLKDLLVGSTGDAGERLLDGITELVNLMLSGRVCSGVLGLLYGANLCALKKKDGGIRPIAVGLTFRRLCSKICCKNIFSPLTAKFQPLQLGFGSKGGCEAAVHAARAFVGDESCEVLLKVDVKNAFNSVDRGALLTQVQDATPLIYKYLWQCYHEPTHLLFKTHRLSSAVGCQQGDPLGPAIFSLAIHPTISNLKSKFNTWYLDDGTLGGDWKTVLDDLKNLTDSFSSIGLELNFSKCELFINKPIPATELQHIISNFNTISPNIKIINKNFLRLLGAPIFPESIPALIDEHLNTHKAYSDRLLKISAHMALIIIKFCLFVPKFTYILRCSPVWKHPHLIEPLDSTLKNTLSSILNIHLDNRAWTQASLPIRHGGLGIRQVVSVALPAFLSSIHSAQNLANRVFCPSASNECSTTMNEAKDIWVESCPGNQLPVFLNSQRQWDEPLCKSTLKELLDTAQSSAERARLLAVIEPEAGYWLHALPSPNIGTLLDKSTLTLATCLRLGTKTNESHRCRCGAIVDELGHHGLSCQRSAGRISRHASLNDVIRRALASVSVPAILEPNGIVRDDGKRPDGMTLIPWRLGRTLVWDATCVDTLAPSHLQATSSKAGAAATVAEQHKRRKYSVLGEGYIFAPFGVETLGPWGPIAKSLFKEISKRLVDVSGNQRAGSFFGQRISLAIQRGNAASLLGTMTHEGDLGSIFYL

SEQ ID NO: 25677 - protein, 970 aa, Cydia splendana
MSQTPSSSAHQNVSHNSVTGTLVQCPLCPQSRLYKGSKGLNIHITRIHQTQTQCANAGPGPTHIPVVNLNTPDLETTDNFLSWLGEQKNATAIVRRIPKGARISVANALSQKISKTVTENTIDCWIQLFSFCFQILHTTDSRDNISLTQKIKSNCIHPTDPAPRPQPNRGPKDESKLFKVVEQKIIDGNIKGAAQMLFSSDVVAPDCPDTVAALTSKHPLPAASLRMPEPPEPDAPHLIANKKDVLAAVMSFQNGSAGGLDGLSPQHLKDLLCGATGDAGERLLDGITQLINLMLSGKVCNEVLGILYGANLCALKKKDGGIRPIAVGFTFRRICSKICCKHIFPSLTKKFQPFQLGFGSKGGCEAAVHAARAFVNDDSCEVLLKVDVKNAFNSVDRGALLTQIQDATPLIYKYLWQCYHQSTNLLFKTHHLASAVGCQQGDPLGPAIFSLAIHPIISNLNSKFNSWYLDDGTLGGDWRSVLDDLRSLTDSFNTIGLELNFTKCELFINNPLPTTDLQSIISNFNTLAPNIKIIDKTSLRLLGAPIFPESIEPIISEHLITHKAYSDRLLKISAHMALVIIKFCLFVPKFTYILRCSPVWKYPHLIEPLDSVLKLTLSSILNINLDNRAWTQASLPIRHGGLGIRQVVSVALPAFLSSFHSTQDLANKIFCPPADNICIQIQIEAKNSWTQACPENPIPAFVHSQKLWDEPLCRVTLKALIDNAQSPAERARLLAVSEPESGLWLHALPSPNIGTLLERTTLALATSLRLGVKTNEAHRCRCGSIVDELGHHGLSCQRSAGRISRHASLNDVIRRALASVSVPAILEPNGIARDDGKRPDGMTLIPWRLGRTLVWDATCVDTLAPSHLQATSVKAGAAATTAEQNKRRKYAVLGEGYIFAPFGVETLGPWGPSAKSLFKEISQRLIDTSGDRRAGSYLGQRISLAIQKGNAASLLGTITHEGDLGSIFYL

SEQ ID NO: 25678 - protein, 975 aa, Cydia splendana
MLPSLMSQTPSTSVHQNGPSTASNNATEDLLPCPHCPPSRRLYKGSRGLNVHITRIHITQSQTSQQSQHINTVPTHISNDNTINNLLDWLGSQRNATPIVKRIPKGARISVANALCPIILKTVSENSFQSWAQLLSFTYRTLHVSDINNNISLTQKIKTNCILPTDPVPRPQSNRTPNNNKLFKIVEQKVTEGDIKGAAQMLFSSDVVAPDTPDTVSALISKHPLPAASLRLPDPPDPGAPHLIATKKDVLAAVMSFKNGSAGGLDGLSPQHLKDLLCGATGDVGEHLLDSITQLVNIMLSGKVCDEVLDILYGANLCALKKKDGGIRPIAIGLTFRRICSKICCKSIFPTLTKKFQPLQLGFGSKGGCEAAVHATRAFVVDDACEVLLKVDVKNAFNSVDRGALLTQIQDATPLIYKYLWQCYHQPSHLLFKTNRLSSAVGCQQGDPLGPAIFSLAIHPVISDLKSKFNSWYLDDGTLGGDWKTVLDDLKNLTDSFSAIGLELNFSKCELFINKPLPAVDLKNIISCFNILAPNIKIIDRQSLRLLGAPIFPESFPPLINEHLSIHQAYSDRLLKISSHMALVIIKFCLFVPKFTYILRCSPIWKHLHLIEPLDSVLKTTLSSILNIHLDNRAWTQASLPIRHGGLGIRQVVSVALPAFLASFHSTQNLAAKIFCPAAGNECTTTLNEAQDVWLQSCPGSPLPVSLKSQKQWDEPLCRSTLKELTDSAQSSAERARLLAVAEPEAGYWLHALPSANIGTLLDKTTLTLATCLRLGTKTNEPHRCRCGTMVDDLGHHGLSCQRSAGRISRHASLNDVIRRALASVSVPAILEPNGIARDDGKRPDGMSLIPWKLGRTLVWNATCVDTLAPSHLQATSVKAGAAATTAELNKRRKYAVLGEGYIFAPFGVETLGPWGPSAKYLYKEVSERLIDASGDQRAGSYFGQRLSLAIQRGNAASLLGTITHDSDLGSIFYL

SEQ ID NO: 25679 - protein, 962 aa, Notocelia uddmanniana
MSQTSSTATSLNQTSDNVTGGFIQCPQCPKPRFFRGSRGLNIHNARVHKIQTQPSQSVSAVQTHTGTDLNTIDNLVAWLGAQKQATPIVKRIPRGARISVANALNQIISKIVTENSPESWTQLFSFAYKILHTNSNDRTSLTKKIKANCLHPSNPAPFHPIPGSREDTKIFRKVEQKVIDGDIKGAAQLLFSSDVVAPDTPDTVSALLSKHPLPAASYIPDPPDLDAPHLTASKKDVLAAVMSFKNGSAGGLDGLSPQHLKDLLGGATGDTGSHLLDGITQLVNLMLSGKVCSAVLGILYGANLCALKKKDGGIRPIAVGFTLRRICSKICCKHIFPTLSKKFQPTQLGFGSKGGCEAAVHAARAFVNDDSCEVLLKVDVKNAFNSVDRGTLLTQVQVATPLIYNYIWQCYHQPTHLLFKTHRLSSAVGCQQGDPLGPAIFSLAIHPVISNLNSKFNSWYLDDGTLGGDWKTVLDDLRSLSDAFSAIGLELNFSKCELFINKSLPTTNLQSIISIFNSLAPNIKIIDRSSLRLLGAPIFPESIPSLISEHLNTHKAYSDRLLKISAHMALVIIKFCLFVPKFTYILRCSPIWKFPHIIEPLDIALKTTLTSILNIHLDSRAWIQASLPIRHGGLGIRQVISVALPAFLSSSFSTQDLASKIFTPANNNDSISCLNEAKDAWMQACPDEPLPVSKKSQRLWDEPLCHSTLKDLVNTAQSTADRARLLAVAEPEAGLWLHAMPSPNIGTLLDKPTLTLATCLRLGSKTNEPHRCRCGANVDSLGHHGLSCQRSAGRISRHASLNDVIRRALASVSVPAVLEPNGIARDDGKRPDGMTLIPWKLGRTLVWDATCVDTLAPSHLQATSSKAGAAAATAEQHKRRKYAVLSEGYMFAPFGVETLGPWGPGAKALYNEIADRLIETSGDQRAGSYFGQRISLSIQRGNAASLLGTIAGDGDLGGIYFL

SEQ ID NO: 25680 - protein, 975 aa, Cydia splendana
MLPSLMSQTPSTSAHQNGPSTASNNATEDLLPCPHCPPSRRLYKGSRGLNVHITRIHITQSQTSQQSQHINTAPTHIRNDNTINNLPDWLGSQRNATPIVKRIPKGARISVANALCPIILKTVSENSFQSWAQLLSFTYRTLHVSDINNNMSLTQKIKSNCTLPTDPVPRPQSNRTPNNNKIFKIVEQKVTEGDIKGAAQMLFSSDVVAPDTPDTISALISKHPLPAASLRLPDPPDPGAPHLIATKKDVLAAVMSFKNGSAGGLDGLSPQHLKDLLCGATGDVGEHLLDAITQLVNIMLSGKVCDEVLDILYGANLCALKKKDGGIRPIAIGLTFRRICSKICCKSIFPTLTKKFQPLQLGFGSKGGCEAAVHATRAFVVDDACEVLLKVDVKNAFNSVDRGALLTQIQDATPLIYKYLWQCYHQPSHLLFKTNRLSSAVGCQQGDPLGPAIFSLAIHPVISDLKSKFNSWYLDDGTLGGDWKTVLDDLKNLTDSFSAIGLELNFSKCELFINKPLPAVDLKNIISCFNILAPNIKIIDRQSLRLLGAPIFPESFPPLINEHLSIHQAYSDRLLKISSHMALVIIKFCLFVPKFTYILRCSPIWKHPHLIEPLDSVLKTTLSSILNIHLDNRAWTQASLPIRHGGLGIRQVVSVALPAFLASFHSTQNLAAKIFCPAAGNECTTTLNEAQDVWLQSCPGSPLPVSLKSQKQWDEPLCRSTLKELTDSAQSSAERARLLAVAEPEAGYWLHTLPSANIGTLLDKTTLTLATCLRLGTKTNEPHRCRCGTMVDDLGHHGLSCQRSAGRISRHASLNDVIRRALASVSVPAILEPNGIARDDGKRPDGMSLIPWKLGRTLVWDATCVDTLAPSHLQATSVKAGAAATTAELNKRRKYAVLGEGYIFAPFGVETLGPWGPSAKSLYKEISERLIDASGDQRAGSYFGQRLSLAIQRGNAASLLGTITHDSDLGSIFYL

SEQ ID NO: 25681 - protein, 970 aa, Cydia splendana
MSQTPSSSAHQNVSHNSVTGTLVQCPLCPQSRLYKGSKGLNIHITRIHQTQTQCANAGPGPTHIPVVNLNTPDLETTDNFLSWLGEQKNATAIVRRIPKGARISVANALSQKISKTVNENTIDCWIQLFSFCFQILHTTDSKDNISLTQKIKSNCIHPTDPAPRPQPNRGPKDESKLFKVVEQKIIDGNIKGAAQMLFSSDVVAPDCPDTVAALTSKHPLPAASLRMPEPPEPNAPHLIANKKDVLAAVMSFQNGSAGGLDGLSPQHLKDLLCGATGDAGERLLDGITQLINLMLSGKVCSEVLGILYGANLCALKKKDGGIRPIAVGFTFRRICSKICCKHIFPSLTKKFQPFQLGFGSKGGCEAAVHAARAFVNDDSCEVLLKVDVKNAFNSVDRGALLTQIQDATPLIYKYLWQCYHQSTNLLFKTYHLASAVGCQQGDPLGPAIFSLAIHPIISNLNSKFNSWYLDDGTLGGDWRSVLDDLRSLTDSFNTIGLELNFTKCELFINNPLPTTDLQSIISNFNTLAPNIKIIDKTSLRLLGAPIFPESIEPIISEHLITHKAYSDRLLKISAHMALVIIKFCLFVPKFTYILRCSPVWKYPHLIEPLDSVLKLTLSSILNINLDNRAWTQASLPIRHGGLGIRQVVSVALPAFLSSFHSTQDLANKIFCPPADNICIQIQIEAKNAWTQACPENPIPAFVHSQKLWDEPLCRVTLKALIDNAQSPAERARLLAVSEPESGLWLHALPSPNIGTLLERTTLALATSLRLGVKTNEPHRCRCGSIVDELGHHGLSCQRSAGRISRHASLNDVIRRALASVSVPAILEPNGIARDDGKRPDGMTLIPWRLGRTLVWDATCVDTLAPSHLQATSVKAGAAATTAEQNKRRKYAVLGEGYIFAPFGVETLGPWGPSAKSLFKEISQRLIDTSGDRRAGSYLGQRISLAIQKGNAASLLGTITHEGDLESIFYL

SEQ ID NO: 25682 - protein, 975 aa, Cydia splendana
MLPSLMSQTPSTSVHQNGPSTASNNATEDLLPCPHCPPSRRLYKGSRGLNVHITRIHITQSQTSQQSQHINTVPTHISNDNTINNLPDWLGSQRNATPIVKRIPKGARISVANALCPIILKTVSENSFQSWAQLLSFTYRTLHVSDINNNISLTQKIKTNCILPTDPVPRPQSNRTPNNNKIFKIVEQKVTEGDIKGAAQMLFSSDVVAPDTPDTVSALISKHPLPAASLRLPDPPDPGAPHLIATKKDVLAAVMSFKNGSAGGLDGLSPQHLKDLLCGATGDVGEHLLDSITQLVNIMLSGKVCDEVLDILYGANLCALKKKDGGIRPIAIGLTFRRICSKICCKSIFPTLTKKIQPLQLGFGSKGGCEAAVHATRAFVVDDACEVLLKVDVKNAFNSVDRGALLTQIQDATPLIYKYLWQCYHQPSHLLFKTNRLSSAVGCQQGDPLGPAIFSLAIHPVISDLKSKFNSWYLDDGTLGGDWKTVLDDLKNLTDSFSAIGLELNFSKCELFINKPLPAVDLKNIISCFNILAPNIKIIDRQSLRLLGAPIFPESFPPLINEHLSIHQAYSDRLLKISSHMALVIIKFCLFVPKFTYILRCSPIWKHPHLIEPLDSVLKTTLSSILNIHLDNRAWTQASLPIRHGGLGIRQVVSVALPAFLASFHSTQNLAAKIFCPAAGNECTTTLNEAQDVWLQSCPGSPLPVSLKSQKQWDEPLCRSTLKELTDSAQSSAERARLLAVAEPEAGYWLHALPSANIGTLLDKTTLTLATCLRLGTKTNEPHRCRCGTMVDDLGHHGLSCQRSAGRISRHASLNDVIRRALASVSMPAILEPNGIARDDGKRPDGMSLIPWKLGRTLVWDATCVDTLAPSHLQATSVKAGAAATTAELNKRRKYAVLGEGYIFAPFGVETLGPWGPSAKYLYKEVSERLIDASGDQRAGSYFGQRLSLAIQRGNAASLLGTITHDSDLGSIFYL

SEQ ID NO: 25683 - protein, 962 aa, Notocelia uddmanniana
MSQTSSTATSLNRTSDNVTGGFIQCPQCPQPRFFRGSRGLNVHNARVHKIQTQPSQSVSAVPTHTGTDLNTIDNLVAWLGAQKQATPIVKRIPRGARISVANALNQIISKIVTENSPESWTQLFSFAYKILHTNSNDRTSLTKKIKANCLHPSNPAPFHPIPGSREDTKIFRKVEQKVIDGDIKGAAQLLFSSDVVAPDTPDTVSALLSKHPLPAASHIPDPPDPDAPHLTASKKDVLAAVMSFKNGSAGGLDGLYPQHLKDLLGGAIGNTGSHLLDGITQLVNLMLSGKVCSAVLGILYGANLCALKKKDGGIRPIAVDFTLRRICSKICCKHIFPTLSKKFQPSQLGFGSKGGCEAAVHAARAFVNDDSCEVLLKVDVKNAFNSVDRGALLTQVQVATPLIYNYIWQCYHQPTHLLFKIHRLSSAVGCQQRDPLGPAIFSLAIHPVISNLNSKFNSWYLNDGTLGGDWKTVLDDLRSLSDAFSAIGLELNFSKCELFINKSLPTTDLQSIISIFNSLAPNIKIIDRSSLRLLGAPIFPESIPSLISKHINTHKAYSDRLLKISAHMALVIIKFCLFVPKFTYILRCSPIWKFPHIIEPLDVALKTTLTSILNIHLDSHAWIQASLPIRHGGLGIRQVISVALPAFLSSSFSTQDLASKIFTPANNNDSISCLHEAKDAWMQACPDEPLPVSKKSQRLWDEPLCHSTLKHLVNTAQSTADRARLLAVAEPEAGLWLHALPSSNIGTLLDEPTLTLATCLRLGSKTNEPHRCRCGANVDSLGHHGLSCQRSAGRISRHASLNDVIRRALASVSVPAVLEPNGIARDDGKRPDGTTLIPWKLGRTLVWDATCVDTLAPSHLQATSSKAGAAAATAEQHKRRKYAVLSEGYMFAPFGVETLGPWGSGAKALYKEIADRLIETSGDQRAGSYFGQRISLSIQRGNAASLLGTIACDGDLGGIYFL

SEQ ID NO: 25684 - protein, 976 aa, Cydia splendana
MLPSLMSQTPSTSVHQNGPSIASNNATEDLLPCPHCPPSRRLYKGSRGLNVHITRIHITQSQTSQQSQHINTVPTHISNDNTINNLPDWLGSQRNATPIVKRIPKGARISVANALCPIILKTVSENSFQSWAQLLSFTYRTLHVSDINNNISLTQKIKTNCILPTDPVPRPQSNRTPNNNKIFKIVEQKVTEGDIKGAAQMLFSSDVVAPDTPDTVSALISKHPLPAASLRLPDPPDPGAPHLIATKKDVLAAVMSFKNGSAGGLDGLSPQHLKDLLCGATGDVGEHLLDSITQLVNIMLSGKVCDEVLDILYGANLCALKKKDGGIRPIAIGLTFLRRICSKICCKSIFPTLTKKFQPLQLGFGSKGGCEAAVHATRAFVVDDACEVLLKVDVKNAFNSVDRGALLTQIQDATPLIYKYLWQCYHQPSHLLFKTNRLSSAVGCQQGDPLGPAIFSLAIHPVISDLKSKFNSWYLDDGTLGGDWKTVLDDLKNLTDSFSAIGLELNFSKCELFINKPLPAVDLKNIISCFNILAPNIKIIDRQSLRLLGAPIFPESFPPLINEHLSIHQAYSDRLLKISSHMALVIIKFCLFVPKFTYILRCSPIWKHPHLIEPLDSVLKTTLSSILNIHLDNRAWTQASLPIRHGGLGIRQVVSVALPAFLASFHSTQNLAAKIFCPAAGNECTTTLNEAQDVWLQSCPGSPLPVSLKSQKQWDEPLCRSTLKELTDSAQSSAERARLLAVAEPEAGYWLHALPSANIGTLLDKTTLTLATCLRLGTKTNEPHRCRCGTMVDDLGHHGLSCQRSAGRISRHASLNDVIRRALASVSVPAILEPNGIARDDGKRPDGMSLIPWKLGRTLVWDATCVDTLAPSHLQATSVKAGAAATTAELNKRRKYAVLGEGYIFAPFGVETLGPWGPSAKYLYKEVSERLIDASGDQRAGSYFGQRLSLAIQRGNAASLLGTITHDSDLGSIFYL

SEQ ID NO: 25685 - protein, 962 aa, Notocelia uddmanniana
MSQTSSTATSLNQTSDNVTGGFIQCPQCPKPRFFRGSRGLNIHNARVHKIQTQPSQSVSAVQTHTGTDLNTIDNLVAWLGAQKQATPIVKRIPRGARISVANALNQIISKIVTENSPESWTQLFSFAYKILHTNSNDRTSLTKKIKANCLHPSNPAPFHPIPGSREDTKIFRKVEQKVIDGDIKGAAQLLFSSDVVAPDTPDTVSALLSKHPLPAASHIPDPPDLDAPHLTASKKDVLAAVMSFKNGSAGGLDGLSPQHLKDLLGGATGDTGSHLLDGITQLVNLMLSGKVCSAVLGILYGANLCALKKKDGGIRPIAVGFTLRRICSKICCKHIFPTLSKKFQPTQLGFGSKGGCEAAVHAARAFVNDDSCEVLLKVDVKNAFNSVDRGTLLTQVQVATPLIYNYIWQCYHQPTHLLFKTHRLSSAVGCQQGDPLGPAIFSLAIHPVISNLNSKFNSWYLDDGTLGGDWKTVLDDLRSLSDSFSAIGLELNFSKCELFINKSLPTTNLQSIISIFNSLAPNIKIIDRSSLRLLGAPIFPESIPSLISEHLNTHKAYSDRLLKISAHMALVIIKFCLFVPKFTYILRCSPIWKFPHIIEPLDIALKTTLTSILNIHLDSRAWIQASLPIRHGGLGIRQVISVALPAFLSSSFSTQDLASKIFTPANNNDSISCLNEAKDAWMQACPDEPLPVSKKSQRLWDEPLCHSTLKDLVNTAQSTADRARLLAVAEPEAGLWLHAMPSPNIGTLLDKPTLTLATCLRLGSKTNEPHRCRCGANVDSLGHHGLSCQRSAGRISRHASLNDVIRRALASVSVPAVLEPNGIARDDGKRPDGMTLIPWKLGRTLVWDATCVDTLAPSHLQATSSKAGAAAATAEQHKRRKYAVLSEGYMFAPFGVETLGPWGPGAKALYKEIADRLIETSGDQRAGSYFGQRISLSIQRGNAASLLGTIAGDGDLGGIYFL

SEQ ID NO: 25686 - protein, 1300 aa, Hypena proboscidalis
MVMILRSKRIGPLSGGNRRSTPGADAGCYSMRTVSGEELNRRAPSGTSENATANQTDDRPTDHDNVSLNSSISLEIVEPYSPSTVSYIPTPVSSIEENSRETSPPTLTVAQEVNTFLPASTKAGKPRVRMKWPNDVNSFIMRTYYHITKLETDMTCYRKPLHQLFVQRYPDINVTEQRVSDQRRMIIRNKYLSQEQLNQIKDEVKEQLGTAHEIPPISIRSPPIRRNRTQSRSMTPISPISTFDHTQHSSQTLHNVTTQTIHTHDYLLETELQILDQESNTDELVTKMQNQLEIKLLEYAGTDPTLRPKLPKLNYSNQLTNLVDIFNNNILNRFLTENILLTDIHTLIYCTAMVITLELGYKVHSTTQYTVKKPFSEPAWQIRLQRNISLLRSDIGRLTQYIRGNRTNKIIKTVENIFKTNKVHTRHENNNTTPEEHLDTLKQKLALKAHRLARYKKALQRKQENKLFSMNEKIFYRKMRSGYVEKNNNNTETTSKEDLEAFWCQIWEEETKYNERAQWIQEEECRWEGINEMEFEEISETDLKHVTTHLHNWKSPGIDNIHNFWYKKLITLHKPLANCFTDLIFRKQQIPSFLAKGVTYMIPKKNNSNDPSQYRPITCLPTIYKILTATLTNKMTKHIETNNIISEEQKGCRRNHMGCKEQLIIDSTILKHANTKKRNLHCAYIDYRKAFDSVPHSWLLKVLKIYKINPSLVDFLEQIMPYWKTNLHIRDTNSPVVTKEIQIKKGIYQGDSLSPLWFCLALNPLSYLINKQKVGYRLKHERNETAIAHLIYMDDIKLYTSTLKDMKKLLRITETFSKDINMTFGLDKCKTLNIKKGKVEPGDFTLQDGGVISAMESDELYKYLGYQQSKQLDHMTLKKSLTEEYKNRLTTISKTQLTGKRLIKAINTYAIPILTYSFGIVKWSKTDINTLEIKTRTIFTKHNNLHPKSAVERMTIKRSNGGRGLIDIQSLWQKQINSLTAFFYKKALNSVLHSAIVRSDHKLTPLNLAESSNNPPPQQTDTQKHQIEKWKQKVLHGRHPHDLDQAHIDAQASNRWLTSGYLFPETEGFLIAIQDQVINTKNYRKHIIKDPSAREDKCRKCHRQPETIQHITGACTTLTQTDYTHRHNQIVNILHQKLAIKYQLIQDSHTPYYKYTPSPVLENQHYKMYYDRAILTDKTIHYNRPDITIHDKNKHIVYLVDVAVPNTHNLLKTITEKISKYTDLKEEVGRIWKASKVYTVPIVISTTGIVPKHLHHSLKLLDLTPNTFINIQKAAILNTCRIVRKFMQSDETILNPDQTT

SEQ ID NO: 25687 - protein, 1200 aa, Phalera bucephala
MKWPTDVNIFIMRTYYLITKLETDMTCYRKILHELFTKQYPDVNASEQRISDQRRMIVKDRYLSQETLNQIKEEVKLRLMDNRIEQDSTPVPSTSAPIEMCVTSNNNTHNHLPIITRTQSQSYSDSPQYTTHILTTESATPAIDAFTQTPLTHNFILESELETQEITTSCEYNIQELNDDLNTTLLEYAGTDPTVRPKLPKLNYSKRLTELVQLFNDNILNRVLTHNALLTDIHTLIYCSAMVITKKLGYKILEYNQQLTRNKNTEPAWQRRLKTDINQLRSDIGRLTQYIRGNRTNKIIATVKKIFKSHKTHTTHEKNNSTPEKYLDTLKQKLALKANRLSRYKKALNRKQDNKLFVTNEKIFYKQLRGNKSTENREETTRTVSKERLEEFWSEIWENRVLHKEGASWIEEEIETWAELNEMEFSHISESDVKNVTSRLNNWKSPGIDNVHNFWFKKFHVLHKSLAKSFTAVILNQEPIPAFIARGVTHMIPKSRNVDDPSQYRPITCLPTIYKILTATITHKINAHIEKNNIIAEEQKGCRRNHMGCKEQLVIDSTILKHANAKKRNLHCTFIDYRKAFDSIPHSWLLKVLKIYKINSSIIQFLNQIMPLWKTNLHIRNKDASMTSREITIKKGIYQGDSLSPLWFCLALNPLSSLLNKQRLGYHLKNNDGENTIVSHLIYMDDIKLYAKSKRDMQKLINITDTFSTDINMQFGLDKCKSINIKKGKLQPINYLLDEGRIISSMEPGDLYKYLGYNQAKQLDHINLKHSVTTEYKNRVNTICKTQLSGKYLIKAINTYAIPILTYSFGIIKWTKTDINNIEIKTRVILTKHKHLHPKSAIERLSISRKEGGRGLIDIRALWDKQIASLQSFFHRKAITSKLHRVIVDNDSKFTPLNLSEVPETQHTTEQQTDYDTQKRDQWKRKTIHGRHPHDLQQTHVDLQASNRWLTSANLFPETEGFIIAIQDQVINTKNYKKHIIKDPTAMNDKCRKCHRHPETIQHITGACPTLTQSDYTHRHNQIANIIHQKLAYKYKLIQDVHIPYYKYTPNPILENSTHKLYYDRAILTDKTIHFNRPDLTIQDKVNKIAYIVDIAVPNTHNILKTITEKINKYTELKEEILRIWKLNQVYIVPIVISTTGVVPKHLHYSLKLLDLSPNTYISIQKAAILNTCRTVRKFMQSDDTPLESPDHPLDPIIPT

SEQ ID NO: 25688 - protein, 778 aa, Phalera bucephala
MEFSHISESDVKNVTSRLNNWKSPGIDNVHNFWFKKFHVLHKSLAKSFTAVILNQEPIPAFIARGVTYMIPKSRNVDDPSQYRPITCLPTIYKILTATITHKINAHIEKNNIIAEEQKGCRRNHMGCKEQLVIDSTILKHANAKKRNLHCTFIDYRKAFDSIPHSWLLKVLKIYKINSSIIQFLNQIMPLWKTNLHIRNKDALMTSREITIKKGIYQGDSLSPLWFCLALNPLSSLLNKQRLGYHLKNNDGENTIVSHLIYMDDIKLYAKSKRDMQKLINITDTFSTDINMQFGLDKCKSINIKKGKLQPSNYLLDEGRIISSMEPGDLYKYLGYNQAKQLDHINLKHSVTTEYKNRVNTICKTQLSGKYLIKAINTYAIPILTYSFGIIKWTKTDINNIEIKTRVILTKHKHLHPKSAIERLSISRKEGGRGLIDIRALWDKQIASLQSFFHRKAITSKLHRVSVDNDSKFTPLNLSEVPETQHTTEQQTDYDTQKRDQWKRKTIHGRHPHDLQQTHVDLQASNRWLTSANLFPETEGFIIAIQDQVINTKNYKKHIIKDPTAMNDKCRKCHRHPETIQHITGACPTLTQSDYTHRHNQIANIIHQKLAYKYKLIQDVHIPYYKYTPNPILENSTHKLYYDRAILTDKTIHFNRPDLTIQDKVNKIAYIVDIAVPNTHNILKTNTEKINKYTELKEEILRIWKLNQVYIVPIVISTTGVVPKHLHYGLKLLDLSPNTYISIQKAAILNTCRTVRKFMQSDDTPLESPDHPLDPIIPT

SEQ ID NO: 25689 - protein, 778 aa, Phalera bucephala
MEFSHISESDVQNVTSRLNNWKSPGIDNVHNFWFKKFHVLHKSLAKSFTAVILNQEPIPAFIARGVTYMIPKSRNVDDPSQYRPITCLPTIYKILTATITHKINAHIEKNNIIAEEQKGCRRNHMGCKEQLVIDSTILKHANAKKRNLHCTFIDYRKAFDSIPHSWLLKVLKIYKINSSIIQFLNQIMPLWKTNLHIRNKDASMTSRDITIKKGIYQGDFLSPLWFCLALNPLSSLLNKQRLGYHLKNNDGENTIVSHLIYMDDIKLYAKSKRDMQKLINITDTFSTDINMQFGLDKCKSINIKKGKLQPINYLLDEGRIISSMEPGDLYKYLGYNQAKQLDHINLKHSVTTEYKNRVNTICKTQLSGKYLIKAINTYAIPILTYSFGIIKWTKTDINNIEIKTRVILTKHKHLHPKSAIERLSISRKEGGRGLIDIRALWDKQIASLQSFFHRKAITSKLHRVIVDSDSKFTPLNLSEVPETQHTTEQQTDYDMQKRDQWKRKTIHGRHPHDLQQTHVDLQASNRWLTSANLFPETEGFIIAIQDQVINTKNYKKHIIKDPTAMNDKCRKYHRHPETIQHITGACPTLTQSDYTHRHNQIANIIHQKLAYKYKLIQDVHIPYYKYTPNPILENSTHKLYYDRAILTDKTIHFNRPDLTIQDKVNKIAYIVDIAVPNTHNILKTITEKINKYTELKEEILRIWKLNQVYIVPIVISTTGVVPKHLHYSLKLLDLSPNTNISIQKAAILNTCRTVRKFMQSDDTPLESPDHPLDPIIPT

SEQ ID NO: 25690 - protein, 1327 aa, Phalera bucephala
METRSKSKRLGPLPGGDRRGAPGADAGCGSIRTVGGERLNRRVLSGSPEDATANQTNDRQTDNLSRNSSPPLSLCIEPYSPSTASYIPSPISSPDHDPSDRIGPPTLAVAQGVNTFLPASTKAGKPRVRMKWPTDVNIFIMRTYYLITKLETDMTCYRKILHELFTKQYPDVNASEQRISDQRRMIVKNRYLSQKTLNQIKEEVKLRLMDNRIEQDSTSVPSTSAPIEMCVTSNNNTHNHLPIITRTQSQAYSDSPQYTTHILTTESATPAIDAFTQTPLTHNLILESELETQVITTSCEYNIQELNDDLNTTLLEYAGTDPTVRPKLPKLNYSKRLTELVQLFNDNILNRVLTHNALLTDIHTLMYCSAMVITKKLGYKILEYNQQLTRNKNTEPAWQRRLKTDINQLRSDIGRLTQYIRGNRTNKIIATVEKIFKSHKTHTTHEKNNSTPEVYLDTLKQKLALKANRLSRYKKALNRKQDNKLFVTNEKIFYRQLRGNKSTENREETTRTVSKERLEEFWSEIWENRVLHKEGASWIEEEIETWAELNEMEFSHISESDVKNVTSRLNNWKSPGIDNVHNFWFKKFHVLHKSLAKSFTAVILNQEPIPAFIARGVTYMIPKSRNVDDPSQYRPITCLPTIYKILTATITHKINAHIEKNNIIAEEQKGCRRNHMGCKEQLVIDSTILKHANAKKRNLHCTFIDYRKAFDSIPHSWLLKVLKIYKINSSIIQFLNQIMPLWKTNLHIRNKDASMTSREITIKKGIYQGDSLSPLWFCLALNPLSSLLNKQRLGYHLKNNDGENTIVSHLIYMDDIKLYAKSKRDMQKLINITDTFSTDINMQFGLDKCKSINIKKGKLQPSNYLLDEGRIISSMEPGDLYKYLGYYQAKQLDHINLKHSVTTEYKNRVNTICKTQLSGKYLIKAINTYAIPILTYSFGIIKWTKTDINNIEIKTRVLLTKHKHLHPKSAIERLSISRKEGGRGLIDIRALWNKQIASLQSFFHRKAITSKLHRVIVDNDSKFTPLNLSEVPETQHTTEQQTDYDTQKRDQWKRKTIHGRHPHDLQQTHVDLQASNRWLTSANLFPETEGFIIAIQDQVINTKNYKKHIIKDPTAMNDKCRKCHRHPETIQHITGACPTLTQSDYTHRHNQIANIIHQKLAYNYKLIQDVHIPYYKYTPNPILENSTHKLYYDRAILTDKTIHFNRPDLTIQDKVNKIGYIVDIAVPNTHNILKTITEKINTELKEEILRIWKLNQVYIVPIVISTTGVVPKHLHHSLKLLDLSPNTYISIQKAAILNTCRTVRKFMQSDDTPLESPDYPLDPIIPT

SEQ ID NO: 25691 - protein, 1329 aa, Phalera bucephala
METRSKSKRLGPLPGGDRRGAPGADAGCGSIRTVGGERLNRRVLSGSPEDATANQTNDRQTDNLSRNSSPPLSLCIEPYSPSTASYIPSPISSPDHDPSDRISPPTLAVAQGVNTFLPASTKAGKPRVRMKWPTDVNIFIMRTYYLITKLETDMTCYRKILHELFTKQYPDVNASEQRISDQRRMIVKNGYLSQETLNQIKEEVKLRLMDNRIEQDSTPVPSTSAPIEMCVTSNNNTHNHLPIITRTQSQSYSDSPQYTTHILTTESATPAIDAFTQTPLTHNLILESELETQEITTSCEYNIQELNDDLNTTLLEYAGTDPTVRPKLPKLNYSKRLTELVQLFNDNILNRVLTHNALLTDIHTLIYCSAMVITKKLGYKILEYNQQLTRNKNTEPAWQRRLKTDINQLRSDIGRLTQYIRGNRTNKIIATVEKIFKSHKTHTTHEKNNSTLEEYLDTLKQKLALKANRLSRYKKALNRKQDNKLFVTNEKIFYRQLRGNKSTENREETTRTVSKERLEEFWSEIWENRVLHKEGASWIEEEIETWAELNEMEFSHISESDVKNVTSRLNNWKSPGIDNVHNFWFKKFHVLHKSLAKSFTAVILNQEPIPAFIARGVTYMIPKSRNVDDPSQYRPITCLPTIYKILTATITHKINAHIERNNIIAEEQKGCRRNHMGCKELLVIDSTILKHANAKKRNLHCTFIDYRKAFDSTPHSWLLKVLKIYKINSTIIQFLKQIMPLWKTNLHIRNKDASMTSREITIKKGIYQGDSLSPLWFCLALNPLSSLLNKQRLGYHLKNNDGENTIVSHLIYMDDIKLYAKSKRDMQKLINITDTFSTDINMQFGLDKCKSINIKKGKLEPSNYLLDEGRIISSMEPGDLYKYLGYYQAKQLDHINLKHSVTTEYKNRVNTICKTQLSDKYLIKAINTYAIPILTYSFGIIKWTKTDINNIEIKTRVILTKHKHLHPKSAIERLSISRKEGGRGLIDIRALWDKQIASLQSFFHRKVITSKLHRVIVDNDSKFTPLNLSEVPETQHTTEQQTDYDTQKRDQWKRKTIHGRHPHDLQQTHVDLQASNRWLTSANLFPETEGFIIAIQDQVINTKNYKKHIIKDPTAMNDKCRKCHRHPETIQHITGACPTLTQSDYTHRHNQIANIIHQKLAYKYKLIQDVHIPYYKYTPNPILENSTHKLYYDRAILTDKTIRFNRPDLTIQDKVNKIAYIVDIAVPNTHNILKTITENINKYTELKEEILRIWKLNQVYIVPIVISTTGVVPKHLHHSLKLLDLSPNTYISIQKAAILNTCRTVRKFMQCDDTPLESPDYPLDPIIPT

SEQ ID NO: 25692 - protein, 1329 aa, Phalera bucephala
METRSKSKRLGPLPGGDRRGAPGADAGCGSIRTVGGERLNRRVLSGSPEDATANQTNDRHTDNLSRNSSPPLSLCIEPYSPSTASYIPSPISSPDHDPSDRISPPTLAVAQGVNTFLPASTKAGKPRVRMKWPTDVNIFIMRTYYLITKLETDMTCYRKILHELFTKQYPDVNASEQRISDQRRMIVKNRYLSQETLNQIKEEVKLRLMDNRIEQDSTPVPSTSAPIEMCVTSNNNTHNHLPIITRTQSQSYSDSPQYTTHILTTESATPAIDVFTQTPLTHNLILESELETQEITTSCEYNIQELNDDLNTTLLEYAGTDPTVRPKLPKLNYSKRLTELVQLFNDNILNRVLTHNALLTDIHTLIYCSAMVITKKLGYKILEYNQQLTRNKNTEPAWQRRLKTDINQLRSDIGRLTQYIRGNRTNKIIATVEKIFKSHKTHTTHEKNNSTPEEYLDTLKQKLALKANRLSRYKKALNRKQDNKLFVTNEKIFYRQLRGNKSTENREETTRTVSKERLEEFWSEIWENRVLHKEGASWIEEEIETWAELNEMEFSHISESDVKNVTSRLNNWKSPGIDNVHNFWFKKFHVLHKSLAKSFTAVILNQEPIPAFIARGVTYMIPKSRNVDDPSQYRPITCLPTIYKILTATITHKINAHIEKNNIIAEEQKGCRRNHMGCKEQLVIDSTILKHANAKKRNLHCTFIDYRKAFDSIPHSWLLKVLKIYKINSSIIQFLNQIMPLWKTNLHIRNKDASMTSREITIKKGIYQGDSLSPLWFCLALNPLSSLLNKQRLGYHLKNNDGENTIVSHLIYMDDIKLYAKSKRDMQKLINITDTFSTDINMQFGLDKCKSINIKKGKLQPSNYLLDEGRIISSMEPGDLYKYLGYNQAKQLDHINLKHSVTTEYKNRVNTICKTQLSGKYLIKAINTYAIPILTYSFGIIKWTKTDINNIEIKTRVILTKHKHLHPKSAIERLSISRKEGGRGLIDIRALWDKQIASLQSFFHRKAITSKLHRVIVDNDSKFTPLNLSEVPETQHTTEQQTDYDTQKRDQWKRKTIHGRHPHDLQQTHVDLQASNRWLTSANLFPETEGFIIAIQDQVINTKNYKKHIIKDPTAMNDKCRKCHRHPETIQHITGACPTLTQSDYTHRHNQIANIIHQKLAYKYKLIQDVHIPYYKYTPNPILENSTHKLYYDRAILTDKTIHFNRPDLTIQDKVNKIAYIVDIAVPNTHNILKTITEKINKYTELKEEILRIWKLNQVYIVPIVISTTGVVPKHLHYGLKLLDLSPNTYISIQKAAILNTCRTVRKFMQSDDTPLESPDHPLDPIIPT

SEQ ID NO: 25693 - protein, 1329 aa, Phalera bucephala
METRSKSKRLGPLPGGDRRGAPGADAGCDSIRTVGGERLNRRVLSGSPEDATANQTNDRQTDNLSRNSSPPLSLCIEPYSPSTASYIPSPISSPDHDPSDRISPPNLAVAQGVNTFLPASTKAGKPRVRMKWPTDVNIFIMRTYYLITKLETDMTCYRKILHELFTKQYPDVNASEQRISDQRRMIVKNRYLSQETLNQIKEEVKLRLMDNRIEQDSTPEPSTSAPIEMFVTSNNNTHDNLPIITRTQSQSYSDSPQYTTHILTTESATPAIDAFTQTPLTHNLILESELETQEITTSCEYNIQELNDDLNTTLLEYAGTDPTVRPKLPKLNYSKRLTELVQLFNDNILNRVLTHNALLTDIHTLIYCSAMVITKKLGYKILEYNQQVTRNKNTEPAWQRRLKTDINQLRSDIGRLTQYIRGNRTNKIIATVEKIFRRHKTHTTHEKNNSTPEEYLDTLKQKLALKANRLSRYKKALNRKQDNKLFVTNEKIFYRQLRGNKSTENREETTRTVSKERLEEFWSELWENRVLHKEGASWIEEEIETWAELNEMEFSHISESDVKNVTSRLNNWKSPGIDNVHNFWFKKFHVLHKSLAKSFTAVILNQEPIPAFIARGVTYMIPKSRNVDDPSQYRPITCLPTIYKILTATITHKINAHIEKNNIIAEEQKGCRRNHMGCKEQLVIDSTILKHANAKKRNLHCTFIDYRKAFDSIPHSWLLKVLKIYKINSSIIQFLNQIMPLWKTNLHIRNKDASMTSREITIKKGIFQGDSLSPLWFCLALNPLSSLLNKQRLGYHLKNNDGENTIVSHLIYMDDIKLYAKSKRDMQKLINITDTFSTDINMQFGLDKCKSINIKKGKLQPSNYLLDEGRIISSMEPGDLYKYLGYYQAKQLDHINLKHSVTTEYKNRVNTICKTQLSGKYLIKAINTYAIPILTYSFGIIKWTKTDINNIEIKTRVILTKHKHLHPKSAIERLSISRKEGGRGLIDIRALWDKQIASLQSFFHRKAITSKLHRVIVDNDSKFTPLNLSEVPETQHTTEQQTDYDTQKRDQWKRKTIHGRHPHDLQQTHVDLQASNRWLTSANLFPETEGFIIAIQDQVINTKNYKKHIIKDPTAMNDKCRKCHRHPETIQHITGACPTLTQSDYTHRHNQIANIIHQKLAYKYKLIQDVHIPYYKYTPNPILENSTHKLYYDRAILTDKTIHFNRPDLTIQDKVNKIGYIVDIAVPNTHNILKTITEKINKYTELKEEILRIWKLNQVYIVPIVISTTGVVPKHLHHSLKLLDLSPNTYISIQKAAILNTCRTVRKFMQSDDTPLESPDYPLDPIIPT

SEQ ID NO: 25694 - protein, 1298 aa, Hemaris fuciformis
METRSKRKRIGPLPGGDRRGTPGADAGCYSIRTVSGEELSRRTPTGSPEHTTANLHDRQTDRRIQSPSSSSITEPYSPSTVSYTPSGADEESPCPTPTPPTTPACSVTREVNTLLPASTKAGKVRVRMKWTEDVNIFIMRTYYLVTKLETDMTIYRKTLHELFQKQYPGINVSEQRISDQRRVIVKNKYLKDETLQKIKDEVRLQLEENSNFIPPSSPIDINTICTPTNILNQPQPMPVTNRTLVQNNSDDNFLEAVTPIITLGGSGPSSADIILPDGLIQKLHDDLQCTIIKYGGMDPSLRPPLPKLRYNSRLTKLVHIMNNNLLSQFVTTETTLLDIHTLVYCCAMVTTEQLGMKIPGHTQEQSRKVNKVPEWQIRLERNISQLRADIGRITQYIRGNRSKKIIKHVESIFNKNKIHTKHENSNILPEEFLDTLKQKLALKSHRLARYKKGLQRKQQNSLFATNEKLFYRHLNSNINTIDNNTEMPATDVLEQFWSNIWEKEILHNEEAPWIKEEEAKWSGITEMEFGEIQVDDVANVTSRLHNWKAAGIDKVHNFWYKKLTFLHKHIAKNFTEIMHGKQPIPQFIAKGITYMIPKSKITNDPSQYRPITCLPTIYKVFTAVITRKISTHLEINNILAEEQKGCRRNHMGCKEQLIIDSTIYGVINSRKRNLHCTYIDYQKAFDSIPHSWLLRVLNIYKINPTIVKFLKELMSFWKTKLHIKNNINSITSREIIIKKGIYQGDSLSPLWFCLALNPLSSLLSSSQKGFNFKHSIHDTVISHLVYMDDIKLYANNTKDMKLLIDITTKFSTDINMKFGLDKCKTIHINRGTIVSEDYTLLNNQVISSMEANDLYKYLGYNQSKKLDHVKLKQSLATEYKNRVSRISKSKLTGKHLIKAINTYAIPILTYSFGIIKWTKTDIKNLEIKTRTILTKHNHLHPKSAIERLTIKRIHGGRGLIDLQALLHKQITNLQSFFYRKASTSSIHKAIVENDKKHTPLNLSESSDAPNTTNGPTDFEQIKIKDWKSKVLHGRHPYDLEQTHIDTEASNKFLTNGGLFPETEGFIIAIQDQIINTRNYRKHIIKDPTAIEDKCRKCHSHPETIQHITGACPTLTQTDYTHRHNQIVNIIHQKLAIKYKLIPDTQPIPYYKYTPNSVLENKNYKMYYDRAILTDKTIHYNRPDITIQDKVNKITYVVDVAVPNTHNIAKTITEKITKYTELKDEIARIWRMDKVYIIPIVLSTTGVIPKYLHHSLKLLDLPPFTYILMQKAAILNTCRIVRKFLQSDERLPGLNTDRQ

SEQ ID NO: 25695 - protein, 1298 aa, Hemaris fuciformis
METRSKRKRIGPLPGGDRRGTPGADAGCYSIRTVSGEELSRRTPTGSPEHTTANLHDRQTDRKIQSPSSSSITEPYSPSTVSYTPSGADEESPCPTPTPPTTPACSVTREVNTLLPASTKAGKVRVRMKWTEDVNIFIMRTYYLVTKLETDMTIYRKTLHELFQKQYPGINVSEQRISDQRRVIVKNKYLKDEILQKIKDEVRLQLEENSNFIPPSSPIDINTICTPTNILNQPQPMPVTNRTLVQNNSDDNFLEAVTPIITVGGSGPSSADIILPDGLIQKLHDDLQCTIIKYGGMDPSLRPPLPKLRYNSRLTKLVHIMNNNLLSQFVTTETTLLDIHTLVYCCAMVTTEQLGMKIPGHTQEQSRKVNKVPEWQIRLERNISQLRADIGRITQYIRGNRSKKIIKHVESIFNKNKIHTKHENSNILPEEFLDTLKQKLALKSHRLARYKKGLQRKQQNSLFATNEKLFYRHLNSNINTIDNNTEMPATDVLEQFWSNIWEKEILHNEEAPWIKEEEAKWSGITEMECGEIQVDDVANVTSRLHNWKAAGIDKVHNFWYKKLTSLHKHIAKNFTEIMLGKQPIPQFIAKGITYMIPKSKITNDPSQYRPITCLPTIYKVFTAVITRKISTHLEINNILAEEQKGCRRNHMGCKEQLIIDSTIYGVINSRKRNLHCTYIDYQKAFDSIPHSWLLRVLNIYKINPTIVKFLKELMSFWKTKLHIKNNINSITSREITIKKGIYQGDSLSPLWFCLALNPLSSLLSSSQKGFHFKHSIHDTVISHLVYMDDIKLYANNTKDMKLLIDITTKFSTDINMKFGLDKCKTIHINRGTIVSEDYTLLNNQVISSMEANDLYKYLGYNQSKKLDHVKLKQSLATEYKNRVSRISKSKLTGKHLIKAINTYAIPILTYSFGIIKWTKTDIKNLEIKTRTILTKHNHLHPKSAIERLTIKRIHGGRGLIDLQALLHKQITNLQSFFYRKASTSSIHKAIVENDKKHTPLNLSESSDAPNTTNGTTDFEQIKIKDWKSKVLHGRHPYDLEQTHIDTEASNKFLTNGGLFPETEGFIIAIQDQIINTRNYRKHIIKDPTVIEDKCRKCHSHPETIQHITGACPTLTQTDYTHRHNQIVNIIHQKLAIKYKLIPDTQPIPYYKYTPNSVLENKNYKMYYDRAILTDKTIHYNRPDITIQDKTNKITYVVDVAVPNTHNIAKTITEKITKYTELKDEIARIWRMDKVYIIPIVLSTTGVIPKYLHHSLKLLDLPPFTYILMQKAAILNTCRIVRKFLQSDERLPGLNTDRQ

SEQ ID NO: 25696 - protein, 1299 aa, Deilephila porcellus
METRSKKKLRGPLPGGDRRGTPGADAGCFSMRTVSGEELSRRAPTGSPEDTTANVHDRLTDNRSESPISSIIEPYSPSTISYAPSATDEESRSSTPPPTSVLSATREVNAFLPASTKAGKARVRMKWTVDVNIFIMRTYYLITKLETDMTTYRKTLHELFLQQYPGINVTEQRISDQRRAIIRNKFLSDDILENIKEQIRFELEQASTTPISLNLIDRNNIHTQNRDPNQDPVSPNLYADHSTLCHNQENDCENLTQTVRDIMTLGNADIQIVENPVPDGTAQKMYDDLQTMFIKYSDTDPSLRLPLPKLRYNKKLTQLLNIFNNNILTRFISPEATLVDIHTIVYCTAMVITQELGYKLPDQSQERSKNTNKKPAWQIRLEKNIAHLRADIGRVTQYIRGNRSKKIVNHVQNIFSKNKLHTRHENSNILPEEFLDTLKQKLSLKSHRLARYKKGLKRKQQNALFTTNEKIFYRQINSQNNTDQGNAEIPTIENLEDFWSNIWEETVLHNEEALWIKEEEAKWDKIDEMEFNEITEDDILNATAKLHNWKSAGIDKIHNFWFKKLHILHKLIAKNFTEIILGKQLMPQFITKGITYMIPKSNNSQDPSQYRPITCLPTIYKVFTSAITHKINTHLEINNIIAEEQKGCRRNHMGCKEQLIIDSTIHGQINSRKRNLHCTYIDYKKAFDSIPHSWLLKVLNIYKINPALIKFLKETMTKWKTNLYIKNNTKSIVSREIAIKKGIYQGDSLSPLWFCLALNPLSSLLNKCQKGFRFKNSDNDTLISHLIYMDDIKLYANNSEDMKHLIDITSNFSKDINMQFGLDKCKTIHIQKGIIVSQNYPISDNQIISSMEPNEVYKYLGYHQSKKLDHVKLKLKLSTEYKNRVAKISKSQLTGKNLIKAINTYAIPVLTYSFGVIKWTKTDINSLERKTRTILTKHNHLHPKSAIERLTIKRKDGGRGLIDLQTLLQKQIHSLKSFFYSKASTSRIHKTIVKNDIKYTPLNLSETPILLHTNNRQTDYDTEKINYWKAKVLHGRHPYDLEQPHIDAEASNKFLAIGNLFPETEGFILAIQDQIINTRNYRKYIIKDPAAADDKCRKCHRSPETIQHITGACPTLTQTDYTHIHNQVVNIIHQKLAIKYKLIADASKPVPYYKYTPNLVLENNNYKMYYDRAILTDRTIHYNRPDITIQDKTKKIAYIVDIAIPNTHNITKTITEKVTKYTELKDEIARIWRMEKVYTVPIILSTTGVIPKHLHHSIKLLDLPPHIYIPMQKAAILNTCRTVRKFLQSDDQLPDVSHQ

SEQ ID NO: 25697 - protein, 1299 aa, Deilephila porcellus
METRSKKKLRGPLPGGDRRGTPGADAGCFSMRTVSGEELSRRAPTGSPEDTTANVHDRLTDNRSESPISSIIEPYSPSTISYAPSATDEESRSSTPPPTSVLSATREVNAFLPASTKAGKARVRMKWTVDVNIFIMRTYYLITKLETDMTTYRKTLHELFLQQYPGINVTEQRISDQRRAIIRNKFLSDDILENIKEQIRFELEQASTTPISLNLIDRNNIHTQNRDPNQDPVSPNLYADHSTLCHNQENDCENLTQTVRDIMTLGNADIQIVENPVPDGTAQKMYDDLQTMFIKYSDTDPSLRLPLPKLRYNKKLTQLLNIFNNNILTRFISPEATLVDIHTIVYCTAMVITQELGYKLPDQSQERSKNTNKKPAWQIRLEKNIAHLRADIGRVTQYIRGNRSKKIVNHVQNIFSKNKLHTRHENSNILPEEFLDTLKQKLSLKSHRLARYKKGLKRKQQNALFTTNEKIFYRQINSQNNTDQGNAEIPTIENLEDFWSNIWEETVLHNEEALWIKEEEAKWDKIDEMEFNEITEDDILNATAKLHNWKSAGIDKIHNFWFKKLHILHKLIAKNFTEIILGKQLMPQFITKGITYMIPKSNNSQDPSQYRPITCLPTIYKVFTSAITHKINTHLEINNIIAEEQKGCRRNHMGCKEQLIIDSTIHGQINSRKRNLHCTYIDYKKAFDSIPHSWLLKVLNIYKINPALIKFLKETMTKWKTNLYIKNNTKSIVSREIAIKKGIYQGDSLSPLWFCLALNPLSSLLNKCQKGFRFKNSDNDTLISHLIYMDDIKLYANNSEDMKHLIDITSNFSKDINMQFGLDKCKTIHIQKGIIVSQNYPISDNQIISSMEPNEVYKYLGYHQSKKLDHVKLKLKLSTEYKNRVAKISKSQLTGKNLIKAINTYAIPVLTYSFGVIKWTKTDINSLERKTRTILTKHNHLHPKSAIERLTIKRKDGGRGLIDLQTLLQKQIHSLKSFFYSKASTSRIHKTIVKNDIKYTPLNLSETPILLHTNNRQTDYDTEKINYWKAKVLHGRHPYDLEQPHIDAEASNKFLAIGNLFPETEGFILAIQDQIINTRNYRKYIIKDPAAADDKCRKCHRSPETIQHITGACPTLTQTDYTHRHNQVVNIIHQKLAIKYKLIADASKPVPYYKYTPNLVLENNNYKMYYDRAILTDRTIHYNRPDITIQDKTKKIAYIVDIAIPNTHNITKTITEKVTKYTELKDEIARIWRMEKVYIVPIILSTTGVIPKHLHHSIKLLDLPPHIYIPMQKAAILNTCRTVRKFLQSDDQLPDVSHQ

SEQ ID NO: 25698 - protein, 1205 aa, Boloria selene
MQEVNSFLPASTKAGKARVRMTWSKEVNMFIMRTYYIITKLETDLTCYRKILHEFFTKQYPGVNVTEQRISDQRRMIIKKKYLSEEELEQLKIEARREIDETNTAHNNSYNTLPCSNSIELEAHNITNELPQTQSCVLNICSSSTEPTTLTTHSFTQTSNTSTQVDMAYDIILETDLETLEHETIGDEVIAKLHEELKTTILQYSGMDPTCRPKLTKLKYSKKLTNLIDIFNQNILNRFITDNALLTDIHTLVYCSAMVITKELGLKIFNEHQLPNRTRNSEPAWQIRLQKSINQLRSDIGRLTQYIKGNRSKKVTKTAEKIFRNYRIHTNHENTNKSPEEYLDTLKQKLSLKAQRLRRYSKANERKQENKLFTTNEKLFYRQLKQDKNVTNVRDDTQNMITKEQLEDFWSDIWEKVVTHNESAEWIEEEKNNCDSIEEMIFDEITENDIKIATSKLHNWKSPGIDNIHNFWYKKLHTLHKSLAKTFTNVILQKQPLPPFISKGITYMIPKRSNTNDPSQYRPITCLPTLYKILTATISAKINSHLEFNMIMAEEQKGCRRNHMGCKEQLIIDSTIHRHANLKKRNLHCTFIDYRKAFDSVPHSWLIQVLKIYKINPIIVNFLKNIMLHWKTSLHLRNNNTSFITRDITIRKGIFQGDSLSPLWFCLALNPISRLLNDQKKGYLIQLPNAKIKISHLIYMDDIKLYASSFKDMKILLDITSKFSKDINMQFGLEKCKTLNIKKGKIEPGSYTLPEGGIISSMESEDVYKYLGYQQSKLIDHVSLKNILLSEYKNRVSRICKTQLTSKSLIKAINTYAIPILTYSFGIIKWTKTDIISLEIKTRTTLTKFNHLHPKSAIERISLNRRQGGRGLIDIQALWTKQLLTLKSFFHSKMSTSNLHNAIVNIDVNLTPLNLAEKPQVTDINSHQHTNREQLKLEQWKKKVLHGSHPYDLDQAHVDSEASNRWLTCGYLFPETEGFMIAIQDQVINTKNYRKFIIKDPTIADDKCRKCHKQSETIQHITGACPTLTQTDYTHRHNQIVNIIHQKLAIKHKLIPDTHTPYYKYTPSSILENTNFKIYYDRAILTDKTIHYNRPDITLQDKVNKIVYLIDIAVPNTHNLIKTITEKINKYTELKEEIAKMWRMNKVYIIPIVLSTTGIIPKHLHQSLKILDLSPNSYIIIQKAAILNTCRIVRKFMQDDINVVY

SEQ ID NO: 25699 - protein, 1310 aa, Boloria selene
METRSRSKRLGPLPGGDRRGALGADAECYSIRSVSGEELIRRAPSGSPENVTANSTQDRQTDNSSPSILLEEPYSPTTASYIPSPSSLISQNLAYSHRSTPTLDVMQEVNSFLPASTKAGKARVRMTWSKEVNMFIMRTYYIITKLETDLTCYRKILHEFFTKQYPEVNVTEQRISDQRRMIIKKKYLTEEELEQLKIEARREIDETNTAHNNSYNTLPCSNSIELEAHNITKELPQTQSCVLNICSSSTEPTTLTTHSFTQTSNTSTQVDMAYDIILETDLETLEHETIGDEVIAKLHEELKTTILQYSGMDPTCRPKLPKLKYSKKLTNLIDIFNQNILNRFITDNALLTDIHTLVYCSAMVITKELGLKIFNEHQLPNRTRNSEPAWQIRLQKSINQLRSDIGRLTQYIKGNRSKKVTKTAEKIFRNYRIHTNHENTNKSPEEYLDTLKQKLSLKAQRLRRYSKANERKQENKLFTTNEKLFYRQLKQDKNVTNVRDDTQNMITKEQLEDFWSDIWEKVVTHNESAEWIEEEKNNCDSIEEMIFDEITENDIKIATSKLHNWKSPGIDNIHNFWYKKLHTLHKSLAKTFTNVILQKQPLPPFISKGITYMIPKRSNTNDPSQYRPITCLPTLYKILTATISAKINSHLELNMIMAEEQKGCRRNHMGCKEQLIIDSTIHRHANLKKRNLHCTFIDYRKAFDSVPHSWLIQVLKIYKINPIIVNFLKNIMLHWKTSLHLRNNNTSFITRDITIRKGIFQGDSLSPLWFCLALNPISRLLNDQKKGYLIQLPNAKIKISHLIYMDDIKLYASSFKDMKILLDITSKFSKDINMQFGLEKCKTLNIKKGKIEPGSYTLPEGGIISSMESEDVYKYLGYQQSKLIDHVSLKNILLSEYKNRVSRICKTQLTSKSLIKAINTYAIPILTYSFGIIKWTKTDIISLEIKTRTTLTKFNHLHPKSAIERISLNRRQGGRGLIDIQALWTKQLLTLKSFFHSKMSTSNLHNAIVNIDVNLTPLNLAEKPHVTDINSHQHTNREQLKLEQWKKKVLHGRHPYDLDQAHVDSEASNRWLTCGYLFPETEGFMIAIQDQVINTKNYRKFIIKDPTIADDKCRKCHKQSETIQHITGACPTLTQTDYTHRHNQIVNIIHQKLAIKHKLIPDTHTPYYKYTPSSILENTNFKIYYDRAILTDKTIHYNRPDITLQDKVNKIVYLIDIAVPNTHNLIKTITEKINKYTELKEEIAKMWRMNKVYIIPIVLSTTGIIPKHLHQSLKILDLSPNSYIIIQKAAILNTCRIVRKFMQDDINVVY

SEQ ID NO: 25700 - protein, 1308 aa, Boloria selene
METRLRSKRLGPLPGGDRRGALGADAECYSIRSVSGEELIRRAPSGSPENVTANSTQDRQTDNSSPSILLEEPYSPSTASYIPSPSSLISQNLAHSHRSTPTLDVMQEVNSFLPASTKAGKARVRMTWSKEVNMFIMRTYYITTKLETDLTCYRKILHEFFTKKYPEINVTEQRISDQRRMIIKKKYLSEEELEQLKNEARHEIYETNIAHNTIHNTLPCSNSIDLEAHITNELPQTQSSVLNICSSSTEPTSLTTHSFTQTSNTSTQVDMAYDIILETDLETLEHETIGDEVIAKIHEELKMTILQYSGMDPTYRPKLPKLKYSKKLTNLIDIFNKNILNRFITDNALLTDIHTLVYCSAMVITKELGLKIFNEHQQPNHTRNSEPAWQIRLQKSINQLRSDIGRITQYIKGNRSKKVTKTAEKIFRNYRIHTTHENTNKSPEEYLDTLKQKLSLKAQRLRRYSKANQRKQENKLFTTNEKLFYRQLKQDKNVTNVRDDTEMVTKEQLEVFWSNIWEKVVTHNESAEWIEEEKNNCDSIQEMIFDEITENDIKIATSKLHNWKSPGIDNIHNFWYKKLHTLHKSLAKTFTNVILQKQPLPPFISKGITYMIPKKSNSNDPSQYRPITCLPTLYKILTATISAKINSHLELNMIMAEEQKGCRRNHMGCKEQLIIDSTIHKHANLKKRNLHCTFIDYRKAFDSVPHSWLIQVLKIYKINPIIIHFLKNIMGHWKTSLHLRNNNTSINTRDIAIRKGIFQGDSLSPLWFCLALNPISRLLNDQKKGYLIQLPNSKIKISHLIYMDDIKLYASSFKDMKILLDITSKFSNDINMQFGLEKCKIINIKKGKVEPGSYTLPEGGIISSMESDDVYKYLGYQQSKLIDHVRLKNILVTEYKNRVSQICKTQLTSKSLIKAINTYAIPILTYSFGIIKWTKTDIISLEIKTRTILTKFNHLHPKSAIERISLHRRQGGRGLIDIQALWTKQLSTLKSFFHSKMSTSNLHNAIVNIDVNLTPLNLAEKPHVTDINSHEHTNREQLKSEQWKKKVLHGRHPYDLDQAHVDSEASNRWLTCGYLFPETEGFMIAIQDQVINTKNYRKYIIKDPTIADDKCRKCHKQSETIQHITGACPTLTQTDYTHRHNQIVNIIHQKLAIKHKLIPDTHTPYYKYTPSSVLENSNFKIYYDRAILTDKTIHYNRPDITLQDKVNKIVYLIDIAVPNTHNLVKTITEKINKYTELKEEITKMWRMNKVYIIPIVLSTTGIIPKHLHQSLKILDLSSNSYINIQKAAILNTCRIVRKFMQDDINVVY

SEQ ID NO: 25701 - protein, 1318 aa, Endotricha flammealis
METRSRSKRILSLPGGDRRGALGADAECHSMQTVGGTELNRRAPAGSPENITANQQSPDRQTSGHTSPRSSLVNEPYSPSTVSYVPSPTELDQNSRELPTPTYDVTQEANAFLPASTKAGKPRVRMKWSSEVNIFIMRTYYSITNLETDMTQYRKTLHELFLKQYPDINVSEQRVSDQRRAIIKNKYLSEDLVNNIKEVVKVHLEEESRRQNSPINDRQTQSIPLNPDTTLTEDQHQISNPLSNTQTQSHSLSQQITQLITTGNNTQTSDMSTQTSQTFNILLETEIEITDTENHSTESTQKLVEQLQATILQYGGMDPSLRPKLPKLSYSKKLNRLVYIFNKEILNRFLTELALLSDIHTLVYCSAYVITQELGFKISDDPSRPPRENQSKPSWQIRLEKDINRLRADIARLTEYIKGNRSRKVLKHVDRICNNNKIHSRHENNNKKLEEFLDTLKQKLTLKANRISRYKKALQRKQQNKLFSTNENIFYRQLRNPSTQDTNTNNSQTVTQENLEKFWSEIWENPVSHNEEAPWIDDEENRWKHIEEMAFEEVEEKDVASATAKTHNWKSPGVDKIHNFWYKKLHILHKPLAKCFTDIILGTQPTPEFITKGITFMIPKNKNTQDPSQYRPITCLPTIYKILTSIVSHKINNHLEKHNIIAEEQKGCRRNHMGCKEQLIIDSTIHKQANSKNRNLHCTYIDYRKAFDSIPHSWLIKILKIYRINTSLTNFLNSILPTWRTNLHVKNGRNSIITREISIKKGIYQGDSLSPLWFCLALNPLSHLLNKEQNGYKLKHDNQETSISHLIYMDDIKLYTSSQKDMKQLIDTTTRFSTDINMKFGLEKCKTLNIKRGKVEAGSYTTPEGDLVASVESDEVYKYLGYHQSRQLDHTNLKKSLITEYNRRVTSLCKSQLSGKRLIKAINTYAIPILTYSFGIIKWIKTDLNSIEIKTRTIFTKHNNLHPKSAIERLILKRKQGGRGLIDIKTLWNKQINSLKQFFYRKAETSRIHKTILDNDTNYTPLNLAEMEPSNTEERTDEDSEKEKLNQWKRKVLHGRHPQDLEQADIDLEASNKWLTHGNLFPETEGFIIAIQDQVINTKNYRKHIIKDPTANDDKCRKCHRQPETIQHITGACPTLTQTDYTHRHNQVVNIIHQKIATKHNLIPNTTTPYYQYKPSPVLENNNYKIYYDRAILTDKTVHCNRPDITIQDKQNKTAYIVDIAVPNSHNIRKTITEKISKYVELKEEITAIWKLNKVYIVPIVLSTTGIIPKHLHHSLKLLDLPPHTYINMQKAAILNTCRTVRKFMQVDETNAELTNNI

SEQ ID NO: 25702 - protein, 1318 aa, Endotricha flammealis
METRSRSKRILSLPGGDRRGALGADAECHSMQTVGGTELNRRAPAGSPENITANQQSPDRQTSGHTSPRSSLVNEPYSPSTVSYVPSPTELDQNSRELPTPTYDVTQEANAFLPASTKAGKPRVRMKWSSEVNIFIMRTYYSITNLETDMTQYRKTLHELFLKQYPDINVSEQRVSDQRRAIIKNKYLSEDLLNNIKEEVKVHLEEESRRQNSPINDRQTQSIPLNPDTTLTEDQHQISNPLSNTQTQSHSLSQQITQLITTGNNTQTSDMSTQTSQTFNILLETEIEITDTENHSTESTQKLVEQLQATILQYGGMDPSLRPKLPKLSYSKKLNRLVYIFNKEILNRFLTELALLSDIHTLVYCSAYVITQELGFKISDDPSRPPRENQSKPSWQIRLEKDINRLRADIARLTEYIKGNRSRKVLKHLDRICNNNKIHSRHENNNKKLEEFLDTLKQKLTLKANRISRYKKALQRKQQNKLFSTNEKIFYRQLRNPSTQDTNTNNSQTVTQENLEKFWSEIWENPVSHNEEAPWIDDEENRWKDIEEMAFEEVEEKDVASATAKTHNWKSPGVDKIHNFWYKKLHILHKPLAKCFTDIILGTQPTPEFITKGMTFMIPKNKNTQDPSQYRPITCLPTIYKILTSIVSHKINNHLEKHNIIAEEQKGCRRNHMGCKEQLIIDSTIHKQANSKNRNLHCTYIDYRKAFDSIPHSWLIKILKIYRINTSLTNFLNSILPTWRTNLHVKNGRNSIITREISIKKGIYQGDSLSPLWFCLALNPLSHLLNKEQNGYKLKHDNQETSISHLIYMDDIKLYTSSQKDMKQLIDTTTRFSTDINMKFGLEKCKTLNIKRGKVEAGSYTTPEGDLIASMESDEVYKYLGYHQSRQLDHTNLKKSLITEYNRRVTSLCKSQLSGKRLIKAINTYAIPILTYSFGIIKWTKTDLNSIEIKTRTIFTKHNNLHPKSAIERLTLKRKQGGRGLIDIKTLWNKQINSLKQFFYRKAETSRIHKTILDNDTNYTPLNLAEMEPSNTEDRTDEDSEKEKLNQWKRKVLHGRHPQDLEQADIDLEASNKWLTHGNLFPETEGFIIAIQDQVINTKNYRKHIIKDPTANDDKCRKCHRQPETIQHITGACPTLTQTDYTHRHNQVVNIIHQKIATKHNLIPNTTTPYYQYKPSPVLENNNYKIYYDRAILTDKTVHCNRPDITIQDKQNKTAYIVDIAVPNSHNIRKTITEKISKYVELKEEIAAIWKLNKVYIVPIVLSTTGIIPKHLHHSLKLLDLPPHTYINMQKAAILNTCRTVRKFMQVDETNAELTNNI

SEQ ID NO: 25703 - protein, 1272 aa, Lymantria dispar
MLLRSGYQLPQAGTGVNHDGESRLELPSLSCPTYSGGDAVSQTSTSAQLQAVADHHQHHESSSITEPFSPSTASYIPTSPSSVISREIVTPTLSVAQEVNSFLPASTKLGKPRVRMKWSQDVNIFIMRTYYFITKLETDMTCYRKTLHALFTQQYPNINVTEQRVSDQRRMIVKKRYLTENMLNHIKEEVRQAMTNPCEENIQHTLTHNETNTRFTPTNNVLNQSISTSHTQTSNTYDIILESEVQVEDYEIHEDILISKIEDKLKTKILFYAAMEPAMRPKLPKLNYSKRLTDFINIFNDNILDRFLTKDILLCDIHTLIYCTATVISEELGYKIYKENCNTTKQIQKEPFWQIRLQQDISKLRADIGRLTQYISGNRSNKVIRNVGRIFKNNKIHTVHEQNNKTPEEHLDTLKQKLTLKSHRLARYKKSLQRKQQNRLFCTNEKIFYRQMKLGIDKNYSGAESISKTQLEEFWSHIWENETTHNEEAPWIREEEDKWKEINEMEFHRVDANDIKTIVTKLHNWKTPGIDKVHNFWYKQLHTLHKPLAKSFTDIITKKQPIPPFIAKGITYMIPKGKQSNDPSQYRPITCLPTIYKILTAIITNKINLHIETYNIISEEQKGCRRNHMGCKEQLIIDSTIHKHANKMKRNLHCTYIDYRKAFDSVPHTWLLRVLKIYKINPCLINFLKNIMSFWQTNLFLRHTDTTVMSRDIYIKKGIYQGDSLSPLWFCLALNPLSHIINKHKVGYRLKHNNTETKIAHLIYMDDIKLYTTTAKDMKVLIDTTHNFSRDINMTFGLEKCRILNIKKGKIQTGDCMLQTGESISAMESDEVYKYLGYQQSKQLEHSTLKKTLCEEYKNRLNTICKTQLTSTRLIKAINTYAIPILTYSFGIVKWTKTDLHSLEIKTRTVLTKNKYLHPKSAIERICIKRISGGRGLINLSNLWKKQLYNLRDFFQNKAKTSNIHQAIIVNDSKFTPLNLSESLSIGQNNNNTIHFLKEKINKWKSKILHGRHPHDLDQTHIDSQASNRWLTSGYLFPETEGFMIAIQDQVINTKNYKKYIIKDPKAADDKCRKCHRQSETIQHITGACSTLTQTDYTHRHNQIVNIIHKKLAMKYNLDSDTYTPYYKYTPNPVLENNKWKIYYDRAILTDKTIHFNRPDITLFNKEDKIAYIVDIAVPNTHNLLKTITEKINKYTELKEEIIRMWGLNKAYIVPIVISTTGVIPKYLHHSLKLLNLPQHTFINIQKAAILNTCRIVRKFMQIDETTLSISD

SEQ ID NO: 25704 - protein, 1272 aa, Lymantria dispar
MLLRSGYQLPQAGTGVNHDGESRLELPSLSCPTYSGGDAVSQTSTSAQLQAVADHHQHHESSSITEPFSPSTASYIPTSPSSVISREIVTPTLSVAQEVNSFLPASTKLGKPRVRMKWSQDVNIFIMRTYYFITKLETDMTCYRKTLHALFTQQYPNINVTEQRVSDQRRMIVKKRYLTENMLNHIKEEVRQAMTNPCEENIQHTLSHNETNTRFTPTNNVLNQSISTSHTQTSNTYDIILESEVQVGDYEIHEDILISKIEDKLKTKILFYAAIEPAMRPKLPKLNYSKRLTDFINIFNDNILDRFLTKDILLCDIHTLIYCTATVISEELGYKIYKENCNTTKQIQKEPFWQIRLQQDISKLRADIGRLTQYISGNRSNKVIRNVGRIFKNNKIHTVHEQNNKKPEEHLDTLKQKLTLKSHRLARYKKSLQRKQQNRLFCTNEKIFYRQMKLGIDKNYSGAESISKTQLEEFWSHIWENETTHNEEAPWIREEEDKWKEINEMEFHRVDANDIKTIVTKLHNWKTPGIDKVHNFWYKQLHTLHKPLAKSFTDIITKKQPIPPFIAKGITYMIPKGKQSNDPSQYRPITCLPTIYKILTAIITNKINLHIETHNIISEEQKGCRRNHMGCKEQLIIDSTIHKHANKMKRNLHCTYIDYRKAFDSVPHTWLLRVLKIYKINPCLINFLKNIMSFWQTNLFLRHTDTTVMSRDIYIKKGIYQGDSLSPLWFCLALNPLSHIINKHKVGYRLKHNNTETKIAHLIYMDDIKLYTTTAKDMKVLIDTTHNFSRDINMTFGLEKCRILNIKKGKIQNGDCMLQTGESISAMESDEVYKYLGYQQSKQLEHSTLKKTLCEEYKNRLNTICKTQLTSKRLIKAINTYAIPILTYSFGIVKWTKTDLHSLEIKTRTVLTKNKYLHPKSAIERICIKRISGGRGLINLSNLWKKQLYNLRDFFQNKAKTSNIHQAIIVNDSKFTPLNLSESLSIGQNNNNTIHFLKEKINKWKSKILHGRHPQDLDQTHIDSQASNRWLTSGYLFPETEGFMIAIQDQVINTKNYKKYIIKDPKAADDKCRKCHKQSETIQHITGACSTLTQTDYIHRHNQIVNIIHKKLAMKYNLDSDTYTPYYKYTPNPVLENNKWKIYYDRAILTDKTIHFNRPDITLFNKEDKIAYIVDIAVPNTHNLLKTITEKINKYTELKEEIIRMWGLNKAYIVPIVISTTGVIPKYLHHSLKLLNLPQHTFINIQKAAILNTCRIVRKFMQIDETTLSISD

SEQ ID NO: 25705 - protein, 1272 aa, Lymantria dispar
MLLRSGYQLPQAGTGVNHDGESRLELPSLSCPTYSGGDAVSQTSTSAQLQAVADHHQHHESSSITEPFSPSTASYIPTSPSSVISREIVTPTLSVAQEVNSFLPASTKLGKPRVRMKWSQDVNIFIMRTYYFITKLETDMTCYRKTLHALFTQQYPNINVTEQRVSDQRRMIVKKRYLTENMLNHIKEEVRQAMTNPCEENIQHTLTHNETNTRFTPTNNVLNQSISTSHTQTSNTYDIILESEVQVEDYEIHEDILISKIEDKLKTKILFYAAMEPAMRPKLPKLNYSKRLTDFINIFNDNILDRFLTKDILLCDIHTLIYCTATVISEELGYKIYKENCNTTKQIQKEPFWQIRLQQDISKLRADIGRLTQYISGNRSNKVIRNVGRIFKNNKIHTVHEQNNKTPEEHLDTLKQKLTLKSHRLARYKKSLQRKQQNRLFCANEKIFYRQMKLGIDKNYSGAESISKTQLEEFWSHIWENETTHNEEAPWIREEEDKWKEINEMEFHRVDANDIKTIVTKLHNWKTPGIDKVHNFWYKQLHTLHKPLAKSFTDIITKKQPIPPFIAKGITYMIPKGKQSNDPSQYRPITCLPTIYKILTAIITNKINLHIETYNIISEEQKGCRRNHMGCKEQLIIDSTIHKHANKMKRNLHCTYIDYRKAFDSVPHTWLLRVLKIYKINPCLINFLKNIMSFWQTNLFLRHTDTTVMSRDIYIKKGIYQGDSLSPLWFCLALNPLSHIINKHKVGYRLKHNNTETKIAHLIYMDDIKLYTTTAKDMKVLIDTTHNFSRDINMTFGLEKCRILNIKKGKIQTGDCMLQTGESISAMESDEVYKYLGYQQSKQLEHSTLKKTLCEEYKNRLNTICKTQLTSKRLIKAINTYAIPILTYSFGIVKWTKTDLHSLEIKTRTVLTKNKYLHPKSAIERICIKRISGGRGLINLSNLWKKQLYNLRDFFQNKAKTSNIHQAIIVNDSKFTPLNLSESLSIGQNNNNTIHFLKEKINKWKSKILHGRHPHDLDQTHIDSQASNRWLTSGYLFPETEGFMIAIQDQVINTKNYKKYIIKDPKAADDKCRKCHRQSETIQHITGACSTLTQTDYTHRHNQIVNIIHKKLAMKYNLDSDTYTPYYKYTPNPVLENNKWKIYYDRAILTDKTIHFNRPDITLFNKEDKIAYIVDIAVPNTHNLLKTITEKINKYTELKEEIIRMWGLNKAYIVPIVISTTGVIPKYLHHSLKLLNLPQHTFINIQKAAILNTCRLVRKFMQIDETTLSISD

SEQ ID NO: 25706 - protein, 1272 aa, Lymantria dispar
MLLRSGYQLPQAGTGVNHDGESRLELPSLSCPTYSGGDAVSQTSTSAQLQAVADHHQHHESSSITEPFSPSTASYIPTSPSSVISREIVTPTLSVAQEVNSFLPASTKLGKPRVRMKWSQDVNIFIMRTYYFITKLETDMTCYRKTLHALFTQQYPNINVTEQRVSDQRRMIVKKRYLTENMLNHIKEEVRQAMTNKCEENIQHTLTHNETNTRFTPTNNVLNQSISTSHTQTSNTYDIILESEVQVGDYEIHEDILISKIEDKLKTKILFYAAMEPAMRPKLPKLNYSKRLTDFINIFNDNILDRFLTKDILLCDIHTLIYCTATVISEELGYKIYKENCNTTKQIQKEPFWQIRLQQDISKLRADIGRLTQYISGNRSNKVIRNVGRIFKNNKIHTVHEQNNKTPEEHLDTLKQKLTLKSHRLARYKKSLQRKQQNRLFCTNEKIFYRQMKLGIDKNYSGAESISKTQLEEFWSHIWENETTHNEEAPWIREEEDKWKEINEMEFHRVDANDIKTIVTKLHNWKTPGIDKVHNFWYKQLHTLHKPLAKSFTDIITKKQPIPPFIAKGITYMIPKGKQSNDPSQYRPITCLPTIYKILTAIITNKINLHIETYNIISEEQRGCRRNHMGCKEQLIIDSTIHKHANKMKRNLHCTYIDYRKAFDSVPHTWLLRVLKIYKINPCLIIFLKNIMSFWQTNLFLRHTDTTVMSRDIYIKKGIYQGDSLSPLWFCLALNPLSHIINKHKVGYRLKHNNTETKIAHLIYMDDIKLYTTTAKDMKVLIDTTHNFSRDINMTFGLEKCRILNIKKGKIQTGDCMLQTGESISAMESDEVYKYLGYQQSKQLEHSTLKKTLCEEYKNRLNTICKTQLTSKRLIKAINTYAIPILTYSFGIVKWTKTDLHSLEIKTRTVLTKNKYLHPKSAIERICIKRISGGRGLINLSNLWKKQLYNLRDFFQNKAKTSNIHQAIIVNDSKFTPLNLSESLSIGQNNNNTIHFLKEKINKWKSKILHGRHPHDLDQTHIDSQASNRWLTSGYLFPETEGFMIAIQDQVINTKNYKKYIIKDPKAADDKCRKCHRQSETIQHITGACSTLTQTDYTHRHNQIVNIIHKKLAMKYNLDSDTYTPYYKYTPNPVLENNKWKIYYDRAILTDKTIHFNRPDITLFNKEDKIPYIVDIAVPNTHNLLKTITEKINKYTELKEEIIRMWGLNKAYIVPIVISTTGVIPKYLQYSLKLLNLPQHTFINIQKAAILNTCRIVRKFMQIDETTLSISD

SEQ ID NO: 25707 - protein, 1272 aa, Lymantria dispar
MLLRSGYQLPQAGTGVNHDGESRLELPSLSCPTYSGGDAVPQTSTSAQLQAVADHHQHHESSSITEPFSPSTASYIPTSPSSVISREIVTPTLSVAQEVNSFLPASTKLGKPRVRMKWSQDVNIFIMRTYYFITKLETDMTCYRKTLHALFTQQYPNINVTEQRVSDQRRMIVKKRYLTENMLNHIKEEVRQAMTNPCEENIQHTLSHNETNTRFTPTNNVLNQSISTSHTQTSNTYDIILESEVQVGDYEIHEDILISKIEDKLKTKILFYAAIEPAMRPKLPKLNYSKRLTDFINIFNDNILDRFLTKDILLCDIHTLIYCTATVISEELGYKIYKENCNTTKQIQKEPFWQIRLQQDISKLRADIGRLTQYISGNRSNKVIRNVGRIFKNNKIHTVHEQNNKKPEEHLDTLKQKLTLKSHRLARYKKSLQRKQQNRLFCTNEKIFYRQMKLGIDKNYSGAESISKTQLEEFWSHIWENETTHNEEAPWIREEEDKWKEINEMEFHRVDANDIKTIVTKLHNWKTPGIDKVHNFWYKQLHTLHKPLAKSFTDIITKKQPIPPFIAKGITYMIPKGKQSNDPSQYRPITCLPTIYKILTAIITNKINLHIETHNIISEEQKGCRRNHMGCKEQLIIDSTIHKHANKMKRNLHCTYIDYRKAFDSVPHTWLLRVLKIYKINPCLINFLKNIMSFWQTNLFLRHTDTTVMSRDIYIKKGIYQGDSLSPLWFCLALNPLSHIINKHKVGYRLKHNNTETKIAHLIYMDDIKLYTTTAKDMKVLIDTTHNFSRDINMTFGLEKCRILNIKKGKIQNGDCMLQTGESISAMESDEVYKYLGYQQSKQLEHSTLKKTLCEEYKNRLNTICKTQLTSKRLIKAINTYAIPILTYSFGIVKWTKTDLHSLEIKTRTVLTKNKYLHPKSAIERICIKRISGGRGLINLSNLWKKQLYNLRDFFQNKAKTSNIHQAIIVNDSKFTPLNLSESLSIGQNNNNTIHFLKEKINKWKSKILHGRHPQDLDQTHIDSQASNRWLTSGYLFPETEGFMIAIQDQVINTKNYKKYIIKDPKAADDKCRKCHKQSETIQHITGACSTLTQTDYIHRHNQIVNIIHKKLAMKYNLDSDTYTPYYKYTPNPVLENNKWKIYYDRAILTDKTIHFNRPDITLFNKEDKIAYIVDIAVPNTHNLLKTITEKINKYTELKEEIIRMWGLNKAYIVPIVISTTGVIPKYLHHSLKLLNLPQHTFINIQKAAILNTCRIVRKFMQIDETTLSISD

SEQ ID NO: 25708 - protein, 1272 aa, Lymantria dispar
MLLRSGYQLPQAGTGVNHDGESRLELPSLSCPTYSGGDAVSQTSTSAQLQAVADHHQHHESSSITKPFSPSTASYIPTSPSSVISREIVTPTLSVAQEVNSFLPASTKLGKPRVRMKWSQDVNIFIMRTYYFITKLETDMTCYRKTLHALFTQQYPNINVTEQRVSDQRRMIVKKRYLTENMLNHIKEEVRQAMTNPCEENIQHTLTHNETNTRFTPTNNVLNQSISTSHTQTSNTYDIILESEVQVEDYEIHEDILISKIEDKLKTKILFYAAMEPAMRPKLPKLNYSKRLTDFINIFNDNILDRFLTKDILLCDIHTLIYCTATVISEELGYKIYKENCNTTKQIQKEPFWQIRLQQDISKLRADIGRLTQYISGNRSNKVIRNVGRIFKNNKIHTVHEQNNKTPEEHLDTLKQKLTLKTHRLARYKKSLQRKQQNRLFCTNEKIFYRQMKLGIDKNYSGAESISKTQLEEFWSHIWENETTHNEEAPWIREEEDKWKEINEMEFHRVDANDIKTIVTKLHNWKTPGIDKVHNFWYKQLHTLHKPLAKSFTDIITKKQPIPPFIAKGITYMIPKGKQSNDPSQYRPITCLPTIYKILTAIITNKINLHIETYNIISEEQKGCRRNHMGCKEQLIIDSTIHKHANKMKRNLHCTYIDYRKAFDSVPHTWLLRVLKIYKINPCLINFLKNIMSFWQTNLFLRHTDTTVMSRDIYIKKGIYQGDSLSPLWFCLALNPLSHIINKHKVGYRLKHNNTETKIAHLIYMDDIKLYTTTAKDMKVLIDTTHNFSRDINMTFGLEKCRILNIKKGKIQTGGCMLQTGESISAMESDEVYKYLGYQQSKQLEHSTLKKTLCEEYKNRLNTICKTQLTSKRLIKAINTYAIPILTYSFGIVKWTKTDLHSLEIKTRTVLTKNKYLHPKSAIERICIKRISGGRGLINLSNLWKKQLYNLRDFFQNKAKTSNIHQAIIVNDSKFTPLNLSESLSIGQNNNNTIHFLKEKINKWKSKILHGRHPHDLDQTHIDSQASNRWLTSGYLFPETEGFMIAIQDQVINTKNYKKYIIKDPKAADDKCRKCHRQSETIQHITGACSTLTQTDYTHRHNQIVNIIHKKLAMKYNLDSDTYTPYYKYTPNPVLENNKWKIYYDRAILTDKTIHFNRPDITLFNKEDKIAYIVDIAVPNTHNLLKTITEKINKYTELKEEIIRMWGLNKAYIVPIVISTTGVIPKYLHHSLKLLNLPQHTFINIQKAAILNTCRLVRKFMQIDETTLSISD

SEQ ID NO: 25709 - protein, 1272 aa, Lymantria dispar
MLLRSGYQLPQAGTGVNHDGESRLELPSLSCPTYSGGDAVSQTSTSAQLQAVADHHQHHESSSITEPFSPSTASYIPTSPSSVISREIVTPTLSVAQEVNSFLPASTKLGKPRVRMKWSQDVNIFIMRTYYFITKLETDMTCYRKTLHALFTQQYPNINVTEQRVSDQRRMIVKKRYLTENMLNHIKEEVRQAMTNPCEENIQHTLSHNETNTRFTPTNNVLNQSISTSHTQTSNTYDIILESEVQVGDYEIHEDILISKIEDKLKTKILFYAAIEPAMRPKLPKLNYSKRLTDFINIFNDNILDRFLTKDILLCDIHTLIYCTATVISEELGYKIYKENCNTTKQIQKEPFWQIRLQQDISKLRADIGRLTQYISGNRSNKVIRNVGRIFKNNKIHTVHEQNNKKPEEHLDTLKQKLTLKSHRLARYKKSLQRKQQNRLFCTNEKIFYRQMKLGIDKNYSGAESISKTQLEEFWSHIWENETTHNEEAPWIREEEDKWKEINEMEFHRVDANDIKTIVTKLHNWKTPGIDKVHNFWYKQLHTLHKPLAKSFTDIITKKQPIPPFIAKGITYMIPKGKQSNDPSQYRPITCLPTIYKILTAIITNKINLHIETHNIISEEQKGCRRNHMGCKEQLIIDSTIHKHANKMKRNLHCTYIDYRKAFDSVPHTWLLRVLKIYKINPCLINFLKNIMSFWQTNLFLRHTDTTVMSRDIYIKKGIYQGDSLSPLWFCLALNPLSHIINKHKVGYRLKHNNTETKIAHLIYMDDIKLYTTTAKDMKVLIDTTHNFSRDINMTFGLEKWRILNIKKGKIQNRDCMLQTGESISAMESDEVYKYLGYQQSKQLEHSTLKKTLCEEYKNRLNTICKTQLTSKRLIKAINTYAIPILTYSFGIVKWTKTDLHSLEIKTRTVLTKNKYLHPKSAIERICIKRISGGRGLINLSNLWKKQLYNLRDFFQNKAKTSNIHQAIIVNDSKFTPLNLSESLSIGQNNNNTIHFLKEKINKWKSKILHGRHPHDLDQTHIDSQASNRWLTSGYLFPESERFMIAIQDQVINTKNYKKYIIKDPKAADDKCRKCHRQSETIQHITGACSTLTQTDYTHRHNQIVNIIHKKLAMKYNLDSDTYTPYYKYTPNPVLENNKWKIYYDRAILTDKTIHFNRPDITLFNKEDKIAYIVDIAVPNTHNLLKTITEKINKYTELKEEIIRMWGLNKAYIVPIVISTTGVIPKYLHHSLKLLNLPQHTFINIQKAAILNTCRIVRKFMQIDETTLSISD

SEQ ID NO: 25710 - protein, 1102 aa, Lymantria dispar
MIVKKRYLTENMLNHIKEEVRQAMTNPCEENIQHTLTHNETNTHFTPTNNVLNQSISTSHTQTSNTYDIILESEVQVGDYEIHEDILISKIEDKLKTKILFYAAMEPAMRPKLPKLNYSKRLTDFINIFNDNILDRFLTKDILLCDIHTLIYCTATVISEELGYKIYKENCNTTKQIQKEPFWQIRLQQDISKLRADIGRLTQYISGNRSNKVIRNVGRIFKNNKIHTVHEQNNKTPEEHLDTLKQKLTLKSHRLARYKKSLQRKQQNRLFCTNGKIFYRQMKLGIDKNYSDAESISKTQLEEIWSHIWENETTHNEEAPWIREEEDKWKEINEMEFHRVDANDIKTIVTKLHNWKTPGIDKVHNFWYKQLHTIHKPLAKSFTDIITKKQPIPPFIAKGITYMIPKGKQSNDPSQYRPITCLPTIYKILTAIITNKINLHIETYNIISEEQKGCRRNHMGCKEQLIIDSTIHKHANKMKRNLHCTYIDYRKAFDSVPHTWLLRVLKIYKINPCLINFLKNIMSFWQTNLFLRHTDTTVMSRDIYIKKGIYQGDSLSPLWFCLALNPLSHIINKHKVGYRLKHNNTETKIAHLIYMDDIKLYTTTAKDMKVLIDTTHNFSRDINMTFGLEKCRILNIKKGKIQTGDCMLQTGESISAMESDEVYKYLGYQQSKQLDHSTLKKTLCEEYKNRLNTICKTQLTSKRLIKAINTYAIPILTYSFGIVKWTKTDLHSLEIKTRTVLTKNKYLHPKSAIERICIKRISGGRGLINLSNLWEKQLYNLRDFFQNKAKTSNIHQAIIVNDSKFTPLNLSESLSIGQNNNKTIHFLKEKINKWKSKILHGRHPHDLDQTHIDSQASNRWLTSGYLFPETEGFMIAIQDQVINTKNYKKYIIKDPKAADDKCRKCHRQSETIQHITGACSTLTQTDYTHRHNQIVNIIHKKLAMKYNLDSDTYTPYYKYTPNPVLENNKWKIYYDRAILTDKTIHFNRPDITLFNKEDKIAYIVDIAVPNTHNLLKTITEKINKYTELKEEIIRMWGLNKAYIVPIVISTTGVIPKYLHHSLKLLNLPQHTFINIQKAAILNTCRIVRKFMQIDETTLSISD

SEQ ID NO: 25711 - protein, 1272 aa, Lymantria dispar
MLLRSGYQLPQAGTGVNHDGESRLELPSLSCPTYSGGDAVSQTSTSAQLQAVADHHQHHESSSITEPFSPSTASYIPTSPSSVISREIVTPTLSVAQEVNSFLPASTKLGKPRVRMKWSQDVNIFIMRTYYFITKLETDMTCYRKTLHALFTQQYPNINVTEQRVSDQRRMIVKKRYLTENMLNHIKEEVRQAMTNPCEENIQHTLTHNETNTRFTPTNNVLNQSISTSHTQTSNTYDIILESEVQVEDYEIHEDILISKIEDKLKTKILFYAAMEPAMRPKLPKLNYSKRLTDFINIFNDNILDRFLTKDILLCDIHTLIYCTATVISEELGYKIYKENCNTTKQIQKEPFWQIRLQQDISKLRADIGRLTQYISGNRSNKVIRNVGRIFKNNKIHTVHEQNNKTPEEHLDTLKQKLTLKSHRLARYKKSLQRKQQNRLFCTNEKIFYRQMKLGIDKNYSGAESISKTQLEEFWSHIWENETTHNEEAPWIREEEDKWKEINEMEFHRVDANDIKTIVTKLHNWKTPGIDKVHNFWYKQLHTLHKPLAKSFTDIITKKQPIPPFIAKGITYMIPKGKQSNDPSQYRPITCLPTIYKILTAIITNKINLHIETYNIISEEQKGCRRNHMGCKEQLIIDSTIHKHANKMKRNLHCTYIDYRKAFDSVPHTWLLRVLKIYKINPCLINFLKNIMSFWQTNLFLRHTDTTVMSRDIYIKKGIYQGDSLSPLWFCLALNPLSHIINKHKVGYRLKHNNTETKIAHLIYMDDIKLYTTTAKDMKVLIDTTHNFSRDINMTFGLEKCRILNIKKGKIQTGDCMLQTGESISAMESDEVYKYLGYQQSKQLEHSTLKKTLCEEYKNRLNTICKTQLTSKRLIKAINTYAIPILTYSFGIVKWTKTDLHSLEIKTRTVLTKNKYLHPKSAIERICIKRISGGRGLINLSNLWKKQLYNLRDFFQNKAKTSNIHQAIIVNDSKFTPLNLSESLSIGQNNNNTIHFLKEKINKWKSKILHGRHPHDLDQTHIDSQASNRWLTSGYLFPETEGFMIAIQDQVINTKNYKKYIIKDPKAADDKCRKCHRQSETIQHITGACSTLTQTDYTHRHNQIVNIIHKKLAMKYNLDSDTYTPYYKYTPNPVLENNKWKIYYDRAILTDKTIHFNRPDITLFNKEDKIAYIVDIAVPNTHNLLKTITEKINKYTELKEEIIRMWGLNKAYIVPIVISTTGVIPKYLHHSLKLLNLPQHTFINIQKAAILNTCRLVRKFMQIDETTLSISD

SEQ ID NO: 25712 - protein, 1272 aa, Lymantria dispar
MLLRSGYQLPQAGTGVNHDGESRLELPSLSCPTYSGGDAVSQTSTSAQLQAVADHHQHHESSSITEPFSPSTASYIPTSPSSVISREIVTPTLSVAQEVNSFLPASTKLGKPRVRMKWSQDVNIFIMRTYYFITKLETDMTCYRKTLHALFTQQYPNINVTEQRVSDQRRMIVKKRYLTENMLNHIKEEVRQAMTNPCEENIQHTLSHNETNTRFTPTNNVLNQSISTSHTQTSNTYDIILESEVQVGDYEIHEDILISKIEDKLKTKILFYAAIEPAMRPKLPKLNYSKRLTDFINIFNDNILDRFLTKDILLCDIHTLIYCTATVISEELGYKIYKENCNTTKQIQKEPFWQIRLQQDISKLRADIGRLTQYISGNRSNKVIRNVGRIFKNNKIHTVHEQNNKKPEEHLDTLKQKLTLKSHRLARYKKSLQRKQQNRLFCTNEKIFYRQMKLGIDKNYSGAESISKTQLEEFWSHIWENETTHNEEAPWIREEEDKWKEINEMEFHRVDANDIKTIVTKLHNWKTPGIDKVHNFWYKQLHTLHKPLAKSFTDIITKKQPIPPFIAKGITYMIPKGKQSNDPSQYRPITCLPTIYKILTAIITNKINLHIETHNIISEEQKGCRRNHMGCKEQLIIDSTIHKHANKMKRNLHCTYIDYRKAFDSVPHTWLLRVLKIYKINPCLINFLKNIMSFWQTNLFLRHTDTTVMPRDIYIKKGIYQGDSLSPLWFCLALNPLSHIINKHKVGYRLKHNNTETKIAHLIYMDDIKLYTTTAKDMKVLIDTTHNFSRDINMTFGLEKCRILNIKKGKIQNGDCMLQTGESISAMESDEVYKYLGYQQSKQLEHSTLKKTLCEEYKNRLNTICKTQLTSKRLIKAINTYAIPILTYSFGIVKWTKTDLHSLEIKTRTVLTKNKYLHPKSAIERICIKRISGGRGLINLSNLWKKQLYNLRDFFQNKAKTSNIHQAIIVNDSKFTPLNLSESLSIGQNNNNTIHFLKEKINKWKSKILHGRHPQDLDQTHIDSQASNRWLTSGYLFPETEGFMIAIQDQVINTKNYKKYIIKDPKAADDKCRKCHKQSETIQHITGACSTLTQTDYIHRHNQIVNIIHKKLAMKYNLDSDTYTPYYKYTPNPVLENNKWKIYYDRAILTDKTIHFNRPDITLFNKEDKIAYIVDIAVPNTHNLLKTITEKINKYTELKEEIIRMWGLNKAYIVPIVISTTGVIPKYLHHSLKLLNLPQHTFINIQKAAILNTCRIVRKFMQIDETTLSISD

SEQ ID NO: 25713 - protein, 1197 aa, Lymantria dispar
MLLRSGYQLPQAGTGVNHDGESRLELPSLSCPTYSGGDAVSQTSTSAQLQAVADHHQHHESSSITEPFSPSTASYIPTSPSSVISREIVTPTLSVAQEVNSFLPASTKLGKPRVRMKWSQDVNIFIMRTYYFITKLETDMTCYRKTLHALFTQQYPNINVTEQRVSDQRRMIVKKRYLTENMLNHIKEEVRQAMTNPCEENIQHTLSHNETNTRFTPTNNVLNQSISTSHTQTSNTYDIILESEVQVGDYEIHEDILISKIEDKLKTKILFYAAMEPAMRPKLPKLNYSKRLTDFINIFNDNILDRFLTKDILLCDIHTLIYCTATVISEELGYKIYKENCNTTKQIQKEPFWQIRLQQDISKLRADIGRLTQYISGNRSNKVIRNVGRIFKNNKIHTVHEQNNKKPEEHLDTLKQKLTLKSHRLARYKKSLQRKQQNRLFCTNEKIFYRQMKLGIDKNYSGAESISKTQLEEFWSHIWENETTHNEEAPWIREEEDKWKEINEMEFHRVDANDIKTIVTKLHNWKTPGIDKVHNFWYKQLHTLHIPLAKSFTDIITKKQPIPPFIAKGITYMIPKGKQSNDPSQYRPITCLPTIYKILTAIITNKINLHIETHNIISEEQKGCRRNHMGCKEQLIIDSTIHKHANKMKRNLHCTYIDYRKAFDSVPHTWLLRVLKIYKINPCLINFLKNIMSFWQTNLFLRHTDTTVMSRDIYIKKGIYQGDSLSPLWFCLALNPLSHIINKHKVGYRLKHNNTETKIAHLIYMDDIKLYTTTAKDMKVLIDTTHNFSRDINMTFGLEKCRILNIKKGKIQNGDCMLQTGESISAMESDEVYKYLGYQQSKQLEHSTLKKTLCEEYKNRLNTICKTQLTSKRLIKAINTYAIPILTYSFGIVKWTKTDLHSLEIKTRTVLTKNKYLHPKSAIERICIKRISGGRGLINLSNLWKKQLYNLRDFFQNKAKTSNIHQAIIVNDSKFTPLNLSESLSIGQNNNNTIHFLKEKINKWKSKILHGRHPHDLDQTHIDSQASNRWLTSGYLFPETEGFMIAIQDQVINTKNYKKYIIKDPKAADDKCRKCHRQSETIQHITGACSTLTQTDYTHRHNQIVNIIHKKLAMKYNLDSDTYTPYYKYTPNPVLENNKWKIYYDRAILTDKTIHFNRPDITLFNKEDKIAYIVDIAVPNTHNLLKTITEKSINIQN

SEQ ID NO: 25714 - protein, 1307 aa, Euproctis similis
MEMMLRSKRIGPLPGGDRRGTLGADAGRDSIRSVGGEELNRRAPSGSPEDTTANRVTDRPTDHDNISLNSSSSLSIVEPYSPSTASYIPSPVDSLENKSRELDTPTLTVAQEANAFLPASTKAGKPRVRMKWTKDVNTFIMRTYYLITKLETDLTCYRKTLHQLFSQKYPEINVTEQRVSDQKRMILRNKYLSEEEVQKIKEDVNQLLLLDTNVETTVPILTDDNDYSNILTIATQIEPNPHSHTIPDLTESSQNTLTSHASTQTLITQDLLLETEISTIDSISTSDEITRKLTNMLDTKLLEYAGTDPTLRPKLPKLHYSKRLTELLTIFNNNILDRFLTDQMMLIDIHTLLYCCATAISEELGYKIHRNNTIVVPQKRSEPAWQIRLDKDISKLRSNIGRLTQYIKGNRSQRIINKVENIFKNNKLHSKHETCNKTPEEYLDTLKQKLALKSQRLARYKKALQRKQENKLFAANEKIFYRQMITGNKQNENLNAENRETTQEELENFWSQIWEKDSMFNDKAPWILEEEDRNSEIEEMMFEEIKEQDVKNAMTRLHNWKSPGIDHIHNFWYKKIHRLHKPLAKCLSEIVLKKQPIPSFLATGITYMIPKNNNSNDPSQYRPITCLPTIYKILTAIITNKVSSHIELNNIISEEQKGCRRNHMGCKEQLIIDSTIHRHANIKKRNLFCTYIDYQKAFDSIPHTWLIKILQIYKINTHLIKFLTEIMTHWKTKLYLRTKDNIITTREIEIKKGIYQGDSLSPLWFCLALNPLSNLIKKSKLGYPLKQTDGNSTLISHLIYMDDLKLYSRTQKDMKTLINITAIFSNDINMKFGLEKCKTLNIRKGKIEPGNYTLPEGGVISALGPDNLYKYLGYQQSKQLDHTTLKNTLTDAYKNRLNRICKTQLTSKRLIKAINTFAIPILTYSFGIVKWTKTDLNNLEIKTRTILTKHNYLHPKAAIERMSLNRSVGGRGLINLTVLWQKQLDNLRYFFHNKAASSTLHRAIVDNDIKFTPLNLAETDTVISLANQTSEIVNHGVEQWKSKVLHGRHPHDLEQPHIDSLASNNFLTNGYLFPETEGFILAIQDQVINTKNYRKFIIKEPGVIDDKCRKCHRQSETIQHITGACITLTQTDYTHRHNQIVNIIHQKLAIKYKLIKDTHTPYYKYAPNPILENKDFKLYYDRAILTDRTIYSNRPDITVHDKLQKTVYIIDIAVPNTHNILKTITEKINKYTELKEEVGRIWKANRVLILPIVVSTTGVIPKHLHNSLRLLKLPATTYVNIQKAAILNTCRIVRKFMQSDESQPNPD

SEQ ID NO: 25715 - protein, 1307 aa, Euproctis similis
MEMMLRSKRIGPLPGGDRRGTLGADAGRDSIRSVGGEELNRRAPSGSPEDTTANRVTDRPTDHDNISLNSSSSLSIVEPYSPSTASYIPSPVDSLENKSRELDTPTLTVAQEANAFLPASTKAGKPRVRMKWTKDVNTFIMRTYYLITKLETDLTCYRKTLHQLFSQKYPEINVTEQRVSDQKRMILRNKYLSEEEVQKIKEDVNQLLLLDTNVETTVPILTDDNDYSNILTIATQIEPNPHSHTIPDLTESSQNTLTSHASTQTLITQDLLLETEISTIDSISTSDEITRKLINMLDTKLLEYAGTDPTLRPKLPKLHYSKRLTELLTIFNNNILDRFLTDQMMLIDIHTLLYCCATAISEELGYKIHRNNTIVVPQKRSEPAWQIRLDKDISKLRSNIGRLTQYIKGNRSQRIINKVENIFKNNKSHSKHETCNKTPEEYLDTLKQKLALKSQRLARYKKALQRKQENKLFAANEKIFYRQMITGNKQNENLNAENRETTQEELENFWSQIWEKDSMFNDKAPWILEEEDRNSEIEEMMFEEIKEQDVKNAMTRLHNWKSPGIDHIHNFWYKKIHRLHKPLAKCLSEIVLKKQPIPSFLATGITYMIPKNNNSNDPSQYRPITCLPTIYKILTAIITNKVSSHIELNNIISEEQKGCRRNHMGCKEQLIIDSTIHRHANIKKRNLFCTYIDYQKAFDSIPHTWLIKILQIYKINTHLIKFLTEIMTHWKTKLYLRTKDNIITTREIQIKKGIYQGDSLSPLWFCLALNPLSNLIKKSQLGYPLKQTDGNSTLISHLIYMDDLKLYSRTQKDMKTLINITAIFSNDINMKFGLEKCKTLNIRKGKIEPGNYTLPEGGVISALGPDNLYKYLGCQQSKQLDHTTLKNTLTDAYKNRLNRICKTQLTSKRLIKAINTFAIPILTYSFGIVKWTKTDLNNLEIKTRTILTKHNYLHPKAAIERMSLNRSVGGRGLINLTVLWQKQLDNLRYFFHNKAASSTLHRAIVDNDIKFTPLNLAETDTVISLANQTSEIVNHGVEQWKSKVLHGRHPHDLEQPHIDSLASNNFLTNGYLFPETEGFILAIQDQVINTKNYRKFIIKEPGVIDDKCRKCHRQSETIQHITGACITLTQTDYTHRHNQIVNIIHQKLAIKYKLIKDTHTPYYKYAPNPILENKDFKLYYDRAILTDRTIYSNRPDITVHDKLQKTVYIIDIAVPNTHNILKTITEKINKYTELKEEVGRIWKANRVLILPIVVSTTGVIPKHLHNSLRLLKLPATTYVNIQKAAILNTCRIVRKFMQSDESQPNPD

SEQ ID NO: 25716 - protein, 1170 aa, Euproctis similis
MKWSQDVNIFIMRTYFLITRLETDMTCYRKLLHQLFIQQYPDINVSEQRISDQNKYLTENILINIRQEVEQELNNISEQNTLPPSTPIDTYHGSPQDTSTTELTSTAHNVNLASTLHNTIPIGPQSEIMEQRLTSNELLTDLKDKLETKLLLYTGTDPLLRPKLPKLNNSKRLNDYIYIFNNNILGQFISENISLIDLHTIIYCRAMVITEELGYKIKYNIMCNEHNTNKPKTYSQPFWQVRLQKDISKLRSDIGRLTQYINGNRSKKVVTTAETIFRNNKIHTKHEAHNKTPKQYLDTLKQKLTLKSHRLARYNKAFLRKEQNRLFNTNEKIFYRNMRIGSEKIIQNKAQNTITNIATTTKENLEEFWSEIWEKETKHNVDSPWIQEEINRTTTLIDEMEFIEIKEDEVKNLSVKLHNWKSPGLDNIHNFWYKHFHKLHEHLAKCFTAIITKKQPIPAFLAKGITYMIPKSKQDNGPSQYRPITCLPIIYKILTSIIANRITKHVETNNIMSEEQKGCRRNHMGCKEQLIIDSTIHKHASQNKKNLHCTYIDYRKAFDSVPHSWLLEVLKIYKVNPLLISFLKDVMPFWKTNLHLYKSNSRIVTREIQIKTGIYQGDSLSPLWFCLALNPLSLMLNKHKGGYRLKHDSTETTITHLMYMDDIKIYTGSIKHMKQLVDTIDTFSKDINMQFGLDKCKILNIKKGKIQLGNHTLKEGEVISAMTADELYKYLGYQQSKQLDHLSLKKTLTEEYKNRLISICKTQLTGRNLIKAINTYAIPILTYSFGIIKWTKTDLKSLEIKTRTTLTKHNYLHPKSAIERMSIKRINGGRGLIDILALWEKQLNNLRHFFKQKSTNSDIHRAIITNDLKFTPLNLSESLSESQIVNETAHHSKQKIDQWKSKTLHGRHPHDLEQAHIDSQASNRWLTSGYLFPETEGFMIAIQDQVINTKNYRKHIIKDPNASNDKCRKCHRQPETIQHITGACTTLTQTDYTHRHNQIVNIIHQKLAFKYNLTTNTNTPYYKYIPDPVLENNKYRLYYDRAILTDKTIHFNRPDITILNKSDKIAYLVDIAVPNTHNLLKTITDKINKYTELKEEITRIWNVEKVYIVPIVISTTGVIPRHLHHSLNLLNLPHNTFINIQKAAILNTCRTVRKFMQSDETAPEPSLIQH

SEQ ID NO: 25717 - protein, 1042 aa, Euproctis similis
MEQRLTSNELITDLKDKLETKLLLYTGTDPLLRPKLPKLNYSKRLNDYIYIFNNNILGQFISENISLIDLHTIIYCSAMVITEELGYKIKYNIMCNEHNTNKPKTYSQPFWQIRLQKDISKLRSDIGRLTQYINGNRSKKVVTTAETIFSNNKIHTKHEAHNKTPKQYLDTLKQKLTLKSHRLARYNKAFLRKEQNRLFNTNEKIFYRNMRIGSEKIIQNKAQNTITNIAATTKENLEEFWSEIWEKETKHNVDSPWIQEEINRTTTLIDEMEFIEIEEDEVKNLSAKLHNWKSPGLDNIHNFWYKHFHKLHEHLAKSFTAIITKKQPIPAFLAKGITYMIPKSKQDNGPSQYRPITCLPTIYKILTSIIANRITKHVETNNIMSEEQKGCRRNHMGCKEQLIIDSTIHKHASQNKKNLHCTYIDYRKAFDSVPHSWLLEVLKIYKVNPLLISFLKDVMPFWKTNLHLYKSNSRIVTREIQIKTGIYQGDSLSPLWFCLALNPLSLMLNKHKGGYRLKHDSTETTITHLMYMDDIKIYTGSIKHMKQLVDTIDTFSKDINMQFGLDKCKTLNIKKGKIQSGNHTLKEGEVISAMTSDELYKYLGYQQSKQLDHLSLKKTLTEEYKNRLISICKTQLTGRNLIKAINTYAIPILTYSFGIIKWTKTDLKSLEIKTRTTLTKHNYLHPKSAIERMSIKRINGGRGLIDILALWKKQLNNLRHFFKQKSTTSDIHRAIITNDLKFTPLNLSESLSESQIVNETAHHSKQKIDQWKSKTLHGRHPHDLEQAHIDSQASNRWLTSGYLFPETEGFMIAIQDQVINTKNYRKHIIKDPNASNDKCRKCHRQPETIQHITGACTTLTQTDYTHRHNQIVNIIHQKLAFKYNLTTNTNTPYYKYIPDPVLENNKYRLYYDRAILTDKTIHFNRPDITILNKSDKIAYLVDIAVPNTHNLLKTITDKINKYTELKEEITRIWNVEKVYIVPIVISTTGVIPRHLHHSLKLLNLPHNTFINIQKAAILNTCRTVRKFMQSDETAPEPSLIQH

SEQ ID NO: 25718 - protein, 972 aa, Notocelia uddmanniana
MPPPHPDVSLEEFLRCPQCPSTKLFKGRRGLNIHISKSHNHSRSQPPLNSSPQLPATSTPSFPTTSLSDKLSEFKDSIPILKRIPRGARITVAKSLSKVLDECVNSNTLTSWEKLLTFAYQILHVDHSTSSKSLTYKIKHNCSHSISPSPSNKLSSTHHNLFKKVETKVNDGDLRGAARILFSSDTSAPDSPDTLAALESKHPPAPAISNLPDPPDTALPGLVASEDAVLAAIMSFNNGSAGGLDGITPQHLKDLLAATPGSCYGDLLASITRLINLMLSGKVDEAVIKTLYGANLCALSKKDGSVRPIAIGSTFRRLASKICCKHILPVLESKFQPTQLGFGSKGGCEAAVHACRTFLKNTNDIVLLKLDVKNAFNSVNRDVLLSEVQKNIPDIYPYIWQCYSSPSHLKYKNNTILSSIGCQQGDPLGPAIFSLAIQPSITELTSKFNVWYLDDGTLGGEANNVKNDFVAIRSKFESIGLQLNSSKCELYVDQDDDKKTETIRSFENLCPGIKIISKESLHLLGAPIFDEAIPGFVNKNIDHFNSFSDRLLHINSHMAIFILRYCHFVPKFTYVMRCSPFWKLLNLCEKLDNIIWTHLEKIINIKIDNRMFLLASLPVKFGGLGIRQISSVALPAFLSSVHSTLPLTGKILNPSHRDCEIACLSEARDAWKMACPGKDLPVRPELQKLWDLPICRRVHDHLVETSTLASDRARMLAISERESSHWLHAYPSANYGNLLDSNSFRLAVGLRLGANIVEQHRCHCGTMVDKTGHHGLACPKSAGRMSRHSCLNDIIRRALVSVNVPATLEPSGLARDDGKRPDGMTLVPWQQGRPLVWDATCVDTLAPSHLGTTSLRAGGAAAVAEAAKRRKYATLGDSYIFAAFAVETLGPWGPDAIKLFKKLSFMLIRSSGDRRAGSFLAQRIGIAIQRGNAASLMGTLPSGIDLGEICIRCPLNYYPLQIRYRFYTKSDR

SEQ ID NO: 25719 - protein, 960 aa, Notocelia uddmanniana
MPPPHPDVSLEEFLRCPQCPSTKLFKGRRGLNIHISKSHNHSRSQPPLNSSPQLPATSTPSFPTTSLSDKLSEFKDSIPILKRIPRGARITVAKSLSKVLDECVNSNTLTSWEKLLTFAYQILHVDHSTSSKSLTYKIKHNCSHSISPSPSNKLSSTHHNLFKKVETKVNDGDLRGAARILFSSDTSAPDSPDILAALESKHPPAPAISNLPDPADTALPGLVASEDAVLAAIMSFNNGSAGGLDGITPQHLKDLLAATPGSCYGDLLASITRLINLMLSGKVDEAVIKTLYGAHLCALSKKDGSVRPIAIGSTFRRLASKICCKHILPVLESKFQPTQLGFGSKGGCEAAVHACRTFLKNTNDIVLLKLDVKNAFNSVNQNVLLSEVQKNIPDIYPYIWQCYSSPSHLKYKNNTILSSTGCQQGDPLGPAIFSLAIQPSITELTSKFNVWYLGDGTLGGEANNVKNDFVAIRSKFESIGLQLNSSKCELYVDQDDDKKTETIRSFENLCPGIKIISKESLHLLGAPIFDEAIPGFVNKNIDHFNSFSDRLLHINSHMAIFILRYCHFVPKFTYVMRCSPFWKLQNFCEKLDNIIWTHLEKIINIKINNRMFLLASLPVKFGGLGIRQISSVTLPAFLSSVHSTLPLTGKILNPSHRDCEIACLSEARDAWKMACPGKDLPVRPELQKLWDLPICRRVHDHLVETSTLASERARMLAISERESSHWLHAYPSANYGNLLDSNSFRLAVGLRLGANIVEQHRCHCGTMVDKTGHHGLACPKSAGRMSRHSCLNDIIRRALVSVNVPATLEPSGLARDDGKRPDGMTLVPWQQGRPLVWDATCVDTLAPSHLGTTSLRAGGAAAVAEAAKRRKYATLGDSYIFAAFAVETLGPWGPDAIKLLKKLSSMLIRSSGDRRAGSFLAQRIGIAIQRGNAASLMGTLPSGIDLGEICTYRLGSDNLS

SEQ ID NO: 25720 - protein, 954 aa, Pammene fasciana
MQSVQANASLDDLIQCPYCPTTKICKGRRGLKIHVSKIHNNTGSQPVQLLSTSTPTTTPNIQSISLSDKLSVLKESTPVIKRIPRGARPAVAQALIKTLDECVNNNNPVSWEKLLTFAYSILHVDRTSSQTLTKKIKNNCLQPYSPAYHANPTSPTDHNLYKKIESKVNDGDLRGAARILFSSDIVAPDSHDTLAALESKHPLSPSISVLPEPPDTTLRGFLASEDSVLAAIMAFNNGSAGGLDGITPQHIKDLLASNNNGQLLAGLTRLVNLMLSGKVHDSVCKTLYGANLCALTKKDGSVRPIAIGSTFRRLASKVCCRYIRPVLETKFKPFQLGFGSKGGCEAAVHACRTFLNKSPNSVLLKLDVKNAFNSVHRQTLLTEVQKNTPNIYPYIWQCYSSATHLKYRSHTILSSTGCQQGDPLGPAIFSLAIHPNISDLTSPLNIWYLDDGTLGGEPNSVLNDFITISRKFDSIGLQLNPTKCELYIDPLDANKDDIVRNFQNICPGIKILDKVSLHLLGAPIFDDAIPQFINKNIDHFHTFSDRLLHINSHMAIFILRHCHFVPKFTYAMRCSPFWKLPNLCEKIDNILWTQIEKIINIKIDNRMFSVASLPVRFGGLGLRQISSVALPAFLSSVHSTLPLTGNILKPSLRDCEVACLSQARDAWKLACPGKDLPHNPNSQKLWDEPMCRQLHDHLLETSPSVLDRARLLATSAKESGYWLHAYPSSNFGNLLDPNSFRLAVGLRLGANLVEPHICSCGATVDRLGHHGLACPRSAGRLSRHACLNDIIRRALVSVNVPATLEPNGLARDDGKRPDGLTLVPWLRGRPLVWDATCVDTLAPSHLNTTSLKAGSAAATAETAKRRKYAALGERYVFAAFAVETLGPWGPEALRLFKKLSFMLIRSTGDQRAGSFLAQRIGIAIQRGNAASLMGTLPNSGDIGDICTYSLNHVG

SEQ ID NO: 25721 - protein, 959 aa, Notocelia uddmanniana
MPPPHPDVALEEFLRCPQCPSTKLFKGRRGLNIHISKSHNHSRSQPPLNSSPQLPATSTPSFPTTSLSDKLSEFKDSIPILKRIPRGARITVACLSKVLDECVNSNTLTSWEKLLTFAYQILHVDHSTSSKSLTYKIKHNCSHSISPSPSNKLSSTHHNLFKKVETKVNDGDLRGAARILFSSDTSAPDSPDTLAALESKHPPAPAISNLPDPADTALPGLVASEDAVLAAIMSFNNGSAGGLDGITPQHLKDLLAATPGSCYGDLLASITRLINLMLSGKVDEAVIKTLYGANLCALSKKDGSVRPIAIGSTFRRLASKICCKHILPVLESKFQPTQLGFGSKGGCEAAVHACRTFLKNTNDIVLLKLDVKNAFNSVNRDVLLSEVQKNIPDIYPYIWQCYSSPSHLKYKNNTILSSIGCQQGDPLGPAIFSLAIQPSITELTSKFNVWYLDDGTLGGEANNVKNDFVAIRSKFESIGLQLNSSKCELYVDQDDDKKTETIRSFENLCPGIKIISKESLHLLGAPIFDEAIPGFVNKNIDHFNSFSDRLLHINSHIAIFILRYCHFVPKFTYVMRCSPFWKLQNLCEKLDNIIWTHLEKIINIKINNRMFLLASLPVKFGGLGIRQISSVALPAFLSSVHSTLPLTGKILNPSHRDCEIACLSEARDAWKMACPGKDLPVRPELQKLWDLPICRRVHDHLVETSTLASERARMLAISERESSHWLHAYPSANYGNLLDSNSFRLAVGLRLGANIVEQHRCHCGTMVDKTGHHGLACPKSAGRMSRHSCLNDIIRRALVSVNVPATLEPSGLARDDGKRPDGMTLVPWQQGRPLVWDATCVDTLAPSHLGTTSLRAGGAAAVAEAAKRRKYATLGDSYIFAAFAVETLGPWGPDAIKLFKKLSFMLIRSSGDRRAGSFLAQRIGIAIQRGNAASLMGTLPSGIDLGEICTYRLGSDNLS

SEQ ID NO: 25722 - protein, 960 aa, Notocelia uddmanniana
MPPPHPDVSLEEFLRCPQCPSTKLFKGRRGLNIHISKSHNHSRSQPPLNSSPQLPATSTPSFPTTSLSDKLSEFKDSIPILKRIPRGARITVAKSLSKVLDECVNSNTLTSWEKLLTFAYQILHVDHSTSSKSLTYKIKHNCSHSISPSPSNKLSSTHHNLFKKVETKVNDGDLRGAARILFSSDTSAPDSPDTLAALESKHPPAPAISNLPDPADTALPGLVASEDAVLAAIMSFNNGSAGGLDGITPQHLKDLLAATPGSCYGDLLASITRLINLMLSGKVDEAVIKTLYGANLCALSKKDGSVRPIAIGSTFRRLASKICCKHILPVLESKFQPTQLGFGSKGGCEAAVHACRTFLKNTNDIVLLKLDVKNAFNSVNRDVLLSEVQKNIPDIYPYIWQCYSSPSHLKYKNNTILSSIGCQQGDPLGPAIFSLAIQPSITELTSKFNVWYLDDGTLGGEANNVKNDFVAIRSKFERIGLQLNSSKCELYVDQDDDKKTETIRSFENLCPGIKIISKESLHLLGAPIFDEAIPGFVNKNIDHFNSFSDRLLHINSHMAIFILRYCHFVPKFTYVMRCSPFWKLQNLCEKLDNIIWTHLEKIINIKINNRMFLLASLPVKFGGLGIRQISSVALPAFLSSVHSTLPLTGKILNPSHRDCEIACLSEARDAWKMACPGKDLPVRPELQKLWDLPICRRVHDHLVETSTLASERARMLAISERESSHWLHAYPSANYGNLLDSNSFRLAVGLRLGANIVEQHRCHCGTMVDKTGHHGLACPKSAGRMSRHSCLNDIIRRALVSVNVPTTLEPSGLARDDGKRPDGMTLVPWQQGRPLVWDATCVDTLAPSHLGTTSLRAGGAAAVAEAAKRRKYATLGDSYIFAAFAVETLGPWGPDAIKLFKKLSFMLIRSSGDRRAGSFLAQRIGIAIQRGYAASLMGTLPSGIDLGEICTYRLGSDNLS

SEQ ID NO: 25723 - protein, 954 aa, Pammene fasciana
MQSVQANASLDDLIQCPYCPTTKICKGRRGLKIHVSKIHNNTGSQPVQLLSTSTPTTTPNIQSISLSDKLSVLKESTPVIKRIPRGARPAVAQALIKTLDECVNNNNPVSWEKLLTFAYSILHVDRTSSQTLTKKIKNNCLQPYSPAYHANPTSPTDHNLYKKIESKVNDGDLRGAARILFSSDIVAPDSHDTLAALESKHPLSPSISVLPEPPDTTLRGFLASDDSVLAAIMAFNNGSAGGLDGITPQHIKDLLASNNNGQLLAGLTRLVNLMLSGKVHDSVCKTLYGANLCALTKKDGSVRPIAIGSTFRRLASKVCCRYIRPVLETKFKPFQLGFGSKGGCEAAVHACRTFLNKSPNSVLLKLDVKNAFNSVHRQTLLTEVQKNTPNIYPYIWQCYSSATHLKYRSHTILSSTGCQQGDPLGPAIFSLAIHPNISDLTSPLNIWYLDDGTLGGEPNSVLNDFITISRKFDSIGLQLNPTKCELYIDPLDANKDDIVRNFQNICPGIKILDKVSLHLLGAPIFDDAIPQFINKNIDHFHTFSDRLLHINSHMAIFILRHCHFVPKFTYAMRCSPFWKLPNLCEKIDNILWTQIEKIINIKIDNRMFSVASLPVRFGGLGLRQISSVALPAFLSSVHSTLPLTGNILKPSLRDCEVACLSQARDAWKLACPGKDLPHNPNSQKLWDEPMCRQLHDHLLETSPSVVDRARLLATSAKESGYWLHAYPSSNFGNLLDPNSFRLAVGLRLGANLVEPHICSCGATVDRLGHHGLACPRSAGRLSRHACLNDIIRRALVSVNVPATLEPNGLARDDGKRPDGLTLVPWLRGRPLVWDATCVDTLAPSHLNTTSLKAGSAAATAETAKRRKYAALGERYVFAAFAVETLGPWGPEALRLFKKLSFMLIRSTGDQRAGSFLAQRIGIAIQRGNAASLMGTLPNSGDIGDICTYSLNHVG

SEQ ID NO: 25724 - protein, 960 aa, Notocelia uddmanniana
MPPPHPDVSLEEFLRCPQCPSTKLFKGRRGLNIHISKSHNHSRSQPPLNSSPQLPATSTPSFPTTSLSDKLSEFKDSIPILKRIPRGARITVAKSLSKVLDECVNSNTLTSWEKLLTFAYQILHVDHSTSSKSLTYKIKHNCSHSISPSPSNKLSSTHHNIFKKVETKVNDGDLRGAARILFSSDTSAPDSPDTLAALESKHPPAPAISNLPDPADTALPGLVASEDAVLAAIMSFNNGSAGGLDGITPQHLKDLLAATPGSCYGDLLASITRLINLMLSGKVDEAVIKTLYGANLCALSKKDGSVRPIAIGSTFRRLASKVCCKHILPVLESKFQPTQLGFGSKGGCEAAVHACRTFLKNTNDIVLLKLDVKNAFNSVNRDVLLSEVQKNIPDIYPYIWQCYSSPSHLKYKNNTILSSIGCQQGDPLGPAIFSLAIQPSITELTSKFNVWYLDDGTLGGEANNVKNDFVAIRSKFESIGLQLNSSKCELYVDQDDDKKTETIRSFENLCPGIKIISKESLHLLGAPIFDEAIPGFVNKNIDHFNSFSDRLLHINSHMAIFILRYCHFVPKFTYVMRCSPFWKLQNFCEKLDNIIWIHLEKIINIKINNRMFLLASLPVKFGGLGIRQISSVALPAFLSSVHSTLPLTGKILNPSHRDCEIACLSEARDAWKMACPGKDLPVRPELQKLWDLPICRRVHDHLVETSTLASERARMLAISERESSHWLHAYPSANYGNLLVSNSFRLAVGLRLGANIVEQHRCHCGTMVDKTGHHGLACPKSAGRMSRHSCLNDIIRRALVSVNVPATLEPSGLARDDGKRPDGMTLVPWQQGRPLVWDATCVDTLAPSHLGTTSLRASGAAAVAEAAKRRKYATLGDSYIFAAFAVETLGPWGPDAIKLFKKLSFMLIRSSGDRRAGSFLAQRIGIAIQRGNAASLMGTLPSGIDLGEICTYRLGSDNLS

SEQ ID NO: 25725 - protein, 956 aa, Pammene fasciana
MPPTRANESLDEFLQCPQCSTSKLFKGRKGLNIHISKAHKCSNSQPLQHSNSQLPPTPVSQPISLSDKLSTLKASTPVLKRIPRGARASVAKSFTKVLDECSHTNTLISWEKLLTFAYCILHVDQNSKKSLTSKIKQNCIQPYNPPLSDKQPHISANLINKVETKVNDGDLRGAARILFSSDTSAQDSHDTLAALQSKHPPAPTMVDLPNPPDSTHPSLIASEDAVQLAIMSFNNGSAGGLDGITPQHLKDLLTPSSGAHNHELLTSITRLVNLMLSGKVNEEVTKTLYGANLCALSKKDGTVRPIAIGSTFRRLVSKICCKHILPVLESKFQPIQLGFGSKGGCEAAVHACRSFLKNSHNSVLLKLDVKNAFNSVNRNIILSEVNKILPNIYPYIWQCYSSPSHLKYNSHTILSSVGCQQGDPLGPAIFSLSIHPCITDLTSKFNSWYLDDGTLGGEVSSVLNDFISIKSKFESIGLQLNLNKCELYVDPDDPNKCEIIRSFENLCPGIKIHTKDSLHLLGAPVFEDAIPGFIDKNIDHFNSFSDRLLQINPHMAIFILRYCHFVPKFTYAMRCSPFWKLSNLCEKLDHIIWTQIEKIVNLKIDSRMFAIASLPVRFGGLGLRKISSVALPAFLSSVHSTLSLTGKILNPSLGGCEIAYLSEARVTWRLSCPGKDLPFNLNSQKLWDRPICQRVQNELLNSATDLPDKARLLAISEKESGHWLNAYPSANYGNLLDPNSFRIAVGLRLGANLIVPHRCHCGTTVDRLGHHGLACSKSAGRLSRHASLNDIIRRALVSVSVPATLEPHGLMRDDGKRPDGITLVPWQQGRPLVWDATCVDTLAPSHLGTTSLRAGGAASTAEAAKRRKYASLGDNYIFAPFAVETLGPWGPEAVKLFKKLSFMLIRSSGDRRAGSFLAQRISIAIQRGNAASLMGTLPSGSDMGDICTYSLGPNRF

SEQ ID NO: 25726 - protein, 953 aa, Pammene fasciana
MHSVQANASLDDLIQCPYCPTTKICKGRRGLKIHVSKIHNNTGSQPVQLLSTSTPTTTPNIQSISLSDKLSVLKESTPVIKRIPRGAKPAVAQALIKTLDECVNNNNPSWEKLLTFAYRILHVDRTSSQTLTKKIKNNCLQPYSPAYHANPTSPTDHNLYKKIESKVNDGDLRGAARILFSSDIVAPDSHDTLAALESKHPLSPSISVLPEPPDTTLRGFLASEDSVLAAIMAFNNGSAGGLDGITPQHIKDLLASNNNGQLLAGLTRLVNLMLSGKVHDSVCKTLYGANLCALTKKDGSVRPIAIGSTFRRLASKVCCRYIRPVLETKFKPFQLGFGSKGGCEAAVHACRTFLTKSPNSVLLKLDVKNAFNSVHRQTLLTEVQKNTPNIYPYIWQCYSSSTHLKYRSHTILSSTGCQQGDPLGPAIFSLAIHPNISDLTSPLNIWYLDDGTLGGESNSVLNDFITISCKFDSIGLQLNPTKCELYIDPLDANKDDIVRNFQNICPGIKILDKVSLHLLGAPIFDDAIPQFINKNIDHFHTFSDRLLHINSHMAIFILRHCHFVPKFTYAMRCSPFWKLPNLCEKIDNILWTQIEKIINIKIDNRMFSVASLPVRFGGLGLRQISSVALPAFLSSVHSTLPLTGNILKPSLRDCEVACLSQARDAWKLACPGKDLPHNPNSQKLWDEPMCRQLHDHLLETSPSMLDRARLLATSAKESGYWLHAYPSSNFGNLLDPNSFRLAVGLRLGANLVEPHICSCGATVDRLGHHGLACPRSAGRLSRHACLNDIIRRALVSVNVPATLEPNGLARDDGKRPDGLTLVPWLRGRPLVWDATCVDTLAPSHLNTTSLKAGSAAATAETAKRRKYAALGERYVFAAFAVETLGPWGPDALHLFKKLSYMLIRSTGDQRAGSFLAQRIGIAIQRGNAASLMGTLPNSGDIGDICTYSLNHVG

SEQ ID NO: 25727 - protein, 960 aa, Notocelia uddmanniana
MPPPHPDVSLEEFLRCPQCPSTKLFKGRRGLNIHISKSHNHSRSQPPLNSSPQLPATSTPSFPTTSLSDKLSEFKDSIPILKRIPRGARITVAKSLSKVLDECVNSNTLTSWEKLLTFAYQILHVDHSTSSKSLTYKIKHNCSHSISPSPSNKLSSTHHNLFKKVETKVNDGDLRGAARILFSSDTSAPYSPDTLAALESKHPPAPAISNLPDPPDTALPGLVASEDAVLAAIMSFNNGSAGGLDGITPQHLKDLLAATPGSCYGDLLASITRLINLMLSGKVDEAVIKTLYGANLCALSKKDGSVRPIAIGSTFRRLASKICCKHILPVLESKFQPTQLGFGSKGGCEAAVHACRTFLKNTNDIVLLKLDVKNAFNSVNRDVLLSEVQKNIPDIYPYIWQCYSSPSHLKYKNNTILSSIGCQQGDPLGPAIFSLAIQPSITELTSKFNVWYLDDGTLGGEANNVKNDFVAIRSKFESIGLQLNSSKCELYVDQDDDKKTETIRSFEYLCPGIKIISKESLHLLGAPIFDEAIPGFVNKNIDHFNSFSDRLLHINSHMAIFILRYCHFVPKFTYVMRCSPFWKLLNLCEKLDNIIWTHLEKIINIKIDNRMFLLASLPVKFGGLGIRQISSVALPAFLSSVHSTLPLTGKILNPSHRDCEIACLSEARDAWKMACPGKDLPVRPELQKLWDLPICRRVHDHLVETSTLASDRARMLAISERESSHWLHAYPSANYGNLLDSNSFRLAVGLRLGANIVEQHRCHCGTMVDKTGHHGLACPKSAGRMSRHSCLNDIFRRALVSVNVPATLEPSGLARDDGKRPDGMTLVPWQQGRPLVWDATCVDTLAPSHLGTTSLRAGGAAAVAEAAKRRKYATLGDSYIFAAFAVETLGPWGPDAIKLFKKLSFMLIRSSGDRRAGSFLAQRIGIAIQRGNAASLMGTLPSGIDLGEICTYRLGSDNLS

SEQ ID NO: 25728 - protein, 953 aa, Notocelia uddmanniana
MPSLQANVSLDDYLQCPRCPNIKLCKGRRGLNIHISKSHKNSCSQPAQVSTSNAPSTPNFQTASLSDKLSALKESTPVVKRNPRGARLAVAQTLKKALDECVNTNNLVSWEKLLTLAYSILHVDRTSSRTLTRKIKNNCSQLPLPTYSSNTLQPSNFNLYKKIESKVNDGDLRGAARILFSSDTAAPDSEDTLAALESKHPPAPTSQDLPDPPDAAMPGVVASEDADMAAIMAFNNGSAGGLDGITPQHLKDLLVGNNNGELLTSLTRLVNLMLSGKVHENICQTLYGASLCALAKKDGSVRPIAIGSTFRRLASKVCCRYIRPVLESKFKPIQLGFGSKGGCEAAVHACRTFLTNSQNSILLKLDVKNAFNSVSRQALLTEVQKNTPNIFPYIWQCYSSPTHLKYKNHTILSSVGCQQGDPLGPAIFSLAIHASISDLTSPFNTWYLDDGTLGGEPNSVINDFISISSKFDSIGLQLNSSKCELYIDPNDANKNEIISTFENLCPGLKIQNKDSLYLLGAPIFDAAIPGFINTNIDHFNTFSDRLLQINSHMAIFILRHCHFVPKFTYAMRCSPFWKLPNFCEILDQIICTQIEKIINIKIDNRMFLIASLPVRFGGLGLRQISSVALPAFLSSVHSTLPLTGKILTPSLGDCEIACLSQARDAWRVACPGKDLPSNPNLQRLWDGPICRRVHAHLLESSPSTLERARLLAISERQSGHWLHAYPSANFGNLLDPHSFRLSVGLRLGANLVEPHLCPCGVNVDRLGHHGLACLKSAGRLSRHASLNDIIRRALVSVCVPATLEPNGLARDDGKRPDGMTLVPWQRGRPLIWDATCVDTLAPSHLSTTSLKAGSAAAAAEAAKRRKYASLGDSYVFAAFAVETLGPWGPEAVQLFNKISHMLIRSNGDRRAGSFLAQRIGIAIQRGNAASLMDTLPNGSDLGDICSFSLGAIG

SEQ ID NO: 25729 - protein, 960 aa, Notocelia uddmanniana
MPPPHPDVSLEEFLRCPQCPSTKLFKGRRGLNIHISKSHNHSRSQPPLNSSPQLPATSTPSFPTTSLSDKLSEFKDSIPILKRIPRGARITVAKSLSKVLDECVNSNTLTSWEKLLTFAYQILHVDHSTSSKSLTYKIKHNCSHSISPSPSNKLWSTHHNLFKKVETKVNDGDLRGAARILFSSDTSAPDSPDTLAALESKHPPAPAISNLPDPADTALPGLVASEDAVLAAIMSFNNGSAGGLDGITPQHLKDLLAATPGSCYGDLLASITRLINLMLSGKVDEAVIKTLYGANLCALSKKDGSVRPIAIGSTFRRLASKICCKHILPVLESKFQPTQLGFGSKGGCEAAVHACRTFLKNTNDIVLLKLDVKNAFNSVNRDVLLSEVQKNIPDIYPYIWQCYSSPSHLKYKNNTILSSIGCQQGDPLGPAIFSLAIQPSITELTSKFNVWYLDDGTLGGEANNVKNDFVAIRSKFESIGLQLNSSKCELYVDQDDDKKTETIRSFENLCPGIKIISKESLHLLGAPIFDEAIPGFVNKNIDHFNSFSDRLLHINSHMAIFILRYCHFVPKFTYVMRCSPFWKLQNFCEKLDNIIWTHLEKIINIKINNRMFLLASLPVKFGGLGIRQISSVALPAFLSSVHSTLPLTGKILNPSHRDCEIACLSEARDAWKMACPGKDLPVRPELQKLWDLPICRRVHDHLVETSTLASERARMLAISERESSHWLHAYPSANYGNLLDSNSFRLAVGLRLGANIVEQHRCHCGTLVDKTGHHGLACPKSAGRMSRHSCLNDIIRRALVSVNVPATLEPSGLARDDGKRPDGMTLVPWQQGRPLVWDATCVDTLAPSHLGTTSLRAGGAAAVAEAAKRRKYATLGDSYIFAAFAVETLGPWGPDAIKLFKKLSFMLIRSSGDRRAGSFLAQRIGIAIQRGNAASLMGTLPSGIDLGEICTYRLGSDNLS

SEQ ID NO: 25730 - protein, 953 aa, Pammene fasciana
MQSVQANASLDDLIQCPYCPTTKICKGRRGLKIHVSKIHNNTGSQPVQLLSTSTPTTTPNIQSISLSDKLSVLKESTPVIKRIPRGARPAVAQALIKTLDECVNNNNPVSWEKLLTFAYSILHVDRTSSQTLTKKIKNNCLQPYSPAYHANPTSPTDHNLYKKIESKVNDGDLRGAARILFSSDIVAPDSHDTLAALESKHPLSPSISVLPEPPDTTLRGFLASEDSVLAAIMAFNNGSAGGLDGITPQHIKDLLASNNNGQLLAGLTRLVNLMLSGKVHDSVCKTLYGANLCALTKKDGSVRPIAIGSTFRRLASKVCCRYIRPVLETKFKPFQLGFGSKGGCEAAVHACRTFLNKSPNSVLLKLDVKNAFNSVHRQTLLTEVQKNTPNIYPYIWQCYSSATHLKYRSHTILSSTGCQQGDPLGPAIFSLAIHPNISDLTSPLNIWYLDDGTLGGEPNSVLNDFITISRKFDSIGLQLNPTKCELYIDPLDANKDDIVRNFQNICPGIKILDKVSLHLLGAPIFDDAIPQFINKNIDHFHTFSDRLLHINSHMAIFILRHCHFVPKFTYAMRCSPFWKLPNLCEKIDNILWTQIEKIINIKIDNRMFSVASLPVRFGGLGLRQISSVALPAFLSSVHSTLPLTGNILKPSLRDCEVACLSQARDAWKLACPGKDLPHNPNSQKLWDEPMCRQLHDHLLETSPSVLDRARLLATSAKESGYWLHAYPSSNFGNLLDPNSFRLAVGLRLGANLVEPHICSCGATVDRLGHHGLACPRSAGRLSRHACLNDIIRRALVSVNVPATLEPNGLARDDGKRPDGLTLVPWLRGRPLVWDATCVDTLAPSHLNTTSLKAGSAAATAETAKRRKYAALGERYVFAAFAVETLGPWGPEALRLFKKLSFMLIRSTGERAGSFLAQRIGIAIQRGNAASLMGTLPNSGDIGDICTYSLNHVG

SEQ ID NO: 25731 - protein, 960 aa, Notocelia uddmanniana
MPPPHPDVSLEEFLRCPQCPSTKLFKGRRGLNIHISKSHNHSRSQPPLNSSPQLPATSTPSFPTTSLSDKLSEFKDSIPILKRIPRGARITVAKSLSKVLDECVNSNTLTSWEKLLTFAYQILHVDHSTSSKSLTYKIKHNCSHSISPSPSNKLSSTHHNLFKKVETKVNDGDLRGAARILFSSDTSAPDSPDTLAALESKHPPAPAISNLPDPADTALPGLVASEDAVLAAIMSFNNGSAGGLDGITPQHLKDLLAATPGSCYGDLLASITRLINLMLSGKVDEAVIKTLYGANLCALSKKDGSVRPIAIGSTFRRLASKICCKHILPVLESKFQPTQLGFGSKGGCEAAVHACRTFLKNTNDIVLLKSDVKNAFNSVNRDVLLSEVQKNIPDIYPYIWQCYSSPSHLKYKNNTILSSIGCQQGDPLGPAIFSLAIQPSITELTSKFNVWYLDDGTLGGEANNVKNDFVAIRSKFESIGLQLNSSKCELYVDQDDDKKTETIRSFENLCPGIKIISKESLHLLGAPIFDEAIPGFVNKNIDHFNSFSDRLLHINSHMAIFILRYCHFVPKFTYVMRCSPFWKLQNLCEKLDNIIWTHLEKIINIKINNRMFLLASLPVKFGGLGIRQISSVTLPAFLSSVHSTLPLTGKILNPSHRDCEIACLSEARDAWKMACPGKDLPVRPELQKLWDLPICRRVHDHLVETSTLASERARMLAISERESSHWLHAYPSANYGNLLDSNSFRLAVGLRLGANIVEQHRCHCGTMVDKTGHHGLACPKSAGRMSRHSCLNDIIRRALVSVNVPATLEPSGLARDDGKRPDGMTLVPWQQGRPLVWDATCVDTLAPSHLGTTSLRAGGAAAVAEAAKRRKYTTLGDSYIFAAFAVETLGPWGPDAIKLFKKLSFMLIRSSGDRRAGSFLAQRIGIAIQRGNAASLMGTLPSGIDLGEICTYRLGSDNLS

SEQ ID NO: 25732 - protein, 923 aa, Notocelia uddmanniana
MPSLQANVSLDDYLQCPHCPNIKLCKGRRGLNIHISKSHKNSCSQPAQVSTSNAPTTPNFQTASLSDKLSALKESTPVVKRIPRGARLAVAQTLKKALDECVNTNNLVSWVKLLTLAYSILHVDRTSSRTLTRKIKNNCSQLPLPTYSSNTLQPSNFNLYKKIESKVNDGDLRGAVRILFSSDKAAPDSEDTLAALESKHPPAPTSQDLPDPPDAAMPGVVASEDAVMAAIMAFNNGSAGGLDGITPQHLKDLLVGNNNGELLTSLTRLVNLMLSGKVHENICQTLYGASLCALAKKDGNVRPIAIGSTFRRLASKVCCRYIRPVLESKFKPIQLGFGSKGGCEAAVHACRTFLTNSQNSILLKLDVKNAFNSVSRQALLTEVQKNTPNIYPYIWQCYSSPTHLKYKNHTILSSVGCQQGDPLGPAIFSLAIHASISDLTSPFNTWYLDDGTLGGEPNSVINDFISISSKFDSIGLQLNSSKCELYIDPNDANKNEIISTFENLCPGLKIQNKDSLHLLGAPIFDAAIPGFINTNIDHFNTFSDRLLQINSHMAIFLLRHCHFVPKFTYAMRCSPFWKLPNFCEILDQIICTQIEKIINITIDNRMFLIASLPVRFGGLGLRQISSVALPAFLSSVHSTLPLTGKILTPSLGDCEIACLSQARDAWRVACPGKDLPSNPNLQRLWDEPICRRVHAHLLESSPSTLERARLLAISERQSGHWLHAYPSANFGNLLDPHSFRLSVGLRLGANLVEPHLCPCGANVDRLGHHGLVCFKSAGRLSRHASLNDIIRRALVSVCVPATLEPNGLARDDGKRPDGMTLVPWQRGRPLIWDATCVDTLAPSHLSTTSLKAGSAAAAAEAAKRRKYASLGDSYVFAAFAVETLGPWGPEAVQLFNKISHMLIRSTGDRRAGSFLAQRIGIAI

SEQ ID NO: 25733 - protein, 960 aa, Notocelia uddmanniana
MPPPHPDVSLEEFLRCPQCPSTKLFKGRRGLNIHISKSHNHSRSQPPLNSSPQLPATSTPSFPTTSLSDKLSEFKDSIPILKRIPRGARITVAKSLSKVLDECVNSNTLTSWEKLLTFAYQILHVDHSTSSKSLTYKIKHNCSHSISPSPSNKLSSTHHNLFKKVETKVNDGDLRGAACILFSSDTSAPDSPDTLAALESKHPPAPAISNLPDPADTALPGLVASEDAVLAAIMSFNNGSAGGLDGITPQHLKDLLAATPGSCYGDLLASITRLINLMLSGKVDEAVIKTLYGANLCALSKKDGSVRPIAIGSTFRRLASKICCKHILPVLESKFQPTQLGFGSKGGCEAAVHACRTFLKNTNDIVLLKLDVKNAFNSVNRDVLLSEVQKNIPDIYPYIWQCYSSPSHLKYKNNTILSSIGCQQGDPLGPAIFSLAIQPSITELTSKFNVWYLDDGTLGGEANIVKNDFVAIRSKFESIGLQLNSSKCELYVDQDDDKKTETIRSFENLCPGIKIISKESLHLLGAPIFDEAIPGFVNKNIDHFNSFSDRLLHINSHMAIFILRYCHFVPKFTYVMRCSPFWKLQNLCEKLDNIIWTQLEKIINIKINNRMFLLASLPVKFGGLGIRQISSVALPAFLSSVHSTLPLTGKILNPSHRDCEIACLSEARDAWKMACPGKDLPVRPELQKLWDLPICRRVHDHLVETSTLASERARMLAISERESSHWLHAYPSANYGNLLDSNSFRLAVGLRLGANIVEQHRCHCGTMVDKTGHHGLACPKSAGRMSRHSCLNDIIRRALVSVNVPATLEPSGLARDDGKRPDGMTLVPWQQGRPLVWDATCVDTLAPSHLGTTSLRAGGAAAVAEAAKRRKYATLGDSYIFAAFAVETLGLWGPDAIKVFKKLSFMLIGSSGDRRAGSFLAQRIGIAIQRGDAASLMGTLPSGIDLGEICTYRLGSDNLS

SEQ ID NO: 25734 - protein, 954 aa, Pammene fasciana
MQSVQANASLDDLIQCPYCPTTKICKGRRGLKIHVSKIHNNTGSQPVQLLSTSTPTTTPNIQSISLSDKLSVLKESTPVIKRIPRGARPAVAQALIKTLDECVNNNNPVSWEKLLTFAYSILHVDRTSSQTLTKKIKNNCLQPYSPAYHANPTSPTDHNLYKKIESKVNDGDLRGAARILFSSDIVAPDSHDTLAALESKHPLSPSISVLPEPPDTTLRGFLASEDSVLAAIMAFNNGSAGGLDGITPQHIKDLLASNNNGQLLAGLTRLVNLMLSGKVHDSVCKTLYGANLCALTKKDGSVRPIAIGSTFRRLASKVCCRYIRPVLETKFKPFQLGFGSKGGCEAAVHACRTFLNKSPNSVLLKLDVKNAFNSVHRQTLLTEVQKNTPNIYPYIWQCYSSATHLKYRSHTILSSTGCQQGDPLGPAIFSLAIHPNISDLTSPLNIWYLDDGTLGGEPNSVLNDFIIISRKFDSIGLQLNPTKCELYIDPLDANKDDIVRNFQNICPGIKILDKVSLHLLGAPIFDDAIPQFINKNIDHFHTFSDRLLHINSHMAIFILRHCHFVPKFTYAMRCSPFWKLPNLCEKIDNILWTQIEKIINIKIDNRMFSVASLPVRFGGLGLRQISSVALPAFLSSVHSTLPLTGNILKPSLRDCEVACLSQARDAWKLACPGKDLPHNPNSQKLWDEPMCRQLHDHLLETSPSVLDRARLLATSAKESGYWLHAYPSSNFGNLLDPNSFRLAVGLRLGANLVEPHICSCGATVDRLGHHGLACPRSAGRLSRHACLNDIIRRALVSVNVPATLEPNGLARDDGKRPDGLTLVPWLRGRPLVWDATCVDTLAPSHLNTTSLKAGSAAATAETAKRRKYAALGERYVFAAFAVETLGPWGPEALRLFKKLSFMLIRSTGDQRAGSFLAQRIGIAIQRGNAASLMGTLPNSGDIGDICTYSLNHVG

SEQ ID NO: 25735 - protein, 953 aa, Notocelia uddmanniana
MPSLQANVSLDDYLQCPHCPNIKLCKGRRGLNIHISKSHKNSCSQPAQVSTSNAPTTPNFQTASLSDKLSALKESTPVVKRIPRGARLAVAQTLKKALDECVNTNNLVSWEKLLTLAYSILHVDRTSSRTLTRKIKNNCSQLPLPTYSSNTLHPSNFNLYKKIESKVNDGDLRGAARILFSSDTAAPDSEDTLAALESKHPPAPTSQDLPDPPDAAMPGVVASEDAVMAAIMAFNNGSAGGLDGITPQHLKDLLVGNNNGELLTSLTRLVNLMLSGKVHENICQTLYGASLCALAKKDGSVRPIAIGSTFRRLASKVCCRYIRSVLESKFKPIQLGFGSKGGCEAAVHACRTFLTNSQNSILLKLDVKNAFNSVSRQALLTEVQKNTPNIYPYIWQCYSSPTHLKYKNHTILSSVGCQQGDPLGPAIFSLAIHASISDLTSPFNTWYLDDGTLGGEPNSVINDFISISSKFDTIGLQLNSSKCELYIDPNDANKNEIISTFENLCPGLKIQNKDSLHLLGAPIFDAAIPGFINTNIDHFNTFSDRLLQINSHMAIFILRHCHFVPKFTSAMRCSPFWKLPNFCEILDQIICTQIEKIINIKIDNRMFLIASLPVRFGGLGLRQISSVALPAFLSSVHSTLPLTGKILTPSLGDCEIACLSQARDARRVACPGKDLPSNPNLQRLWDEPICRRVHAHLLESSPSTLERARLLAISERQSGHWLHAYPSANFGNLLDPHSFRLSVGLRLGANLVEPHLCPCGANVDRLGHHGLACLKSAGRLSRHASLNDIIRRALVSVCVPATLEPNGLARDDGKRPDGMTLVPWQRGRPLIWDATCVDTLAPSHLSTTSLKAGSAAAAAEAAKRRKYASLGDSYVFAAFAVETLGPWGPEAVQLFNKISHMLIRSTGDRRAGSFLAQRIGIAIQRGNAASLMGTLPNGSDLGDICSFSLGAIG

SEQ ID NO: 25736 - protein, 956 aa, Pammene fasciana
MPPTRANESLDEFLQCPQCSTSKLFKGRKGLNIHISKAHKCSNSQPLQHSNSQLPPTPVSQPISLSDKLSTLKASTPVLKRIPRGARASVAKSFTKVLDECSHTNTLISWEKLLTFAYCILHVDQNSKKSLISKIKQNCIQPYNPPLSDKQPHISANLINKVETKVNDGDLRGAARILFSSDTSAQDSHDTLAALQSKHPPAPTMVDLPNPPDSTHPSLIASEDAVQLAIMSFNNGSAGGLDGITPQHLKDLLTPSSGAHNHELLTSITRLVNLMLSGKVNEEVTKTLYGANLCALSKKDGTVRPIAIGSTFRRLVSKICCKHILPVLESKFQPIQLGFGSKGGCEAAVHACRSFLKNSHNSVLLKLDVKNAFNSVNRNIILSEVNKILPNIYPYIWQCYSSPSHLKYNSHTILSSVGCQQGDPLGPAIFSLSIHPCITDLTSKFNSWYLDDGTLGGEVSSVLNDFISIKSKFESIGLQLNLNKCELYVDPDDPNKCEIIRSFENLCPGIKIHTKDSLHLLGAPVFEDAIPGFIDKNIDHFNSFSDRLLQINPHMAIFILRYCHFVPKFTYAMRCSPFWKLSNLCEKLDHIIWTQIEKIVNLKIDSRMFSIASLPVRFGGLGLRKISSVALPAFLSSVHSTLSLTGKILNPSLGGCEIAYLSEARVTWRLSCPGKDLPFNLNSQKLWDRPICQRVQNELLNSATDLPDKARLLAISEKESGHWLNAYPSANYGNLLDPNSFRIAVGLRLGANLIVPHRCHCGTTVDRLGHHGLACSKSAGRLSRHASLNDIIRRALVSVSVPATLEPHGLMRDDGKRPDGITLVPWQQGRPLVWDATCVDTLAPSHLGTTSLRAGGAASTAEAAKRRKYASLGDNYIFAPFAVETLGPWGPEAVKLFKKLSFMLIRSSGDRRAGSFLAQRISIAIQRGNAASLMGTLPSGSDMGDICTYSLGPNRF

SEQ ID NO: 25737 - protein, 953 aa, Notocelia uddmanniana
MPSLQANVSLDDYLQCPHCPNIKLCKGRRGLNIHISKSHKNSCSQPAQVSTSNAPTTPNFQTASLSDKLSALKESTPVVKRIPRGARLAVAQTLKKALDECVNTNNLVSWEKLLTLAYSILHVDRTSSRTLTRKIKNNCSQLPLPTYSSNTLQPSNFNLYKKIESKVNDGDLRGAARILFSSDTAAPDSEDTLAALESKHPPAPTSQDLPDPPDAAMPGVVASEDAVMAAIMAFHNGSAGGLDGITPQHLKDLLVGNNNGELLTSLTRLVNLMLSGKVHENICQTLYGASLCALAKKDGSVRPIAIGSTFRRLASKVCCRYIRPVLESKFKPIQLGFGSKGGCEAAVHACRTFLTNSQNSILLKLDVKNAFNSVSRQALLTEVQKNTPNIYPYIWQCYSSPTHLKYKNHTILSSVGCQQGDPLGPAIFSLAIHASISDLTSPFNTWYLDDGTLGGEPNSVINDFISISSTFDSIGLQLNSSKCELYIDPNDANKNEIISTFENLCPGLKIQNKDSLHLLGAPIFDAAIPGFINTNIDHFNIFSDRLLQINSHMAIFILRHCHFVPKFTYAMRCSPFWKLPNFCEILDQIICTQIEKIINIKIDNRMFLIASLPVRFGGLGLMQISSVALPAFLSSVHSTLPLTGKILTPSLGDCEIACLSQARDAWRVACPGKDLPSNPNLQRLWDEPICRRVHAHLLESSPSTLERARLLAISERQSGHWLHAYPSANFGNLLDPHSFRLSVGLRLGANLVEPHLCPCGANVDRLGHHGLACLKSAGRLSRHASLNDIIRRALVSVCVPATLEPNGLARDDGKRPDGMTLVPWQRGRPLIWDATCVDTLAPSHLSTTSLKAGSAAAAAEAAKRRKYASLGDSYVFAAFAVETLGPWGPEAVQLFNKISHMLIRSTGDRRAGSFLAQRIGIAIQRGNAASLMGTLPNGSDLGDICSFSLGAIG

SEQ ID NO: 25738 - protein, 954 aa, Pammene fasciana
MQSVQANASLDDLIQCPHCPTTKICKGRRGLKIHVSKIHNNTGSQPVQLLSTSTPTTTPNIQSISLSDKLSVLKESTPVIKRIPRGARPAVAQALIKTLDECVNNNNPVSWEKLLTFAYSILHVDRTSSQTLTKKIKNNCLQPYSPAYHANPTSPTDHNLYKKIESKVNDGDLRGAARILFSSDIVAPDSHDTLAALESKHPLSPSISVLPEPPDTTLRGFLASEDSVLAAIMAFNNGSAGGLDGITPQHIKDLLASNNNGQLLAGLTRLVNLMLSGKVHDSVCKTLYGANLCALTKKDGSVRPIAIGSTFRRLASKVCCRYIRPVLETKFKPFQLGFGSKGGCEAAVHACRTFLNKSPNSVLLKLDVKNAFNSVHRQTLLTEVQKNTPNIYPYIWQCYSSATHLKYRSHTILSSTGCQQGDPLGPAIFSLAIHPNISDLTSPLNIWYLDDGTLGGEPNSVLNDFITISRKFDSIGLQLNPTKCELYIDPLDANKDDIVRNFQNICPGIKILDKVSLHLLGAPIFDDAIPQFINKNIDHFHTFSDRLLHINSHMAIFILRHCHFVPKFTYAMRCSPFWKLPNLCEKIDNILWTQIEKIINIKIDNRMFSVASLPVRFGGLGLRQISSVALPAFLSSVHSTLPLTGNILKPSLRDCEVACLSQARDAWKLACPGKDLPHNPNSQKLWDEPMCRQLHDHLLETSPSVLDRARLLATSAKESGYWLHAYPSSNFGNLLDPNSFRLAVGLRLGANLVEPHICSCGATVDRLGHHGLACPRSAGRLSRHACLNDIIRRALVSVNVPATLEPNGLARDDGKRPDGLTLVPWLRGRPLVWDATCVDTLAPSHLNTTSLKAGSAAATAETAKRRKYAALGERYVFAAFAVETLGPWGPEALRLFKKLSFMLIRSTGDQRAGSFLAQRIGIAIQRGNAASLMGTLPNSGDIGDICTYSLNHVG

SEQ ID NO: 25739 - protein, 727 aa, Notocelia uddmanniana
MSFNNGSAGGLDGITPQHLKDLLAATPGSCYGDLLASITRLINLMLSGKVDEAVIKTLYGANLCALSKKDGSVRPIAIGSTVRRLASKICCRHILPVLESKFQPTQLGFGSKGGCEAAVHACRTFLKNTNDIVLLKLDVKNAFNSVNRDVLLSEVQKNIPDIYPYIWQCYSSPSHLKYKNNTILSSIGCQQGDPLGPAIFSLAIQPSITELTSKFNVWYLDDGTLGGEANNVKNDFVAIRSKFESIGLQLNSSKCELYVDQDDDKKTETIRSFENLCPGIKIISKESLHLLGAPIFDEAIPGFVNKNIDHFNSFSDRLLHINSHMAIFILRYCHFVPKFTYVMRCSPFWKLLNLCEKLDNIIWTHLEKIINIKIDNRMFLLASLPVKFGGLGIRQISSVALPAFLSSVHSTLPLTGKILNPSHRDCEIACLSEARDAWKMACPGKDLPVRPELQKLWDLPICRRVHDHLVETSTLASDRARMLAISERESSHWLHAYPSANYGNLLDSNSFRLAVGLRLGANIVEQHRCHCGTMVDKTGHHGLACPKSAGRMSRHSCLNDIIRRALVSVNVPATLEPSGLARDDGKRPDGMTLVPWQQGRPLVWDATCVDTLAPSHLGTTSLRAGGAAAVAEAAKRRKYATLGDSYIFAAFAVETLGPWGPDAIKLFKKLSFMLIRSSGDRRAGSFLAQRIGIAIQRGNAASLMGTLPSGIDLGEICTYRLGSDNLS

SEQ ID NO: 25740 - protein, 960 aa, Notocelia uddmanniana
MPPPHPDVSLEEFLRCPQCPSTKLFKGRRGLNIHISKSHNHSRSQPPLNSSPQLPATSTPSFPTTSLSDKLSEFKDSIPILKRIPRGARITVAKSLSKVLDECVNSNTLTSWEKLLTFANQILHVDHSTSSKSLTYKIKHNCSHSISPSPSNKFSSTHHNLFKKVETKVNDGDLRGAARILFSSDTSAPDSPDTLAALESKHPPAPAISNLPDPADTALPGLVASEDAVLAAIMSFNNGSAGGLDGITPQHLKDLLAATPGSCYGDLLASITRLINLMLSGKVDEAVIKTLYGANLCALSKKDGSVRPIAIGSTFRRLASKICCKHILPVLESEFQPTQLGFGSKGGCEAAVHACRTFLKNTNDIVLLKLDVKNAFNSVNRDVLLSEVQKNIPDIYPYIWQCYSSPSHLKYKNNTILSSIGCQQGDPLGPAIFSLAIQPSITELTSKFNVWYLDDGTLGGEANIVKNDFVAIRSKFESIGLQLNSSKCELYVDQDDDKKTETIRSFENLCPGIKIISKESLHLLGAPIFDEAIPGFVNKNIDHFNSFSDRLLHINSHMAIFILRYCNFVPKFTYVMRCSPFWKLQNLCEKLDNIIWTHLEKIINIKINNRMFLLASLPVKFGGLGIRQISSVALPAFLSSLHSTLPLTGKILNPSHRDCEIACLSEARDAWKMACPGKDLPVRPELQKLWDLPICRRVHDHLVETSTLASERARMLAISERESSHWLHAYPSANYGNLLDSNSFRLAVGLRLGANIVEQHRCHCGTMVDKTGHHGLACPKSAGRMSRHSCLNDIIRRALVSVNVPATLEPSGLARDDGKRPDGMTLVPWQQGRPLVWDATCVDTLAPSHLGTTSLRAGGAAAVAEAAKRRKYATLGDSYIFAAFAVETLGPCGPDAIKLLKKLSFMLIRSSGDRRAGSFLAQRIGIAIQRGNAASLMGTLPSGIDLGEICTYRLGSDNLS

SEQ ID NO: 25741 - protein, 960 aa, Notocelia uddmanniana
MPPPHPDVSLEEFLRCPQCPSTKLFKGRRGLNIHISKSHNHSRSQPPLNSSPQLPATSTPSFPTTSLSDKLSEFKDSIPILKRIPRGARITVAKSLSKVLDECVNSNTLTSWEKLLTFAYQILHVDHSTSSKSLTYKIKHNCSHSISPSPSNKLSSTHHNLFKKVETKVNDGDLRGAARILFSSDTSAPDSPDTLAALESKHPPAPAISNLPDPPDTALPGLVASEDAVLAAIMSFNNGSAGGLDGITPQHLKDLLAATPGSCYGDLLASITRLINLMLSGKVDEAVIKTLYGANLCALSKKDGSVRPIAIGSTFRRLASKICCKHILPVLESKFQPTQLGFGSKGGCEAAVHACRTFLKNTNDIVLLKLDVKNAFNSVNRDVLLSEVQKNIPDIYPYIWQCYSSPSHLKYKNNTILSSIGCQQGDPLGPAIFSLAIQPSITELTSKFNVWYLDDGTLGGEANNVKNDFVAIRSKFESIGLQLNSSKCELYVDQDDDKKTETIRSFENLCPGIKIISKESLHLLGAPIFDEAIPGFVNKNIDHFNSFSDRLLHINSHMAIFILRYCHFVPKFTYVMRCSPFWKLLNLCEKLDNIIWTHLEKIINIKIDNRMFLLASLPVKFGGLGIRQISSVALPAFLSSVHSTLPLTGKILNPSHRDCEIACLSEARDAWKMACPGKDLPVRPELQKLWDLPICRRVHDHLVETSTLASDRARMLAISERESSHWLHAYPSANYGNLLDSNSFRLAVGLRLGANIVEQHRCHCGTMVDKTGHHGLACPKSAGRMSRHSCLNDIIRRALVSVNVPATLEPSGLARDDGKRPDGMTLVPWQQGRPLVWDATCVDTLAPSHLGTTSLRAGGAAAVAEAAKRRKYATLGDSYIFAAFAVETLGPWGPDAIKLFKKLSFMLIRSSGDRRAGSFLAQRIGIAIQRGNAASLMGTLPSGIDLGEICTYRLGSNNLS

SEQ ID NO: 25742 - protein, 752 aa, Pammene fasciana
MVDLPNPPDSTHPSLIASEDAVQLAIMSFNNGSAGGLDGITPQHLKDLLTPSSGAHNHELLTSITRLVNLMLSGKVNEEVTKTLYGANLCALSKKDGTVRPIAIGSTFRRLVSKICCKHILPVLESKFQPIQLGFGSKGGCEAAVHACRSFLKNSHNSVLLKLDVKNAFNSVNRNIILSEVNKIVPNIYPYIWQCYSSPSHLKYNSHTILSSVGCQQGDPLGPAIFSLSIHPCITDLTSKFNSWYLDDGTLGGEVSSVLNDFISIKSKFESIGLQLNLNKCELYVDPDDPNKCEIIRSFENLCPSIKIHTKDSLHLLGAPVFEEAIPGFIDKNIDHFNSFSDRLLQINPHMAIFILRYCHFVSKFTYAMRCSPFWKLSNLCEKLDHIIWTQIEKIVNLKFDSRMFSIASLPVRFGGLGLRKISSVALPAFLSSVHSTLSLTGKILNPSLGGCEIAYLSEARVTWRLSCPGKDLPFNLNSQKLWDRPICQRVQNELLNSATDLPDKARLLAISEKESGHWLNAYPSANYGNLLDPNSLRIAVGLRLGANLIVPHRCHCGTTVDRLGHHGLAYSKSAGRLSRHASLNDIIRRALVSVSVPATLEPHGLMRDDGKRPDGITLVPWQQGRPLVWDATCVDTLAPSHLGTTSLRAGGAASTAEAAKRRKYASLGDNYIFAPFAVETLGPWGPEAVKLFKKLSFMLIRSSGDRRAGSFLAQRISIAIQRGNAASLMGTLPSGSDMGDICTYSLGPNRF

SEQ ID NO: 25743 - protein, 960 aa, Notocelia uddmanniana
MPPPHPDVSLEEFLRCPQCPSTKLFKGRRGLNIHISKSHNHSRSQPPLNSSPQLPATSTPSFPTTSLSDKLSEFKDSIPILKRIPRGARITVAKSLSKVLDECVNSNTLTSWEKLLTFAYQILHVDHSTSSKSLTYKIKHNCSHSISPSPSNKLSSTHHNLFKKVETKVNDGDLRGAARILFSSDTSAPDSPDTLAALESKHPPAPAISNLPDPADTALPGLVASEDAVLAAIMSFNNGSAGGLDGITPQHLKDLLAATPGSCYGDLLASITRLINLMLSGKVDEAVIKTLYGANLCALSKKDGSVRPIAIGSTFRRLASKICCKHILPVLESKFQPTQLGFGSKGGCEAAVHACRTFLKNTNDIVLLKLDVKNAFNSVNRDVLLSEVQKNIPDIYPYIWQCYSSPSHLKYKNNTILSSIGCQQGDPLGPAIFSLAIQPSITELTSKFNVWYLDDGTLGGEANIVKNDFVAIRSKFESIGLQLNSSKCELYVDQDDDKKTETIRSFENLCPGIKIISKESLHLLGAPIFDEAVPGFVNKNIDHFNSFSDRLLHINSHMAIFILRYCHFVPKLQYVMRCSPFWKLQNLCEKLDNIIWTHLEKIINIKINNRMFLLASLPVKFGGLGIRQISSVALPAFLFSVHSTLPLTGKILNPSHRDCEIACLSEARDAWKMACPGKDLPVRPELQKLWDLPICRRVHDHLVETSTLASERARMLAISERESSHWLHAYPSANYGNLLDSNSFRLAVGLRLGANIVEQHRCHCGTMVDKTGHHGLACPKSAGRMSRHSCLNDIIRRALVSVNVPATLEPSGLARDDGKRPDGMTLVPWQQGRPLVWDATCVDTLAPSHLGTTSLRAGGAAAVAEAAKRRKYATLGDSYIFAAFAVETLGPWGPDAIKLFKKLSFMLIRSSGDRKAGSFLAQRIGIAIQRGNAASLMGTLPSGIDLGEICTYRLGSDNLS

SEQ ID NO: 25744 - protein, 975 aa, Blastobasis lacticolella
MLPRPANYQPQLSQSAVSQDVLVQCPQCAAPKFLKGRRGLQIHIGKCHKVTRPPPSLATSPRPHQLLPLSLPNLLQPLPTLNLSSLLSNLKNSVPIIKRIPRGARFLVASSLAKTIDFCVTENSLSSWKTLFTFSYDILHFSKNNSNRSVTSQIKYNCSHHPNTTSTRCNPSLTRKPRTLSKTVESKVNDGDLRGAARILFSSDTAAPDSLDTLSALQSKHPPATLTVLPDPPSTSPPHLQASEDAVLAAVMSFNNGSAGGLDGISPQHLKDLLQSAHTGLHAGLLTSLTKLVNLMLGGEVTEQVTATLYGANLCALAKKDGSVRPIAIGSTFRRLASKICCKEILPILESKFQPTQLGFGSKGGCEAIVHACRTYLHNSKNNILFKLDVKNAFNSVCRSAMLSEIKTVVPNIYPYIWQCYSSPSDLLFRNHKISSSVGCQQGDPLGPAIFSLAIHPIVSELKSKFNVWYLDDGTLGGEASTILQDLAFVKTKFNEIGLQLNFKKCELYLDDSFQNKNDLIQEFETLCPGMKIITKDSLFLLGAPIFSDSIPGFIQQNISKFNDTADRLLQIHSHMAMFIIRYCLFVPKFTYAMRCSPFWKFPNFCEVIDKLLFAQIQKIINVKLDSRSFLLATLPVRHGGLGIRQVSSVALPAFLASVHSTLSLVGKILNPSFNDFEVTYLTEAEEAWKMACPSQAPPSDKGCQRLWDDPICRRVFEHLSETCPSPIERARLLAVSERESGYWLQAYPSINYGNLLDNNSFRLAVGLRLGCNLVEPHRCHCGAAVDSSGHHGLSCCKSSGRLSRHACLNDIIRRALASINVPSSLEPLGLVRDDGKRPDGMSLVPWELGRPLVWDATCVDTLAASHVGSTSVRPGAAAASAETLKRRKYANIADSCVFSAFAVETLGPWGPEAKKLFAKLKSCLIRSTGERRAGSFLGQRIGIAIQRGNAASLMGTIPSSGSDLGDICTYRFLD

SEQ ID NO: 25745 - protein, 974 aa, Blastobasis lacticolella
MLPRPANYQPQLSQSAVSQDDLVQCPQCAAPKFLKGRRGLQIHIGKCHKVNRPPPSLATSPRPHQLLPLSLPNLLQPLPTLNLSSLLSNLKNSVPIIKRIPRGARFLVASSLAKTIDFCVTENSLSSWKTLFTFSYDILHFSKNNSNRSVTSQIKYNCSHHPNTTSTRCNPSLTRKSRTLSKTVESKVNDGDLRGAARILFSSDTAAPDSLDTLSALQSKHPPATLTVLPDPPSTSPPHLQASEDAVLAAVMSFNNGSAGGLDGISPQHLKDLLQSAHTGLHAGLLTSLTKLVNLMLGGEVTEQVTATLYGANLCALAKKDGSVRPIAIGSTFRRLASKICCKEILPILESKFQPTQLGFGSKGGCEAIVHACRTYLHNSKNNILFKLDVKNAFNSVCRSAMLSEIKTVVPNIYPIWQCYSSPSDLLFRNHKISSSVGCQQGDPLGPAIFSLAIHPIVSELKSKFNVWYLDDGTLGGEASTILQDLAFVKTKFNEIGLQLNFKKCELYLDDSFQNKNDLIQEFETLCPGMKIITKDSLFLLGAPIFSDSIPGFIQQNISKFNDTADRLLQIHSHMAMFIIRYCLFVPKFTYAMRCSPFWKFPNFCEVIDKLLFAQIQKIINVKLDSRSFLLATLPVRHGGLGIRQVSSVALPAFLASVHSTLSLVGKILNPSFNDFEVTYLTEAEEAWKMACPSQAPPSDKGCQRLWDDPICRRVFEHLSETCPSPIERARLLAVSERESGYWLQAYPSINYGNLLDNNSFRLAVGLRLGCNLVEPHRCHCGAAVDSSGHHGLSCCKSSGRLSRHACLNDIIRRALASINVPSSLEPLGLVRDDGKRPDGMSLVPWELGRPLVWDATCVDTLAAPHVGSTSVRPGAAAASAETLKRRKYANIADSCVFSAFAVETLGPWGPEAKKLFAKLKSCLIRSTGERRAGSFLGQRIGIAIQRGNAASLMGTIPSSGSDLGDICTYRFLD

SEQ ID NO: 25746 - protein, 975 aa, Blastobasis lacticolella
MLPRPANYQPQLSQSAVSQDVLVQCPQCAAPKFLKGRRGLQIHIGKCHKVTRPPPSLATSPRPHQLLPLSLPNSLQPLPTLNLSSLLSNLKNSVPIIKRIPRGARFLVASSLAKTIDFCVTENSLSSWKTLFTFSYDILHFSKNNSNRSVTSQIKYNCSHHPNTTSTRCNPSLTRKPRTLSKTVESKVNDGDLRGAARILFSSDTAAPDSLDTLSALQSKHPPATLTVLPDPPSTSPPHLQASEDAVLAAVMSFNNGSAGGLDGISPQHLKDLLQSAHTGLHAGLLTSLTKLVNLMLGGEVTEQVTATLYGANLCALAKKDGSVRPIAIGSTFRRLASKICCKEILPILESKFQPTQLGFGSKGGCEAIVHACRTYLHNSKNNILFKLDVKNAFNSVCRSAMLSEIKTVVPNIYPYIWQCYSSPSDLLFRNHKISSSVGCQQGDPLGPAIFSLAIHPIVSELKSKFNVWYLGDGTLGEEASTILQDLAFVKTKFNEIGLQLNFKKCELYLDDSFQNKNDLIQEFETLCPGMKIITKDSLFLLGAPIFSDSIPGFIQQNISKFNDTADRLLQIHSHMAMFIIRYCLFVPKFTYAMRCSPFWKFPNFCEVIDKLLFAQIQKIINVKLDSRSFLLATLPVRHGGLGIRQVSSVALPAFLASVHSTLSLVGKILNPSFNDFEVTYLTEAEEAWKMACPSQAPPSDKGCQRLWDDPICHRVFEHLSETCPSPIERARLLAVSERESGYWLQAYPSINYGNLLDNNSFRLAVGLRLGCNLVEPHRCHCGAAVDSSGHHGLSCCKSSGRLSRHACLNDIIRRALASINVPSSLERLGLVRDDGKRPDGMSLVPWELGRPLVWDATCVDTLAASHVGSTSVRPGAAAASAETLKRRKYANIADSCVFSAFAVETLGPWGPEAKKLFAKLKSCLIRSTGERRAGSFLGQRIGIAIQRGNAASLMGTIPSSGSDLGYICTYRFLD

SEQ ID NO: 25747 - protein, 975 aa, Blastobasis lacticolella
MLPRPANYQPQLSQSAVSQDDLVQCPQCAAPKFLKGRRGLQIHIGKCHKVTRPPPSLATSPRPHQLLPLSLPNLLQPLPTLNLSSLLSNLKNSVPIIKRIPRGARFLVASSLAKTIDFCVTENSLSSWKTLFTFSYNILHFSKNNSNRSVTSQIKYNCSHHPNTTSTRCNPSLTRKPRTLSKTVESKVNDGDLRGAARILFSSDTAAPDSLDTLSALQSKHPPATLTVLPDPPSTSPPHLQASEDAVLAAVMSFNNGSAGGLDGISPQHLKDLLQSAHTGLHAGLLTSLTKLVNLMLGGEVTEQVTATLYGANLCALAKKDGSVRPIAIGSTFRRLASKICCKEILPILESKFQPTQLGFGSKGGCEAIVHACRTYLHNSKNNILFKLDVKNAFNSVCRSAMLSEIKTVVPNIYPYIWQCYSSPSDLLFRNHKISSSVGCQQGDPLGPAIFSLAIHPIVSELKSKFNVWYLDDGTLGGEASTILQDLAFVKTKFNEIGLQLNFKKCELYLDDSFQNKNDLIQEFETLCPGMKIITKDSLFLLGAPIFSDSIPGFIQQNISKFNDTADRLLQIHSHMAMFIIRYCLFVPKFTYAMRCSPFWKFPNFCEVIDKLLFAQIQKIINVKLDSRSFLLATLPVRHGGLGIRQVSSVALPAFLASVHSTLSLVGKILNPSFNDFEVTYLTEAEEAWKMACPSQAPPSDKGCQRLWDDPICRRVFEHLSETCPSPIERARLLAVSERESGYWLQAYPSINYGNLLDNNSFRLAVGLRLGCNLVEPHRCHCGAAVDSSGHHGLSCCKSSGRLSRHACLNDIIRRALASINVPSSLEPLGLVRDDGKRPDGMSLVPWELGRPLVWDATCVDTLAASHVGSTSVRPGAAAASAETLKRRKYANIADSCVFSAFAVETLGPWGPEAKKLFAKLKSCLIRSTGERRAGSFLGQRIGIAIQRGNAASLMGTIPSSGSDLGDICTYRFLD

SEQ ID NO: 25748 - protein, 975 aa, Blastobasis lacticolella
MLPRPANYQPQLSQSAVSQDDLVQCPQCAAPKFLKGRRGLQIHIGKCHKVTRPPPSLATSPRPHQLLPLSLPNLLQPLPTLNLSSLLSNLKNSVPIIKRIPRGARFLVASSLAKTIDFCVTENSLSSWKTLFTFSYNILHFSKNNSNRSVTSQIKYNCSHHPNTTSTRCNPSLTRKPRTLSKTVESKVNDGDLRGAARILFSSDTAAPDSLDTLSALQSKHPPATLTVLPDPPSTSPPHLQASEDAVLAAVMSFNNGSAGGLDGISPQHLKDLLQSAHTGLHAGLLTSLTKLVNLMLGGEVTEQVTATLYGANLCALAKKDGSVRPIAIGSTFRRLASKICCKEILPILESKFQPTQLGFGSKGGCEAIVHACRTYLHNSKNNILFKLDVKNAFNSVCRSAMLSEIKTVVPNIYPYIWQCYSSPSDLLFRNHKISSSVGCQQGDPLGPAIFSLAIHPIVSELKSKFNVWYLDDGTLGGEASTILQDLAFVKTKFNEIGLQLNFKKCELYLDDSFQNKNDLIQEFETLCPGMKMITKDSLFLLGAPIFSDSIPGFIQQNISKFNDTADRLLQIHSHMAMFIIRYCLFVPKFTYAMRCSPFWKFPNFCEVIDKLLFAQIQKIINVKLDSRSFLLATLPVRHGGLGIRQVSSVALPAFLASVHSTLSLVGKILNPSFNDFEVTYLTEAEEAWKMACPSQAPPSDKGCQRLWDDPICRRVFEHLSETCPSPIERARLLAVSERESGYWLQAYPSINYGNLLDNNSFRLAVGLRLGCNLVEPHRCHCGAAVDSSGHHGLSCCKSSGRLSRHACLNDIIRRALASINVPSSLEPLGLVRDDGKRPDGMSLVPWELGRPLVWDATCVDTLAASHVGSTSVRPGAAAASAETLKRRKYANIADSCVFSAFAVETLGPWGPEAKKLFAKLKSCLIRSTGERRAGSFLGQRIGIAIQRGNAASLMGTIPSSGSDLGDICTYRFLD

SEQ ID NO: 25749 - protein, 975 aa, Blastobasis lacticolella
MLPRPANYQPQLSQSAVSQDVLVQCPQCAAPKFLKGRRGLQIHIGKCHKVTRPPPSLATSPRPHQLLPLSLPNLLQPLPTLNLSSLLSNLKNSVPIIKRIPRGARFLVASSLAKTIDFCVTENSLSSWKTLFTFSYDILHFSKNNSYRSVTSQIKYNCSHHPNTTSTRCNPSLTRKPRTLSKTVESKVNDGDLRGAARILFSSDTAAPDSLDTLLALQSKHPPATLTVLPDPPSTSPPHLQASEDAVLAAVMSFNNGSAGGLDGISPQHLKDLLQSAHTGLHAGLLTSLTKLVNLMLGGEVTEQVTATLYGANLCALAKKDGSVRPIAIGSTFRRLESKICCKEILPILESKFQPTQLGFGSKGGCEAIVHACRTYLHNSKNNILFKLDVKNAFNSVCRSAMLSEIKTVVPNIYPYIWQCYSSPSDLLFRNHKISSSVGCQQGDPLGPAIFSLAIHPIVSELKSKFNVWYLDDGTLGGEASTILQDLALVKTKFNEIGLQLNFKKCELYLDDSFQNKNDLIQEFETLCPGMKIITKDSLFLLGAPIFSDSIPGFIQQNISKFNDTADRLLQIHSHMAMFIIRYCLFLPKFTYAMRCSPFWKFPNFCEVIDKLLFAQIQKIINVKLDSRSFLLATLPVRHGGLGIRQVSSVALPAFLASVHSTLSLVGKILNPSFNDFEVTYLTEAEEAWKMACPSQAPPSDKGCQRLWDDPICRRVFEHLSETCPSPIERARLLAVSERESGYWLQAYPSINYGNLLDNNSFRLAVGLRLGCNLVEPHRCHCGAAVDSSGHHGLSCCKSSGRLSRHACLNDIIRRALASINVPSSLEPLGLVRDDGKRPDGMSLVPWELGRPLVWDATCVDTLAASHVGSTSVRPGAAAASAETLKRRKYANIADSCVFSAFAVETLGPWGPEAKKLFAKLKSWLIRSTGERRAGSFLGQRIGIAIQRGNAASLMGTIPSSGSDLGDICTYRFLD

SEQ ID NO: 25750 - protein, 984 aa, Blastobasis lacticolella
MLPRPANYQPQLSQSAVSQDVLVQCPQCAAPKFLKGRRGLQIHIGKCHKVTRPPPSLATSPRPHQLLPLSLPNLLQPLPTLNLSSLLSNLKNSVPIIKRIPRGARFLVASSLAKTIDFCVTENSLSSWKTLFTFSYDILFLSNFSNFSNFSKNNSNRSVTSQIKYNCSHHPNTTSTRCNPSLTRKPRTLSKTVESKVNDGDLRGAARILFSSDTAAPDSLDTLSALQSKHPPATLTVLPDPPSTSPPHLQASEDAVLAAVMSFNNGSAGGLDGISPQHLKDLLQSAHTGLHAGLLTSLTKLVNLMLGGEVTEQVTATLYGANLCALAKKDGSVRPIAIGSTFRRLASKICCKEILPILESKFQPTQLGFGSKGGCEAIVHACRTYLHNSKNNILFKLDVKNAFNSVCRSAMLSEIKTVVPNIYPYIWQCYSSPSDLLFRNHKISSSVGCQQGDPLGPAIFSLAIHPIVSELKSKFNVWYLDDGTLGGEASTIFQDLAFVKTKFNEIGLQLNFKKCELYLDDSFQNKNDLIKEFKTLCPGMKIITKDSLFLLGAPIFSDSIPGFIQQNISKFNDTADRLLQIHSHMAMFIIRYCLFVPKFTYAMRCSPFWKFPNFCEVIDKLLFAQIQKIINVKLDSRSFLLATLPVRHGGLGIRQVSSVALPAFLASVHSTLSLVGKILNPSFNDFEVTYLTEAEEAWKMACPSQAPPSDKGCQRLWDDPICRRVFEHLSETCPSPIERARLLAVSERESGYWLQAYPSINYGNLLDNNSFRLAVGLRLGCNLVEPHRCHCGAAVDSSGHHGLSCCKSSGRLSRHACLNDIIRRALASINVPSSLEPLGLVRDDGKRPDGMSLVPWELGRPLVWDATCVDTLAASHVGSTSVRPGAAAASAETLKRRKYANIADSCVFSAFAVETLGPWGPEAKKLFAKLKSCLIRSTGERRAGSFLGQRIGIAIQRGNAASLMGTIPSSGSDLGDICTYRFLD

SEQ ID NO: 25751 - protein, 950 aa, Notocelia uddmanniana
MSSSQVDLIQCPQCAIPKFFRGRRGLNIHVGKCHKSVYLSQPLPSSSSEQSRNSLPSPHSTNLSSKLSSLKNSIPIVKRIPRGARHAVASSLTKVINDCVSNNSVESWEKLLTFPYYTLHVDNSHPAESLTKKIKNNCSRPFSHLNSDRVSFPNSRDIFRKVESKVNDGDLSGAARLLFSNDSSAPNSADTLASLRSKHPPAPLSLCLTDPPCPDLPCFYASDDAVFAAVMSFKNGSAGGLDGFSPQHLKDLLTGIPGGRNNALLSGLTGLINLMLKGKVNSLITKTLYGANLCALMKKDGGIRPIAIGSTFRRLASKVCCKHILPVLQPIFQPVQLGFGSKGGCEAAVHACRTFLKDSGSEVLLKLDVKNAFNSVCRDAFLSEVKKKTPDIFPYLWQCYEAPSDLMYQKHTIFSSMGCQQGDPLGPAIFSLAIHPIISKLSSKFNIWYLDDGTLGGDVTSVLNDLSFIKAEFESLGLQLNYDKCEIYFNNPNNLQQSILNFEAASPGIKIMSRESLHLLGAPIFDEAISGFVDKNIRLFEDYSDRLTQINSHMALSILRFCLFVPKLTYALRCSPFWKFQIICEKIDNLIHLSLEKIINVKINSRQYLQATLPIRYGGLGVRQVSSVALPAFLSSANSVLPLIGKILLPSLRGFEVACLSDAKDAWRAACPDKDPPYGAESQKLWDEPISRTVHSHLLDTCDSAQDKARLLAVSERESGYWLHALPSAHSATLLDNQSFRLAVGLRLGCNIVEPHRCCCGAQVDRLGLHGLSCAKSAGRLSRHACLNDTIRRALVSVNVPATLEPSGLARNDGKRPDGMTLVPWEGGRPLVWDATCVDTLAPSHLCTTSLRAGGAAATAEIAKHRKYECLGDNFLFVAFAVETLGPWGPGAHTLYEALKKKLINTTGDLRAGSFLGQRIGIAVQRGNAASLLGTIPSSGDLGDIGYTFF

SEQ ID NO: 25752 - protein, 950 aa, Notocelia uddmanniana
MSSSQVDLIQCPQCAIPKFFRGRRGLNIHVGKCHKSVYLSQPLPSSSSEQSRNSLPSPHSTNLSSKLSSLKNSIPIVKRIPRGARHAVASSLTKVINDCVSNNSVESWEKLLTFPYYTLHVDNSHPAESLTKKIKNNCSRPFSHLNSDRVSFPNSRDIFRKVESKVNDGDLSGAARLLFSNDSSAPNSADTLASLRSKHPPAPLSLCLTDPPCPDLPCFYASDDAVFAAVMSFKKGSAGGLDGFSPQHLKDLLTGIPGGRNNALLSGLTGLINLMLKGKVNSLITKTLYGANLCALMKKDGGIRPIAIGSTFRRLASKVCCKHILPVLQPIFQPVQLGFGSKGGCEAAVHACRTFLKDSGSEVLLKLDVKNAFNSVCRDAFLSEVKKKTPDIFPYLWQCYEAPSDLMYQKHTIFSSMGCQQGDPLGPAIFSLAIHPIISKLSSKFNIWYLDDGTLGGDVTSVLNDLSFIKAEFESLGLQLNYDKCEIYFNNPNNLQQSILNFEAASPGIKIMSRESLHLLGAPIFDEAISGFVDKNIRLFEDYSDRLTQINSHMALSILRFCLFVPKLTYALRCSPFWKFQIICEKIDNLIHLSLEKIINVKINSRQYLQATLPIRYGGLGVRQVSSVALPAFLSSANSVLPLIGKILLPSLRGFEVACLSDAKDAWRAACPDKDPPYGAESRKLWDEPISRTVHSHLLDTCDSAQDKARLLAVSERESGYWLHALPSAHSATLLDNQSFRLAVGLRLGCNIVEPHRCCCGAQVDRLGLHGLSCAKSAGRLSRHACLNDTIRRALVSVNVPATLEPSGLARNDGKRPDGMTLVPWEGGRPLVWDATCVDTLAPSHLCTTSLRAGGAAATAEIAKHRKYECLGDNFLFVAFAVETLGPWGPGAHTLYEALKKKLINTTGDLRAGSFLGQRIGIAVQRGNAASLLGTIPSSGDLGDIGYTFF

SEQ ID NO: 25753 - protein, 994 aa, Adoxophyes honmai
MPTNSHAQPACSLPQIDFIECPHCLNSKLFKGHRGLAIHIGRNHKSPASQPVSAIPQTPSGFPSVNTQPPDLAQTLSRLKNNVPVVKRIPRGARFTVANSLCKVLDNVVSENSFSAWEKLLTFCFDTLHASKNSPGNSLTSKIKHNCSSPSIFSTNLPCKAQQSISRKVEAKFNDGDLRGAARLIFSSDTSAPNTPETLAALSSKHPSAPPTLVLPSTTDSSSPPLSASEDAVLAAVLSFENGSAGGLDGFTPQHLKDLLVGVPGGRNSNLLSSLTKLINLMLLGKVNPAITDTLYGANLCALLKKDGGIRPIAIGSTFRRIASKICCKFILPTLQPKFQPTQLGFGSKGGCEAAVHACRTFLKDSNAEVLLKLDVKNAFNSVNRDVMLSEVKQNVPEILQYLWQCYGAPSNLVFQGNKILSSVGCQQGDPLGPAIFSLAIHPIISNLNSKFNVWYLDDGTLGGDKDSVLNDLKNLKSKFESIGLELNFNKCEIYLPGTDNLEHIKQLFEAVSPGIKVQSKESLHLLGAPIHDEALPCFVNKNIDQFNNYSGRLLEIHSHMAIFILRFCLFVPKLTYVLRCCPFWKFPNLCEILDSIIHSQLEKIINIQIDSRKFLQATLPIRYGGLGVRQVSSVALPAFLSSVHSVLPLIGIVLSPSLSDPEVACMHEAIEAWKTACPGNDPPASLKSQRQWDEPICKQVHAHLMDTCVTQTDKARLLAVSERESGFWLHAFPSVHYSTLLDNDSFRMAVGLRLGLNLVSPHTCLCGQEVESLGLHGLRCPKSAGRMSRHACLNDTIRRALVSANFPAVLEPNGLTRDDGKRPDGMTLVPWQLGRPLVWDATCVDTLAPSYLNSTASRAGAAATSAEALKRRKYCNLSDNVIFTAFGVETLGPWGPDAHKFFNVLKHHLIKITGDQRAGAFLGQRIGIAIQRGNAASLLGTFPRGSGLGDVFHFNFWLVLISCSILFYHHKNSINNLVSMIIQKFHNHSVPCR

SEQ ID NO: 25754 - protein, 960 aa, Notocelia uddmanniana
MPSLQANVSLDDYLQCPHCPNIKLCKGRRGLNIHISKSHKNSCSQPAQVSTSNAPTTPNFQTASLSDKLSALKESTPVVKRIPRGARLAVAQTLKKALDECVNTNNLVSWEKLLTLAYSILHVDRTSSRTLTRKIKNNCSQLPLPTYSSNTLQPSNFNLYKKIESKLNDGDLRGAARILFSSDTAAPDSEDTLAALESKHPPAPTSQDLPDPPDAAMPSVVASEDAVMAAIMAFNNGSAGGLDGITPQHLKDLLVGNNNGELLTSLTRLVNLMLSGKVHENICQTLYGASLCALAKKDGSVRPIAIGSTFRRLASKVCCRYIRPVLESKFKPIQLGFGSKGGCEAAVHACRTFLTNSQNSILLKLDVKNAFNSVSRQALLTEVQKNTPNIYPYIWQCYSSPTHLKYKNHTILSSVGCQQGDPLGPATFSLAIHASISDLTSPFNTWYLDDGTLGGEPNSVINDFISISSKFDSIGLQLNSSKCELYIDPNDANKNEIISTFENLCPGLKIQNKDSLHLLGAPIFDAAIPGFINTNIDHFNTFSDRLLQINSHMAIFILRHCHFVPKFTYAMRCSPFGKLPNFCEILDQIICTQIEKIINIKIYNRMFLIASLPESLASLAVRFGGLGLRQISSVALPAFLSSVHSTLPLTGKILTPSLGDCEIACLSQARDAWRVACPGKDLPSNPNLQRLWDEPICRRVHAHLLESSPSTRERARLLAISERQSGHWLHAYPSANFGNLLDPHSFRLSVGLRLGANLVEPHLCPCGANVDRLSHHGLACLKSAGRLSRHASLNDIIRRALVSVCVPATLEPNGLARDDGKRPDGMTLVPWQRGRPLIWDATCVDTLAPSHLSTTSLKAGSAAAAAEAAKRRKYASLGDSYVFAAFGVETLGPWGPEAVQLFNKISHMLIRSTGDRRAGSFLAQRIGIAIQRGNAASLMGTLPNGSDLGDICSFSLGAIG

SEQ ID NO: 25755 - protein, 955 aa, Notocelia uddmanniana
MPSLQANVSLDDYLQCPHCPNIKLCKGRRGLNIHISKSHKNGCSQPAQVSTSNAPTTPNFQTASLSDKLSALKESTPVVKRIPRGARLAVAQTLKKALDECVNTNNQVSWVKLLTLAYSILHVDRTSSRTLTRKIKNNCSQLPLPTYSSNTLQPSNFNLYKKIESKVNDGDLRGAARILFSSDTAAPDSEDTLAALESKHPPAPTSQDLPDPPDAAMPGVVASEDAVMAAIMAFKNGSAGGLDGITPQHLKDLLVGNNNGELLTSLTRLVNLMLSGKVHENICQTLYGASLCALAKKDGSVRPIAIGSTFRRLASKVCCRYIRPVLESKFKPIQLGFGSKGGCEAAVHACRTFLTNSQNSILLKLDVKNAFNSVSRQALLTEVKKNTPNIYPYIWQCYSSPTHLKYKNHTILSSVGCQQGDPLGPAIFSLAIHASISDLTSPFNTWYLDDGTLGGEPNSVINDFISISSKFDSIGLQLNSSKCELYIDPNDANKNEIISTFENLCPGLKIQNKDSLHLLGAPIFDAAIPGFINTNIDHFNTFSDRLLQINSHMAIFILRHCHFVPKFTYATSMRCSPFWKLPNFCEILDQIICTQIEKIINIKIDNRMFLIASLPVRFGGLGLRQISSVALPAFLSSVHSTLPLTGKILTPSLGDCEIACLSQARDAWRVACPGKDLPSNPNLQRLWDEPICRRVHAHLLESSPSTLERARLLAISERQSGHWLHAYPSANFGNLLDPHSFRLSVGLRLGANLVEPHLCPCGANVDRLGHHGLACLKSAGRLSRHASLNDIIRRALVSVCVPATLEPNGLARDDGKRPDGMTLVPWQRGRPLIWDATCVDTLAPSHLSTTSLKAGSAAAAAEAAKRRKYASLGDSYVYAAFAVETLGPWGPEAVQLFNKISHMLIRSTGDRRAGSFLAQRIGIAIQRGNAASLMGTLPNGSDLGDICSFSLGAIG

SEQ ID NO: 25756 - protein, 964 aa, Apotomis turbidana
MPHPRGDVSLEEYIQCPHCPTTKLLKGRRGLSIHIGKSHQPCSRSQPAQHLPSTPHSPATSALQPPFLSDKLSALKESIPILKRIPRGARVTVAKCLVKAIDDCVSLNTPCAWEKLLTFSYHILHVDHSASSKLQTLTSKIKHNCSHHISLSPSCAPPPSRNIFKKVETKINDGDLRGAARILFSSDTSAPDSPDTLSALKSKHPPAPLTPELPAPPDTALPGLVSSEDAILAAIMSFNNGSAGGLDGITPQHLKDLLTHTSGSHGSELLASITRLVNLMLSGKVNEHVTQTLYGASLCALSKKDGSVRPIAIGSTFRRLASKICCRHILPVLESKFQPTQLGFGSKGGCEAAVHACRKFLKNSNNITLLKVDVKNAFNSVHRSVMLSEVLKNIPNIYPYVWQCYSSPSHLKFKNNTILSSVGCQQGDPLGPAIFSLAIHPSITELTSKFNTWYLDDGTLGGDSDSVLNDFINIRSKFESIGLELNYNKCELYVDTIRGSDTIRNFQNICPGIKILSKHSLQLLGAPIFDEAFPDFIDKKIDHFHAFSDRLLQINPHMAIFIIRYCHFVPKFTYAMRCSPFWKLRNYCEKLDNIIWNQIEKIINIKIDSRMFLIASLPVRFGGLGIRQISSVALPAFLSSVHSTLPLTGKILNPSLCDSGCEVAGLSEARDAWKMACPGNDIPCSPNLQKMWDQPICRRVHEHILETCTSASEKARILAISERESGYWLHAYPSANYGNLLDPNSFRSVVGLRLGANIVEPHRCHCGTLVTRLAHHGLSCSKSAGRLSRHSCLNDIIRRALVSVSVPATLEPNGLSRDDGKRPDGMTLVPWQQGRPLIWDSTCVDTLAPSHLGTTSLRAGGAAAAAETAKRRKYAALGDSYVFAAFSVETLGPWGLEATKLFKKLSYLLIRSSGDRRAGSFLAQRIGVAIQRGNAASLMGTLPNGSDIGDICTCTYSLGPNSLS

SEQ ID NO: 25757 - protein, 962 aa, Apotomis turbidana
MPHPRGDVSLEEFIQCPHCPTTKLLKGRRGLSIHIGKSHQPCSRSQPAQHLPSTPHSPATSALQPPFLSDKLSALKESIPILKRIPRGARVTVAKCLVKAIDDCVSLNTPCAWEKLLTFSYHILHVDHSASSKLQTLTSKIKHNCSHHISLSPSCAPPPSRNIFKKVETKINDGDLRGAARILFSSDTSAPDSPDTLSALKSKHPPAPLTPELPAPPDTALPGLVSSEDAILAAIMSFNNGSAGGLDGITPQHLKDLLTHTSGSHGSELLASITRLVNLMLSGKVNEHVTQTLYGASLCALSKKDGSVRPIAIGSTFRRLASKICCRHILPVLESKFQPTQLGFGSKGGCEAAVHACRTFLKNSNNVTLLKLDVKNAFNSVHRSVMLSEVLKNIPNIYPYVWQCYSSPSHLKFKNNTILSSVGCQQGDPLGPAIFSLAIHPSITELTSKFNTWYLDDGTLGGDSDSVLNDFINIRSKFESIGLELNYNKCELYVDTIRGSDTIRNFQNICPGIKILSKHSLQLLGAPIFDEAFPDFIDKKIDHFHTFSDRLLQINPHMAIFIIRYCHFVPKFTYAMRCSPFWKLRNYCEKLDNIIWNQIEKIINIKIDSRMFLIASLPVRFGGLGIRQISGVALPAFLSSVHSTLPLTGKILNPSLCDSGCEVAGLSEARDAWKMACPGNDIPCSPNLQKMWDQPICRRVHEHILETCTSASEKARILAISERESGYWLHAYPSANYGNLLDPNSFRSVVGLRLGANIVEPHRCHCGTLVTRLAHHGLSCSKSAGRLSRHSCLNDIIRRALVSVSVPATLEPNGLSRDDGKRPDGMTLVPWQQGRPLIWDSTCVDTLAPSHLGTTSLRAGGAAAAAETAKRRKYAALGDSYVFAAFAVETLGPWGPEATKLFKKLSYLLIRSSGDRRAGSFLAQRIGVAIQRGNAASLMGTLPNGSDIGDICTYSLGPNSLS

SEQ ID NO: 25758 - protein, 962 aa, Apotomis turbidana
MPHPRGDVSLEEFIQCPHCPTTKLLKGRRGLSIHIGKSHQPCSRSQPAQHLPSTPHSPATSALQPPFLSDKLSALKESIPILKRIPRGARVTVAKCLVKAIDDCVSLNTPCAWEKLLTFSYHILHVDHSASSKLQTLTSKIKHNCSHHISLSPSCAPPPSRNIFKKVETKINDGDLRGAARILFSSDTSAPDSPDTLSALKSKHPPAPLTPELPAPPDTALPGLISSEDAILAAIMSFNNGSAGGLDGITPQHLKDLLTHTSGSHGSELLASITRLVNLMLSGKVNEHVTQTLYGASLCALSKKDGSVRPIAIGSTFRRLASKICCRHILPVLESKFQPTQLGFGSKGGCEAAVHACRTFLKNSNNVTLLKLDVKNAFNSVHRSVMLSEVLKNIPNIYPYVWQCYSSPSHLKFKNNTILSSVGCQQGDPLGPAIFSLAIHPSITELTSKFNTWYLDDGTLGGDSDSVLNDFINIRSKFESIGLELNYNKCELYVDTIRGSDTIRNFQNICPGIKILSKHSLQLLGAPIFDEAFPDFIDKKIDHFHTFSDRLLQINPHMAIFIIRYCHFVPKFTYAMRCSPFWKLRNYCEKLDNIIWNQIEKIINIKIDSRMFLIASLPVRFGGLGIRQISGVALPAFLSSVHSTLPLTGKILNPSLCDSGCEVAGLSEARDAWKMACPGNDIPCSPNLQKMWDQPICRRVHEHILETCTSASEKARILAISERESGYWLHAYPSANYGNLLDPNSFRSVVGLRLGANIVEPHRCHCGTLVTRLAHHGLSCSKSAGRLSRHSCLNDIIRRALVSVSVPATLEPNGLSRDDGKRPDGMTLVPWQQGRPLIWDSTCVDTLAPSHLGTTSLRAGGAAAAAETAKRRKYAALGDSYVFAAFAVETLGPWGPEATKLFKKLSYLLIRSSGDRRAGSFLAQRIGVAIQRGNAASLMGTLPNGSDIGDICTYSLGPNSLS

SEQ ID NO: 25759 - protein, 714 aa, Apotomis turbidana
MSFNNGSAGGLDGITPQHLKDLLTHTSGSHGSELLASITRLVNLMLSGKVNEHVTQTLYGASLCALSKKDGSVRPIAIGSTFRRLASKICCRHILPVLESKFQPTQLGFGSEGGCEAAVHACRTFLKNSNNVTLLKLDVKNAFNSVHRSVMLSEVLKNIPNIYPYVWQCYSSPSHLKFKNNTILSSVGCQQGDPLGPAIFSLAIHPSITELTSKFNTWYLDDGTLGGDSDSVLNDFINIRSKFESIGLELNYNKCELYVGTIQGSDTIRNFQNICPGIKILSKHSLQLLGAPIFDEAFPDFIDKKIDHFHTFSDRLLQINPHMAIFIIRYCHFVPKFTYAMRCSPFWKLRNYCEKLDNIIWNQIEKIINIIIDSRMFLIASLPVRFGGLGIRQISSVALPAFLSSVHSTLALTGKILNPSLCDSDCEVAGLSEARDAWKMACSGNDIPCSPNLQKMWDQPICRRVHEHILETCTSASEKARILAISERESGYWLHAYPSANYGNLLDPNSFRSVVGLRLGANIVEPHRCHCGTLVTRLAHHGLSCSKSAGRLSRHSCLNDIIRRALVSVSVPATLEPNGLSRDDGKRPDGMTLVPWQQGRPLIWDSTCVDTLAPSHLGTTSLRAGGAAAAAETAKRRKYAALGDSYVFAAFAVETLGPWGPEATKLFKKLSLVIYLSGPPVIVGLARSSPNALALPSSEVTRPALWAPYLMIAT

SEQ ID NO: 25760 - protein, 738 aa, Notocelia uddmanniana
MPRVVASEDAVMAAIMAFNNGSAGGLDGITPQHLKDLLVGNNNGELLTSFTRLVNLMLSGKVHENICQTLYGASLCALAKKDGSVRPIAIGSTFRRLASKVCCRYIRPVLESKFKPIQLGFGSKGGCEAAVHACRTFLTNSQNSILLKLDVKNAFNSVSRQALLTEVQKNTPNIYEYPYIWQCYSSPTHLKYKNHTILSSVGCQQGDPLGPAIFSLAIHASISDLTSPFNTWYLDDGPLGGEPNSVINDFISISSKFDSIGLQLNSSKCELYIDPNDANKNEIISTFENLCPGLKIQNKDSLHLLGAPIFDAAIPGFINTNIDHFNTFSDRLLQINSHMAIFILRHCHFVPKFTYAMRCSPFWKLPNFCEILDQIICTQIEKIINIKIDNRMFLIASLPVRFGGRLRQISSVALPAFLSSVHSTLPLTGKILTPSLGDCEIACLSQARDAWKVACPGKDLPSNPNLQRLWDEPICRRVHAHLLESSPSTLERARLLAISERQSGHWLHAYPSANFGNLLDPHSFRLSVGLRLGANLVEPHLCPCGANVDRLAHHGLACLKSAGRLSRHASLNDIIRRALVSVCVPATLEPNGLARDDGKRPDGMTLVPWQRGWPLIWDATCVDTLAPSHLSTTSLKAGSAAAAAEAAKRRKYASLGDSYVFAAFAVETLGPWGPEAVQLFNKISHMLIRSTGDRRAGSFLAQRIGIAIQRGNAASLMGTLPNGSDLGDICSFSLGAIG

SEQ ID NO: 25761 - protein, 937 aa, Scaeva pyrastri
MLARKEIELERLGVRFINMELHKFFQSRSLEAIKKERQKPSYRDIVNIYRNEQTPPVEPGTSNNLEREPNDLQSLYIYFENSNPPVLNNTLDRTLSDIITRAPIEGKEETIVSLGNFLIENFHNRPSNNNNNNNNNNNRNRIRPPPRNNRQKRKLEYRLVQNNFKKHQSRCIKSILAGPNLGSTPPKNIMLPYWENIMSRDSTSKPQDLIASNTLDSLWQPVTTDEVKNSRPSISTSPGPDGVTAKIWRKIPIETVRRIFNLFLWCNKVPQHLYESKTTLIPKTPDSKEPGEFRPITVSSIIVRQFHNILAKRLYNAIELDQRQQAFIASDGCAINITLLDLLLRHQHLASSNFYLASIDVAKAFDSVSHPTIIGTLRSYGAPSSFINYVDTLYKSSTTKIVSTEWTSNQIKVKSGVKQGDPLSPILFNLVIDRLLKSLPSEIAANIGSASVNALAFADDLILCASTPQGLQRILDHTLEFLTTCGMHINASKCCTISIKGQGKQKTTVVEQRNFSIGNQQLPALKRTDTMRYLGLDFSPDGRIRFRNPDLESKLTKVTKAPLKPQQRLHILRTVLIPQLYHQLTLGNCHIGVLNKIDRRIRTEVRKWLDLPKDVTTAYFHAPIDQGGLGIPAVRYTAPLIRYNRLNRIKIPNMDNVTIANTFLAKEIDTALRRLQVGNSRLDSKVLVEQYWANKLHSSIDGSGLKEASGHGLSHRWVREPTKLLSGRDFIHCLKTRINALPTRSRTSRGRPTIDRNCRAGCHRQETLNHIVQQCDRTNDGRIDRHNTVINFLKRNVNNLGLQTLLEPTFQTNEGPRKPDLIVKDDDRAIIIDAQIVCDSLPLDMCHTRKAAKYNTPALHEAIRTRLEVSELAFTSATLNWRGVWSKKSVDELLTLGILKNTHTALVSTRVLIGSYSMFKKHSGRTFQSRWWTRENA

SEQ ID NO: 25762 - protein, 987 aa, Scaeva pyrastri
MLARKEIELERLGVRFINMELHKFFQSRSLEAIKKERQKPSYRDIVNIYRNEQTPPVEPGTSNNLEREPNDLQSLYIYFENSNPPVLNNTLDRTLSDIITRAPIEGKEETIVSLGNFLIENFHNRPSNNNNNNNNNNNNNNNRNRIRPPPRNNRQKRKLEYRLVQNNFKKHQSRCIKSILAGPNLGSTPPKNIMLPYWENIMSRDSTSKPQDLIASNTLDSLWQPVTTDEVKNSRPSISTSPGPDGVTAKIWRKIPIETVRKIFNLFLWCNKVPQHLYESKTTLIPKTPDSKEPGEFRPITVSSIIVRQFHNILAKRLYNAIELDQRQQAFIASDGCAINITLLDLLLRHQHLASSNFYLASIDVAKAFDSVSHPTIIGTLRSYGAPSSFINYVDTLYKSSTTKIVSTEWTSNQIKVKSGVKQGDPLSPILFNLVIDRLLKSLPSEIAANIGSASVNALAFADDLILCASTPQGLQRILDHTLEFLTTCGMHINASKCCTISIKGQGKQKTTVVEQRNFSIGNQQLPALKRTDTMRYLGLDFSPDGRIRFRNPDLESKLTKVTKAPLKPQQRLHILRTVLIPQLYHQLTLGNCHIGVLNKIDRRIRTEVRKWLDLPKDVTTAYFHAPIDQGGLGIPAVRYTAPLIRYNRLNRIKIPNMDNVTIANTFLAKEIDTALRRLQVGNSRLDSKVLVEQYWANKLHSSIDGSGLKEASGHGLSHRWVREPTKLLSGRDFIHCLKTRINALPTRSRTSRGRPTIDRNCRAGCHRQETLNHIVQQCDRTNDGRIDRHNTVINFLKRNVNNLGLQTLLEPTFQTNEGPRKPDLIVKDDDRAIIIDAQIVCDSLPLDMCHTRKAAKYNTPALREAIRTRLEVSELAFTSATLNWRGVWSKKSVDELLTLGILKNTHTALVSTRVLIGSYSMFKKHSGRTFQSRWWTRENPPPPPPDPRRCIRAACVTGTIQCGHLMDLARSQRRTIKKKNSQLSPL

SEQ ID NO: 25763 - protein, 1049 aa, Trachelipus rathkii
MTDLNERTINDVQPPNGDNREENAIDEQLLNKIANYREEDRVQGIEKREQVRKIKNWFMLNKVTASANRVLPRLIPPNCSLTELNRLYYATSRAVAETMGVDIVKDKKNNPNKGRKNRMPPWKFRLTNEINTLRKEIGMLTMLQNGEIIFEATKRKAQNLVNRERIRIGDKLTHALVRRKLTLTAKGKRLKRYEMREKEKKENKLFKEDQGKFYRELRNTKITVADAPKAEEVEGFWKNIYENNVSHNVDTEWLRNIKNNPEITSIRNMNSQKISIKEVKDVIKKTNNWKAPGMDKVQNIWLKKLTSLIKPLTECLNNIMDGRVDIPHWFITGETTLIPKNEETKDPSKYRPITCLPTSYKVLTGVLTQRLYKHVERNNIISEEQKGCSRHTYGTKEQLLINKMIIENSWKGQKNLCMTWIDYRKAYDSVPHSWLKEIMSIYKVDEKIKRFMERVMEMWKINLKLPHEKGIMKIKNVKVKRGIFQGDSMSPLLFVLALNPLSNLINNLENGYRINKRTEKKEKRISHLFYMDDLKLYAPSRGEAERQIKVVSDFSSDIRMDFGLEKCAFIVMNKGRKIHAENIIVNNMEIKELEQEGTYKYLGVEESDRIENNYEKRIKKEYISRVKKILKTELKPKNKIEAIKVLAMPVMRYSFGIIDWYQHEINTLDTTTRKLLHAHKIIYKNQCTARIYIPRDEGGMGMPHIDRTHKNEIVGLAEYIEGKGTKFIGWLKEHEDCKAGTTSITKKANDYLHEFNIDIRTQNGWNEKNLKERTKILKESYKAARKKADNVEWEEHRHAQHFKKEVLNKAFINKEKSIETIARGFLKINDERTLITAQDWCLRTNWFKKHIEGVDGSDRCRMCGEFSETVPHILSGCETLLRMGLYTERHNTICKLIHYRLCKLYNIDTPNNHWNYKPPAIVDNDHIQILYDFGIPTDIFVQSNRPDIVLVNKTTRKCQLIEVGVPYDEKVALYEREKEIKYQRLRYAIRRMWEMEEVEVVPVVVGSLGAVKTSLVTYLEKIPAKIGTEEIAIEAIRGSLGIIRLVLGS

SEQ ID NO: 25764 - protein, 1239 aa, Trachelipus rathkii
MMKATLPTAEDIENIKERALRIMENELEMNTELVQEIKSTKAKLYKRTKLVQGKRDAQVREGLRSQCERDNENSHRVQTSSEDETDEQEYRIELSTEVKEKKEEVRVKRHKRIKQMKMQKKLQLDDEENLLNGREMDHTRLQSTSEEELEIDIEHGTSPLVEAEQPTDNNDETDRESDYEMNLSWYQEHDRDLNERTINDVQPPNGDNREENAIDEQLLNKIANYREEDRVQGIEKREQVRKIKNWFMLNKVTASANRVLPRLIPPNCSLTELNRLYYATSRAVAETMGVDTVKDKKNNPNIGRKNMMPPWKIRLTNEINTLRKEIGMLTMLQNGEIIVEATKRKAQNLVNRERIRIGDKLTHALVRRKLSLTAKGKRLKRYEMREKEKKENKLFKEDQGKFYRELRNTKITVADAPKAEEVEGFWKNIYENNVSHNVDTEWLRNIKNNPEITSIRNMNSQKISIKEVKDVIKKTNNWKAPGMDKVQNIWLKKLTSLIKPLTECLNNIMDGRVDIPHWFITGVTIFIPKNEETKDPSKYRPITCLPTSYKVLTGVLTQRLYKHVERNNIISEEQKGCSRHTYGTKEQLLINKMIIENSWKGQKNLCMTWIDYRKAYDSVPHSWLKEIMSIYKVDGKIKRFMERVMEMWKINLKLPHEKGIMKIKNVKVKRGIFQGDSMSPLLFVLALNPLSNLINNLENGYRINKRTEKKEKRISHLFYMDDLKLYAPSRGEAERQIKVVSDFSSDIRMDFGLEKCAFIVMNKGRKIHAENIMVNNMEIKELEQEGTYKYLGVEESDRIENKIMKERIKKEYISRVKKILKTELKPKNKIEAIKVLAMPVMRYSFGIIDWYQHEINTLDTTTRKLLHAHKIIYKNQCTARIYIPRDEGGMGMPHIDRTHKNEIVGLAESIEGKGTKFIGWLKEHEDCKAGTTSITKKANDYLHEFNIDIRTQNGWNEKNLKERTKILKESYKVARKKADNVEWEEHRHAQHFKKEVLNKTFINKEKSIETIARGFLKINDERTLITAQDWCLRTNWFKKHIEGVDCSDRCRMCEKDAETVPHILSGCKTMLRMGIYTERHNTICKLIHYRLCKLYNIDTPNNHWNYKPPAIVDNDHIQILYDFGIPTDIFVQSNRPDIVLVNKTTRTCQLIEVGVPYDENLALYEREKEIKYQRLRYAIRRMWEMEEVEVVPVVVGSLGAIKTSLVTYLQKIPAKIGTEEIAIEAIKGSLGIIRLVLGS

SEQ ID NO: 25765 - protein, 1080 aa, Trachelipus rathkii
MDHTRLQSTSEEELEIDIEHGTSPLVEAEQPTDNNDETDRESDYEMNLSWYQEHDRDLNERTINDVQPPNGDNREENAIDEQLLNKIANYREEDRVQGIEKREQVRKIKNWFMLNKVTASANRVLPRLIPPNCSLTELNRLYYATSRAVAETMGVDTVKDKKNNPNIGRKNMMPPWKIRLTNEINTLRKEIGMLTMLQNGEIIVEATKRKAQNLVNRERIRIGDKLTHALVRRKLSLTAKGKRLKRYEMREKEKKENKLFKEDQGKFYRELRNTKITVADAPKAEEVEGFWKNIYENNVSHNVDTEWLRNIKNNPEITSIRNMNSQKISIKEVKDVIKKTNNWKAPGMDKVQNIWLKKLTSLIKPLTECLNNIMDGRVDIPHWFITGETTLIPKNEETKDPSKYRPITCLPTSYKVLTGVLTQRLYKHVERNNIISEEQKGCSRHTYGTKEQLLINKMIIENSWKGQKNLCMTWIDYRKAYDSVPHSWLKEIMSIYKVDEKIKRFMERVMEMWKINLKLPHEKGIMKIKNVKVKRGIFQGDSMSPLLFVLALNPLSNLINNLENGYRINKRTEKKEKRISHLFYMDDLKLYAPSRGEAERQIKVVSDFSSDIRMDFGLEKCAFIVMNKGRKIHAENIIVNNMEIKELEQEGTYKYLGVEESDRIENKIMKERIKKEYISRVKKILKTELKPKNKIEAIKVLAMPVMRYSFGIIDWYQHEINTLDTTTRKLLHAHKIIYKNQCTARIYIPRNEGGMGMPHIDRTHKNEIVGLAEYIEGKGTKFIGWLKEHEDCKAGTTSITKKANDYLHEFNIDIRTQNGWNEKNLKERTKILKESYKVARKKADNVEWEEHRHAQHFKKEVLNKTFINKEKSIETIARGFLKINDERTLITAQDWCLRTNWFKKHIEGVDCSDRCRMCEKDAETVPHILSGCKTMLRMGIYTERHNTICKLIHYRLCKLYNIDTPNNHWNYKPPAIVDNDHIQILYDFGIPTDIFVQSNRPDIVLVNKTTRTCQLIEVGVPYDENLALYEREKEIKYQRLRYAIRRMWEMEEVEVVSVVLVPWISDYKTSLRPILQKIPC

SEQ ID NO: 25766 - protein, 1128 aa, Trachelipus rathkii
MNTELVQEIKNTKAKLYKRTKLVQGKRDAQVREGLRSQCERDNENSHRVQTSSEDETDEQEYRIELSTEVKEKKEEVRVKRHKRIKQMKMQKKLQLDDEENLLNGREMDHTRLQSTSEEELEIDIEHGTSPLVEAEQSTDNNDETDRESDYEMNLSWYQEHDRDLNERTINDVQPPNGDNREENAIDEQLLNKIANYREEDRVQGIEKREQVRKIKNWFMLNKVTASANRVLPRLIPPNCSLTELNRLYYATSRAVAETMGVDTVKDKKNNPNIGRKNMMPPWKIRLTNEINTLRKEIGMLTMLQNGEIIVEATKRKAQNLVNRERIRIGDKLTHALVRRKLSLTAKGKRLKRYEMREKEKKENKLFKEDQGKFYRELRNTKITVADAPKAEEVEGFWKNIYENNVSHNVDTEWLRNIKNNPEITSIRNMNSQKISIKEVKDVIKKTNNWKAPGMDKVQNIWLKKLTSLIKPLTECLNNIMDGRVDIPHWFITGETTLIPKNEETKDPSKYRPITCLPTSYKVLTGVLTQRLYKHVERNNIISEEQKGCSRHTYGTKEQLLINKMIIENSWKGQKNLCMTWIDYRKAYDSVPHSWLKEIMSIYKVDEKIKRFMERVMEMWKINLKLPHEKGIMKIKNVKVKRGIFQGDSMSPLLFVLALNPLSNLINNLENGYRINKRTEKKEKRISHLFYMDDLKLYAPSRGEAERQIKVVSDFSSDIRMDFGLEKCAFIVMNKGRKIHAENIIVNNMEIKELEQEGTYKYLGVEESDRIENTIMKERIKKEYISRVKKILKTELKPKNKIEAIKVLAMPVMRYSFGIIDWYQHEINTLDTTTRKLLHAHKIIYKNQCTARIYIPRNEGGMGMPHIDRTHKNEIVGLAEYIEGKGTKFIGWLKEHEDCKAGTTSITKKANDYLHEFNIDIRTQNGWNEKTLKERTKILKESYKTARKKADNGEWEEHRHAQHFKKEVLNKAFINKEKSVGTIAKGFLKLNYERTLITAQDWCLRTNWFKKHIEGVDGSDKCRMCGDDDETVPHILSGCKTLIRMGLYTERHNTVCRLIHYRLCKLYNIAYSYNNWNYNPPAIVDSDHVQILYDFGIPTDIFVPNNRPDIVLINKPTRKVGYLAWRSP

SEQ ID NO: 25767 - protein, 1104 aa, Trachelipus rathkii
MDHTRLQSTSEEELEIDIEHGTSPLVEAEQSTDNNDETDRESDYEMNLSWYQEHDRDLNERTINDVQPPNGDNREENAIDEQLLNKIANYREEDRVQGIEKREQVRKIKNWFMLNKVTASANRVLPRLIPPNCSLTELNRLYYATSRAVAETMGVDTVKDKKNNPNIGRKNMMPPWKIRLTNEINTLRKEIGMLTMLQNGEIIVEATKRKAQNLVNRERIRIGDKLTHALVRRKLSLTAKGKRLKRYEMREKEKKENKLFKEDQGKFYRELRNTKITVADAPKAEEVEGFWKNIYENNVSHNVDTEWLRNIKNNPEITSIRNMNSQKISIKEVKDVIKKTNNWKAPGMDKVQNIWLKKLTSLIKPLTECLNNIMDGRVDIPHWFITGETTLIPKNEETKDPSKYRPITCLPTSYKVLTGVLTQRLYKHVERNNIISEEQKGCSRHTYGTKEQLLINKMIIENSWKGQKNLCMTWIDYRKAYDSVPHSWLKEIMSIYKVDDKIKRFMERVMEMWKINLKLPHEKGIMKIKNVKVKRGIFQGDSMSPLLFVLALNPLSNLINNLENGYRINKRTEKKEKRISHLFYMDDLKLYAPSRGEAERQIKVVSDFSSDIRMDFGLEKCAFIVMNKGRKIHAENIIVNNMEIKELEQEGTYKYLGVEESDRIENKIMKERIKKEYISRVKKILKTELKPKNKIEAIKVLAMPVMRYSFGIIDWYQHEINTLDTTTRKLLHAHKIIYKNQCTARIYIPRNEGGMGMPHIDRTHKNEIVGLAEYIEGKGTKFIGWLKEHEDCKAGTTSITKKANDYLHEFNIDIRTQNGWNEKNLKERTKILKESYKTARKKADNAEWEEHRHAQHFKKEVLNKAFINKEKSIETIARGFLKINDERTLITAQDWCLRTNWFKKHIEGVDCSDRCRMCGESSETVPHILSGCKTLIRMGLYTERHNTVCRLIHYRLCKLYNIDTPNNHWNYKPPAIVDNDHIQILYDFGIPTDIFVQSNRPDIVLVNKTTRTCQLIEVGVPYDENVALYEREKEIKYQRLRYAIRRMWEMEEVEVVPVVVGSLGTVKTSLVTYLQKIPAKIGTEEIAIEAIRGSLGIIRLVLGI

SEQ ID NO: 25768 - protein, 1586 aa, Trachelipus rathkii
MVIYIYIYILYIYIYIYIYSPGVTDLIVGGGVLRNIWAEGWLFYHHIWGKEDHSFGQVLWSEQVTKLVITMKDETDENSCRGIGDPGAGPSLPQERYEGGRSLVRITRSLLPKARTQNVPIRAQPSRTRPPQDVLFGSPEAGPGTSEEHQNRRYYTLNKRGAEKTDWSVEEKHEIYWCSFYSRHNKFPKRHSWKRMREMLLKRGKIDRSKIEKFPDTRFNSIATNVRLGKTQITKAEMEIIEKEVEEFLEHENEEKDQNEIQGERWSWNFEANEYLMESYYIGEFIPLKKAKSEFWKYVVENAEISANDFMEYRFQKKFKNVERKAMMKQKHCILNYIKERKGGGVRKMKATLPTAEDIENIKERALRIMENELEMNTELVQEIKSTKAKLYKRTKLVQGKRDAQVREGLRSQCERDNENSHRVQTSSEDETDEQEYRIELSTEVKEKKEEVRVKRHKRIKQMKMQKKLQLDDEENLLNGREMDHTRLQSTSEEELEIDIEHGTSPLVEAEQSTDNNDETDRESDYEMNLSWYQEHDRDLNERTINDVQPPNGDNREENAIDEQLLNKIANYREEDRVQGIEKREQVRKIKNWFMLNKVTASANRVLPRLIPPNCSLTELNRLYYATSRAVAETMGVDTVKDKKNNPNIGRKNMMPPWKIRLTNEINTLRKEIGMLTMLQNGEIIVEATKRKAQNLVNRERIRIGDKLTHALVRRKLSLTAKGKRLKRYEMREKEKKENKLFKEDQGKFYRELRNTKITVADAPKAEEVEGFWKNIYENNVSHNVDTEWLRNIKNNPEITSIRNMNSQKISIKEVKDVIKKTNNWKAPGMDKVQNIWLKKLTSLIKPLTECLNNIMDGRVDIPHWFITGETTLIPKNEETKDPSKYRPITCLPTSYKVLTGVLTQRLYKHVERNNIISEEQKGCSRHTYGTKEQLLINKMIIENSWKGQKNLCMTWIDYRKAYDSVPHSWLKEIMSIYKVDDKIKRFMERVMEMWKINLKLPHEKGIMKIKNVKVKRGIFQGDSMSPLLFVLALNPLSNLINNLENGYRINKRTEKKEKRISHLFYMDDLKLYAPNRGEAERQIKVVSDFSSDIRMDFGLEKCAFIVMNKGRKIHAENIIVNNMEIKELEQEGTYKYLGVEESDRIENKIMKERIKKEYISRVKKILKTELKPKNKIEAIKVLAMPVMRYSFGIIDWYQHEINTLDTTTRKLLHAHKIIYKNQCTARIYIPRDEGGMGMPHIDRTHKNEIVGLAEYIEGKGTKFIGWLKEHEDCKAGTTSITKKANDYLREFNIDIRTQNGWNEKNLKERTKILKESYKVARKKADNVEWEEHRHAQHFKKEVLNKTFINKEKSIETIARGFLKINDERTLITAQDWCLRTNWFKKHIEGVDCSDRCRMCEKDAETVPHILSGCKTMLRMGIYTERHNTICKLIHYRLCKLYNIDTPNNHWNYKPPAIVDNDHIQILYDFGIPTDIFVQSNRPDIVLVNKTTRTCQLIEVGVPYDENLALYEREKEIKYQRLRYAIRRMWEMEEVEVVPVVVGSLGAIKTSLVTYLQKIPAKIGTEEIAIEAIKGSLGIIRLVLGS

SEQ ID NO: 25769 - protein, 1119 aa, Trachelipus rathkii
MKMQKKLQLDDEENLLNGREMDHTRLQSTSEEELEIDIEHGTSPLVEAEQSTDNNDETDRESDYEMNLSWYQEHDRDLNERTINDVQPPNGDNREENAIDEQLLNKIANYREEDRVQGIEKREQVRKIKNWFMLNKVTASANRVLPRLIPPNCSLTELNRLYYATSRAVAETMGVDTVKDKKNNPNIGRKNMMPPWKIRLTNEINTLRKEIGMLTMLQNGEIIVEATKRKAQNLVNRERIRIGDKLTHALVRRKLSLTAKGKRLKRYEMREKEKKENKLFKEDQGKFYRELRNTKITVADAPKTEEVEGFWKNIYENNVSHNVDTEWLRNIKNNPEITSIRNMNSQKISIKEVKDVIKKTNNWKAPGMDKVQNIWLKKLTSLIKPLTECLNNIMDGRVDIPHWFITGETTLIPKNEETKDPSKYRPITCLPTSYKVLTGVLTQRLYKHVERNNIISEEQKGCSRHTYGTKEQLLINKMIIENSWKGQKNLCMTWIDYRKAYDSVPHSWLKEIMSIYKVDDKIKRFMERVMEMWKINLKLPHEKGIMKIKNVKVKRGIFQGDSMSPLLFVLALNPLSNLINNLENGYRINKRTEKKEKRISHLFYMDDLKLYAPSRGEAERQIKVVSDFSSDIRMDFGLEKCAFIVMNKGRKIHAENIIVNNMEIKELEQEGTYKYLGVEESDRIENKIMKERIKKEYISRVKKILKTELKPKNKIEAIKVLAMPVMRYSFGIIDWYQHEINTLDTTTRKLLHAHKIIYKNQCTARIYIPRNEGGMGMPHIDRTHKNEIVGLAEYIEGKGTKFIGWLKEHEDCKAGTTSITKKANDYLHEFNIDIRTQNGWNEKNLKERTKILKESYKTARKKADNVEWEEHRHAQHFKKEVLNKTFINKEKSIETIARGFLKINDERTLITAQDWCLRTNWFKKHIEGVDCSDRCRMCKKDAETVPHILSGCKTMLRMGIYTERHNTICKLIHYRLCKLYNIDTPNNHWNYKPPAIVDNDHIQILYDFGIPTDIFVQSNRPDIVLVNKTTRTCQLIEVGVPYDENLALYEREKEIKYQRLRYAIRRMWEMEEVEVVPVVVGSLGAIKTSLVTYLQKIPAKIGTEEIAIEAIKRKPRNIS

SEQ ID NO: 25770 - protein, 1104 aa, Trachelipus rathkii
MDHTRLQSTSEEELEIDIEHGTSPLVEAEQPTDNNDETDRESDYEMNLSWYQEHDRDLNERTINDVQPPNGDNREENAIDEQLLNKIANYREEDRVQGIEKREQVRKIKNWFMLNKVTASANRVLPRLIPPNCSLTELNRLYYATSRAVAETMGVDTVKDKKNNPNIGRKNMMPPWKIRLTNEINTLRKEIGMLTMLQNGEIIVEATKRKAQNLVNRERIRIGDKLTHALVRRKLSLTAKGKRLKRYEMREKEKKENKLFKEDQGKFYRELRNTKITVADAPKAEEVEGFWKNIYENNVSHNVDTEWLRNIKNNPEITSIRNMNSQKISIKEVKDVIKKTNNWKAPGMDKVQNIWLKKLTSLIKPLTECLNNIMDGRVDIPHWFITGETTLIPKNEETKDPSKYRPITCLPTSYKVLTGVLTQRLYKHVERNNIISEEQKGCSRHTYGTKEQLLINKMIIENSWKGQKNLCMTWIDYRKAYDSVPHSWLKEIMSIYKVDDKIKRFMERVMEMWKINLKLPHEKGIMKIKNVKVKRGIFQGDSMSPLLFVLALNPLSNLINNLENGYRINKRTEKKEKRISHLFYMDDLKLYAPSRGEAERQIKVVSDFSSDIRMDFGLEKCACIVMNKGRKIHAENIIVNNMEIKELEQEGTYKYLGVEESDRIENKIMKERIKKEYISRVKKILKTELKPKNKIEAIKVLAMPVMRYSFGIIDWYQHEINTLDTTTRKLLHAHKIIYKNQCTARIYIPRNEGGMGMPHIDRTHKNEIVGLAEYIEGKGTKFIGWLKEHEDCKAGTTSITKKANDYLHEFNIDIRTQNGWNEKNLKERTKILKESYKVARKKADNVEWEEHRHAQHFKKEVLNKTFINKEKSIETIARGFLKINDERTLITAQDWCLRTNWFKKHIEGVDCSDRCRMCEKDAETVPHILSGCKTMLRMGIYTERHNTICKLIHYRLCKLYNIDTPNNHWNYKPPAIVDNDHIQILYDFGIPTDIFVQSNRPDIVLVNKTTRTCQLIEVGVPYDENLALYEREKEIKYQRLRYAIRRMWEMEEVEVVPVVVGSLGAIKTSLVTYLQKIPAKIGTEEIAIEAIKGSLGIIRLVLGS

SEQ ID NO: 25771 - protein, 1588 aa, Trachelipus rathkii
MGSRKKGKIFFNSPHVSSNHINPGVTDLIVGGGVLRNIWAEGWLFYHHIWGKEDHSFGQVLWSEQVTKLVITMKDETDENSCRGIGDPGAGPSLPQERYEGGRSLVRITRSLLPKARTQNVPTRAQPSRTRPPQDVLFGSPEAGPSTSEEHQNRRYYTLNKRGAEKTDWSVEEKHEIYWCSFYSRHNKFPKRHSWKRMREMLLKRGKIDRSKIEKFPDTRFNSIATNVRLGKTQITKAEMEIIEKEVEEFLEHENEEKDQNEIQGERWSWNFEANEYLMESYYIGEFIPLKKAKSEFWKYVVENAEISANDFMEYRFQKKFKNVERKAMMKQKHCILNYIKERKGGGVRKMKATLPTAEDIENIKERALRIMENELEMNTELVQEIKSTKAKLYKRTKLVQGKRDAQVREGLRSQCERDNENSHRVQTSSEDETDEQEYRIELSTEVKEKKEEVRVKRHKRIKQMKMQKKLQLDDEENLLNGREMDHTRLQSTSEEELEIDIEHGTSPLVEAEQSTDNNDETDRESDYEMNLSWYQEHDRDLNERTINDVQPPNGDNREENAIDEQLLNKIANYREEDRVQGIEKREQVRKIKNWFMLNKVTASANRVLPRLIPPNCSLTELNRLYYATSRAVAETMGVDIVKDKKNNPNKGRKNRMPPWKFRLTNEINTLRKEIGMLTMLQNGEIIVEATKRKAQNLVNRERIRIGDKLTHALVRRKLTLAAKGKRLKRYEMREKGKKENKLFKEDQGKFYRELRNTKITVADAPKAEEVEGFWKNIYENNVSHNVDTEWLRNIKNNPEITSIRNMNSQKISIKEVKDVIKKTNNWKAPGMDKVQNIWLKKLTSLIKPLTECLNNIMDGRVDIPHWFITGETTLIPKNEETKDPSKYRPITCLPTSYKVLTGVLTQRLYKHVERNNIISEEQKGCSRHTYGTKEQLLINKMIIENSWKGQKNLCMTWIDYRKAYDSVPHSWLKEIMSIYKVDDKIKRFMERVMEMWKINLKLPHEKGIMKIKNVKVKRGIFQGDSMSPLLFVLALNPLSNLINNLENGYRINKRTEKKEKRISHLFYMDDLKLYAPSRGEAERQIKVVSDFSSDIRMDFGLEKCAFIVMNKGRKIHAENIIVNNMEIKELEQEGTYKYLGVEESDRIENKIMKERIKKEYISRVKKILKTELKPKNKIEAIKVLAMPVMRYSFGIIDWYQHEINTLDTTTRKLLHAHKIIYKNQCTARIYIPRNEGGMGMPHIDRTHKNEIVGLAEYIEGKGTKFIGWLKEHEDCKAGTTSITKKANDYLHEFNIDIRTQNGWNEKNLKERTKILKESYKTARKKADNVEWEEHRHAQHFKKEVLNKAFINKEKSIETIARGFLKINDERTLITAQDWCLRTNWFKKHIEGVDCSDRCRMCGESSETVPHILSGCKTLIRMGLYTERHNTVCRLIHYRLCKLYNIDTPNNHWNYKPPAIVDNDHIQILYDFGIPTDIFVQSNRPDIVLVNKTTRTCQLIEVGVPYDENVALYEREKEIKYQRLRYAIRRMWEMEEVEVVPVVVGSLGTVKTSLVTYLQKIPAKIGTEEIAMEAIRGSLGIIRLVLGI

SEQ ID NO: 25772 - protein, 1209 aa, Trachelipus rathkii
MESYYIGEFIPLKKAKSEFWKYVVENAEISANDFMEYRFKKKFKNVERKAMMKQKHCILNYIKERKGGVRKMKATLPTAEDIENIKERALRIMENELEMNTELVQEIKSTKAKLYKRTKLVQGKRDAQVGEGLRSQCERDNENSHRVQTSSEDETDEQEYRIELSTEVKEKKEEVRVKRHKRIKQMKMQKKLQLDDEENLLNGREMDHTRLQSTSEEELEIDIEHGTSPLVEAEQSTDNNDETDRESDYEMNLSWYQEHDRDLNERTINDVQPPNGDNREENAIDEQLLNKIANYREEDRVQGIEKREQVRKIKNWFMLNKVTASANRVLPRLIPPNCSLTELNRLYYATSRAVAETMGVDTVKDKKNNPNIGRKNMMPPWKIRLTNEINTLRKEIGMLTMLQNGEIIIEATKRKAQNLVNRERIRIGDKLTHALVRRKLSLTAKGKRLKRYEMREKEKKENKLFKEDQGKFYRELRNTKITVADAPKTEEVEGFWKNIYENNVSHNVDTEWLRNIKNNPEITSIRNMNSQKISIKEVKDVIKKTNNWKAPGMDKVQNIWLKKLTSLIKPLTECLNNIMDGRVDIPHWFITGETTLIPKNEETKDPSKYRPITCLPTSYKVLTGVLTQRLYKHVERNNIISEEQKGCSRHTYGTKEQLLINKMIIENSWKGQKNLCMTWIDYRKAYDSVPHSWLKEIMSIYKVDEKIKRFMERVMEMWKINLKLPHEKGIMKIKNVKVKRGIFQGDSMSPLLFVLALNPLSNLINNLENGYRINKRTEKKEKRISHLFYMDDLKLYAPSRGEAERQIKVVSDFSADIRMDFGLEKCAFIVMNKGRKIHAENIIVNNMEIKELEQEGTYKYLGVEESDRIENKIMKERIKKEYISRVKKILKTELKPKNKIEAIKVLAMPVMRYSFGIIDWYQHEINTLDTTTRKLLHAHKIIYKNQCTARIYIPRNEGGMGMPHIDRTHKNEIVGLAEYIEGKGTKFIGWLKEHEDCKAGTTSITKKANDYLREFNIDIRTQNGWNEKNLKERTKILKESYKVARKKADNVEWEEHRHAQHFKKEVLNKAFINKEKSIETIARGFLKINDERTLITAQDWCLRTNWFKKHIEGVDCSDRCRMCEKDAETVPHILSGCKTMLRMGIYTERHNTICKLIHYRLCKLYNIDTPNNHWNYKPPAIVDNDHIQILYDFAYPPTYCYKVIEPILY

SEQ ID NO: 25773 - protein, 1098 aa, Trachelipus rathkii
MADVELSTEVKEKKKEVRVKRHKRIKQMKMQKKLQLDDEENLLNGREMDHTRLQSTSEEELEIDIEHGTSPLVEAEQSTDNNDETDRESDYEMNLSWYQEHDRDLNERTINDVQPPNGDNREENAIDEQLLNKIANYREEDRVQGIEKREQVRKIKNWFMLNKVTASANRVLPRLIPPNCSLTELNRLYYATSRAVAETMGVDTVKDKKNNPNIGRKNMMPPWKIRLTNEINTLRKEIGMLTMLQNGEIIIEATKRKAQNLVNRERIRIGDKLTHALVRRKLSLTAKGKRLKRYEMREKEKKENKLFKEDQGKFYRELRNTKITVADAPKTEEVEGFWKNIYENNVSHNVDTEWLRNIKNNPEITSIRNMNSQKISIKEVKDVIKKTNNWKAPGMDKVQNIWLKKLTSLIKPLTECLNNIMDGRVDIPHWFITGETTLIPKNEETKDPSKYRPITCLPTSYKVLTGVLTQRLYKHVERNNIISEEQKGCSRHTYGTKEQLLINKMIIENSWKGQKNLCMTWIDYRKAYDSVPHSWLKEIMSIYKVDEKIKRFMERVMEMWKINLKLPHEKGIMKIKNVKVKRGIFQGDSMSPLLFVLALNPLSNLINNLENGYRINKRTEKKEKRISHLFYMDDLKLYAPSRGEAERQIKVVSDFSADIRMDFGLEKCAFIVMNKGRKIHAENIIVNNMEIKELEQEGTYKYLGVEESDRIENKIMKERIKKEYISRVKKILKTELKPKNKIEAIKVLAMPVMRYSFGIIDWYQHEINTLDTTTRKLLHAHKIIYKNQCTARIYIPRDEGGMGMPHIDRTHKNEIVGLAEYIEGKGTKFIGWLKEHEDCKAGTTSITKKANDYLHEFNIDIRTQNGWNEKNLKERTKILKESYKVARKKADNVEWEEHRHAQHFKKEVLNKTFINKEKSIETIARGFLKINDERTLITAQDWCLRTNWFKKHIEGVDCSDRCRMCEKDAETVPHILSGCKTMLRMGIYTERHNTICKLIHYRLCKLYNIDTPNNHWNYKPPAIVDNDHIQILYDFGIPTDIFVQSNRPDIVLVNKTTRTCQLIEVGVPYDENCLLQVEKRNNDTARHDKFQKMDDIWR

SEQ ID NO: 25774 - protein, 992 aa, Trachelipus rathkii
MLNKVTASANRVLPRLIPPNCSLTELNRLYYATSRAVAETMGVDTVKDKKNNPNIGRKNMMPPWKIRLTNEINTLRKEIGMLTMLQNGEIIVEATKRKAQNLVNRERIRIGDKLTHALVRRKLSLTAKGKRLKRYEMREKEKKENKLFKEDQGKFYRELRNTKITVADAPKAEEVEGFWKNIYENNVSHNVDTEWLRNIKNNPEITSIRNMNSQKISIKEVKDVIKKTNNWKAPGMDKVQNIWLKKLTSLIKPLTECLNNIMDGRVDIPHWFITGETTLIPKNEETKDPSKYRPITCLPTSYKVLTGVLTQRLYKHVERNNIISEEQKGCSRHTYGTKEQLLINKMIIENSWKGQKNLCMTWIDYRKAYDSVPHSWLKEIMSIYKVDDKIKRFMERVMEMWKINLKLPHEKGIMKIKNVKVKRGIFQGDSMSPLLFVLALNPLSNLINNLENGYRINKRTEKKEKRISHLFYMDDLKLYAPSRGEAERQIKVVSDFSSDIRMDFGLEKCAFIVMNKGRKIHAENIIVNNMEIKELEQEGTYKYLGVEESDRIENTIMKERIKKEYISRVKKILKTELKPKNKIEAIKVLAMPVMRYSFGIIDWYQHEINTLDTTTRKLLHAHKIIYKNQCTARIYIPRNEGGMGMPHIDRTHKNEIVGLAEYIEGKGTKFIGWLKEHEDCKAGTTSITKKANDYLHEFNIDIRTQNGWNEKNLKERTKILKESYKVARKKADNVEWEEHRHAQHFKKEVLNKTFINKEKSIETIARGFLKINDERTLITAQDWCLRTNWFKKHIEGVDCSDRCRMCEKDAETVPHILSGCKTMLRMGIYTERHNTICKLIHYRLCKLYNIDTPNNHWNYKPPAIVDNDHIQILYDFGIPTDIFVQSNRPDIVLVNKTTRTCQLIEVGVPYDENLALYEREKEIKYQRLRYAIRRMWEMEEVEVVPVVVGSLGAIKTSLVTYLQKIPAKIGTEEIAIEAIKGSLGIIRLVLGS

SEQ ID NO: 25775 - protein, 1515 aa, Trachelipus rathkii
MKDETDENSCRGIGDPGAGPSLPQERYEGGRSLVRITRSLLPKARTQNVPIRAQPSRTRPPQDVLFGSPKAGPGTSEEHQNRRYYTLNKRGAEKTDWSVEEKHEIYWCSFYSRHNKFPKRHSWKRMREMLLKRGKIDRSKIEKFPDTRFNSIATNVRLGKTQITKAEMEIIEKEVEEFLEHENEEKDQNEIQGERWSWNFEANEYLMESYYIGEFIPLKKAKSEFWKYVVENAEISANDFMEYRFKKKFKNVERKAMMKQKQCILNYIKERKGGGVRKMKATLPTAEDIENIKERALRIMENELEMNTELVQEIKSTKAKLYKRTKLVQGKRDAQVREGLRSQCERDNENSHRVQTSSEDETDEQEYRIELSTEVKEKKEVRVKRHKRIKQMKMQKKLQLDDEENLLNGREMDHTRLQSTSEEELEIDIEHGTSPLVEAEQSTDNNDETDRESDYEMNLSWYQEHDRDLNERTINDVQPPNGDNREENAIDEQLLNKIANYREEDRVQGIEKREQVRKIKNWFMLNKVTASANRVLPRLIPPNCSLTELNRLYYATSRAVAETMGVDTVKDKKNNPNIGRKNMMPPWKIRLTNEINTLRKEIGMLTMLQNGEIIIEATKRKAQNLVNRERIRIGDKLTHALVRRKLSLTAKGKRLKRYEMREKEKKENKLFKEDQGKFYRELRNTKITVADAPKTEEVEGFWKNIYENNVSHNVDTEWLRNIKNNPEITSIRNMNSQKISIKEVKDVIKKTNNWKASGMDKVQNIWLKKLTSLIKPLTECLNNIMDGRVDIPHWFITGETTLIPKNEETKDPSKYRPITCLPTSYKVLTGVLTQRLYKHVERNNIISEEQKGCSRHTYGTKEQLLINKMISENSWKGQKNLCMTWIDYRKAYDSVPHSWLKEIMSIYKVDEKIKRFMERVMEMWKINLKLPHEKGIMKIKNVKVKRGIFQGDSMSPLLFVLALNPLSNLINNLENGYRINKRTEKKEKRISHLFYMDDLKLYAPSRGEAERQIKVVSDFSADIRMDFGLEKCAFIVMNKGRKIHAENIIVNNMEIKELEQEATYKYLGVEESDRIENKIMKERIKKEYISRVKKILKTELKPKNKIEAIKVLAMPVMRYSFGIIDWYQHEINTLDTTTRKLLHAHKIIYKNQCTARIYIPRDEGGMGMPHIDRTHKNEIVGLAEYIEGKGTKFIGWLKEHEDCKAGTTSITKKANDYLREFNIDIRTQNGWNEKNLKERTKILKESYKVARKKADNVEWEEHRHAQHFKKEVLNKTFINKEKSIETIARGFLKINDERTLITAQDWCLRTNWFKKHIEGVDCSDRCRMCEKDAETVPHILSGCKTMLRMGIYTERHNTICKLIHYRLCKLYNIDTPNNHWNYKPPAIVDNDHIQILYDFGIPTDIFVQSNRPDIVLVNKTTRTCQLIEVGVPYDENLALYEREKEIKYQTLRYAIRRMWEMEEVEVVPVVVGSLGAIKTSLVTYLQKIPAKIGTEEIAIEAIKGSLGIIRLVLGS

SEQ ID NO: 25776 - protein, 946 aa, Trachelipus rathkii
MLNKVTASANRVLPRLIPPNCSLTELNRLYYATSRAVAETMGVDIVKDKKNNPNIGRKNMMPPWKIRLTNEINTLRKEIGMLTMLQNGEIIVEAAKRKAQNLVNRERIRIGDKLTHALVRRKLSLTAKGKRLKRYEMREKEKKENKLFKEDQGKFYRELRNTKITVADAPKAEEVEGFWKNIYENNVSHNVDTEWLRNIKNNPEITSIRNMNSQKISIKEVKDVIKKTNNWKAPGMDKVQNIWLKKLTSLIKPLTECLNNIMDGRVDIPHWFITGETTLIPKNEETKDPSKYRPITCLPTSYKVLTGVLTQRLYKHVERNNIISEEQKGCSRHTYGTKEQLLINKMIIENSWKGQKNLCMTWIDYRKAYDSVPHSWLKEIMSIYKVDEKIKRFMERVMEMWKINLKLPHEKGIMKIKNVKVKRGIFQGDSMSPLLFVLALNPLSNLINNLENGYRINKRTEKKEKRISHLFYMDDLKLYAPSRGEAERQIKVVSDFSSDIRMDFGLEKCAFIVMNKGRKIHAENIIVNNMEIKELEQEGTYKYLGVEESDRIENTIMKERIKKEYISRVKKILKTELKPKNKIEAIKVLAMPVMRYSFGIIDWYQHEINTLDTTTRKLLHAHKIIYKNQCTARIYIPRDEGGMGMPHIDRTHKNEIVGLAEYIEGKGTKFIGWLKEHEDCKAGTTSITKKANDYLHEFNIDIRTQNGWNEKNLKERTKILKESYKAARKKADNVEWEEHRHAQHFKKEVLNKAFINKEKSIETIARGFLKINDERTLITAQDWCLRTNWFKKHIEGVDCSDRCRMCGESSETVPHILSGCKTLLRMGLYTERHNTICKLIHYRLCKLYNIDTPNNHWNYKPPAIVDNDHIQILYDFGIPTDIFVQSNRPDIVLVNKTTRTCQLIEVGVPYDEKVALYEREKEIKYQRLRYAIRRMWRWMRWSSANW

SEQ ID NO: 25777 - protein, 992 aa, Trachelipus rathkii
MLNKVTASANRVLPRLIPPNCSLTELNRLYYATSRAVAETMGVDTVKDKKNNPNIGRKNMMPPWKIRLTNEINTLRKEIGMLTMLQNGEIIVETTKRKAQNLVNRERIRIGDKLTHALVRRKLSLTAKGKRLKRYEMREKEKKENKLFKEDQGKFYRELRNTKITVADAPKAEEVEGFWKNIYENNVSHNVDTEWLRNIKNNPEITSIRNMNSQKISIKEVKDVIKKTNNWKAPGMDKVQNIWLKKLTSLIKPLTECLNNIMDGRVDIPHWFITGETTLIPKNEETKDPSKYRPITCLPTSYKVLTGVLTQRLYKHVERNNIISEEQKGCSRHTYGTKEQLLINKMIIENSWKGQKNLCMTWIDYRKAYDSVPHSWLKEIMSIYKVDDKIKRFMERVMEMWKINLKLPHEKGIMKIKNVKVKRGIFQGDSMSPLLFVLALNPLSNLINNLENGYRINKRTEKKEKRISHLFYMDDLKLYAPSRGEAERQIKVVSDFSSDIRMDFGLEKCAFIVMNKGRKIHAENIIVNNMEIKELEQEGTYKYLGVEESDRIENKIMKERIKKEYISRVKKILKTELKPKNKIEAIKVLAMPVMRYSFGIIDWYQHEINTLDTTTRKLLHAHKIIYKNQCTARIYIPRNEGGMGMPHIDRTHKNEIVGLAEYIEGKGTKFIGWLKEHEDCKAGTTSITKKANDYLHEFNIDIRTQNGWNEKNLKERTKILKESYKTARKKGDNAEWEEHRHAQHFKKEVLNKAFINKEKSIETIARGFLKINDERTLITAQDWCLRTNWFKKHIEGVDCSDRCRMCGESSETVPHILSGCKTLIRMGLYTERHNTVCRLIHYRLCKLYNIDTPNNHWNYKPPAIVDNDHIQILYDFGIPTDIFVQSNRPDIVLVNKTTRTCQLIEVGVPYDENVALYEREKEIKYQRLRYAIRRMWEMEEVEVVPVVVGSLGTVKTSLVTYLQKIPAKIGTEEIAMEAIRGSLGIIRLVLGI

SEQ ID NO: 25778 - protein, 992 aa, Trachelipus rathkii
MLNKVTASANRVLPRLIPPNCSLTELNRLYYATSRAVAETMGVDTVKDKKNNPNIGRKNMMPPWKIRLTNEINTLRKEIGMLTMLQNGEIIVEATKRKAQKLVNRERIRIGDKLTHALVRRKLSLTAKGKRLKRYEMREKEKKENKLFKEDQGKFYRELRNTKITVADAPKAEEVEGFWKNIYENNVSHNVDTEWLRNIKNNPEITSIRNMNSQKISIKEVKDVIKKTNNWKAPGMDKVQNIWLKKLTSLIKPLTECLNNIMDGRVDIPHWFITGETTLIPKNEETKDPSKYRPITCLPTSYKVLTGVLTQRLYKHVERNNIISEEQKGCSRHTYGTKEQLLINKMIIENSWKGQKNLCMTWIDYRKAYDSVPHSWLKEIMSIYKVDEKIKRFMERVMEMWKINLKLPHEKGIMKIKNVKVKRGIFQGDSMSPLLFVLALNPLSNLINNLENGYRINKRTEKKEKRISHLFYMDDLKLYAPSRGEAERQIKVVSDFSSDIRMDFGLEKCAFIVMNKGRKIHAENIIVNNMEIKKLEQEGTYKYLGVEESDRIENTIMKERIKKEYISRVKKILKTELKPKNKIEAIKVLAMPVMRYSFGIVDWYQHEINTLNTTTRKLLHAHKIIYKNQCTARIYIPRDEGGMGMPHIDRTHKNEIVGLAEYIEGKGTKFIGWLKEHEDCKAGTTSITKKANDYLHEFNIDIRTQNGWNEKNLKERTKILKESYKTARKKADNAEWEEHRHAQHFKKEVLNKAFINKEKSIETVARGFLKINDERTLITAQDWCLRTNWFKKHIEGVDCSDRCRMCGESSETVPHILSGCKTLIRMGLYTERHNTICRLIHYRLCKLYNIDTPNNHWNYKPPAIVDNDHIQILYDFGIPTDIFVQSNRPDIVLVNKTTRTCQLIEVGVPYDENVALYEREKEIKYQRLRYAIRRMWEMEEVEVVPVVVGSLGAVKTSLVTYLQKIPAKIGTEEIAIEAIRGSLGIIRLVLGI

SEQ ID NO: 25779 - protein, 1026 aa, Lytechinus pictus
MSKRPKVKWPNSTSKDMWEAMDGQLDKILVESMKGNAEERLSSMMEAIYQYRVDNFGCASTKPQAVTSRLSRRQQEIHDIRHSVRALQRRWKEARKNNNAIEMKALDDLRDEQRRRLRALSKAEKLRRKRKGRAKKLQKFYEDPFAFTKALFNPVRSGELKATKEELQHHLKNTYSDGVRNLPLPPMENLVRPTSPGENFDIDPPRLSEVERFVKKARAGSSPGPNGVPYKVFKYCTRMRRLLWRLLRVLWRNNVVPKEWNKAEGVYIPKEKNAERIESFRPISLLNIDGKIMMGILAGRLSKYLLVNGFVDTSVQKAGVPGFSGCIEHSAMIWHTIQEAKRRRMDLSVLWLDLANAYGSLPHSMIWFTLDFFYIPEKLGDFLKCYFQDFKMRFSTKEYTTAYQPLEVGIPMGCAISPILFVMAMEVITRAASSSCRGVEIEPGLELPPIRAFMDDLTLLNPCTADAQKVLERLGQLISWCRMKFKPRKSRSLTMKKGKLDDRTHYTVGGEAIPSISDAPVKSLGRWFTKELSDKNQINEIRTMVEDGLKRIDKCTLPNKLKLWCLKFGLFPRIMWPLMMYEIAMTHVERMEQRISVHIRKWLGIPPCTTNISFYGHSTKLKLPLSALTEEFKVKKAHMYSTLRDSSDQVVRGTVPDIRTGRKWNAQQEVEEMESRLRHNDMVGPTQTNRAGLGMNPTQYFFKASTKMKRKMVSDEIRHKEEERRVAKAVGLVQQGAWCRWECVEPRSLSWKDIWKMESGTLKFLLRATYDVLPSPHNLKKWAKTENENCHRCGKKGSLRHILSNCQVSLVEVLYTWRHNDILKELSNALKITIEKANQTKPLKAPAMISFVKAGTSTGANRKARQHTSRLLCLARDWQLVSDLDEQMTFPSEIATTNMRPDMVVWSKQSKSVILCELTVPWEENIETAHEYKTSKYAGLILECKERGWKVDYYPVEIGCRGYATKSLHFFLSRMGTTNRRKLALDLMEIATRSSAWIWNKYKANLPNKQLEVASCLDAAGPPPAT

SEQ ID NO: 25780 - protein, 1014 aa, Ceratina australensis
MTKTRVVATATARPALSPQPGPSSASDPASFACMFPGCTRTFSTKIGRGVHQRSAHPDWTDDANRAVAVRARWSEEELSLLAQREAELTVSGVRFLNQALSGFLPGRSLEAVKSARKRTDYRALVGQHIDRIRLPSVSSVVVDEEREAEGDDSDPALLEYFTNLAPLSIESFKASVLDSICSHVGQEDRAVTLGKLTSYLVEVFPPPKKRAPHQRRRNSSTQQLSRRKQRRVDYGRVQKLWRRDPGRCYNVIRDGPVESHSLPKDVMVPYWEALMTSSSDSSPPSAEQEETINSLWAPVTPEEVRSALPEMRTAAGPDGLSARILRRTPLGVLERIYNLFMWCRRLPIHLREARTVLIPKNRQPSSPSDFRPITVASTLVRGFHKVLALRMARSISLDERQRAFRATDGCADNVFLLDLVLRYAHSRLKNLYVASIDVAKAFDTVSHSVIMQTLASRGCPKSMVEYVKSVYSDATTIITADRWRSHSIHPTHGVRQGDPMSPYIFNMVVDKLLRSLPQNIGANIDGVKVSASAFADDLILVASTTTGLQQLLDHTDSFLASCGMNINVGKSFTISIGTVPHLKKTTVDMGNFTIRGQKLLSMKRTDSWKYLGVPFTPQGRLKFDPLIQLTGDLEKLSHAPLKPQQRLFCLRIFLLPGLYYAASLGTVRIGALNRCDREVRKYVRKWLDLPADTPKAYFHSDVEVGGLGITSLRWTIPRMRLNRLNNLSLSADAQSGQSGEYLRFEISRAREHLLDHGEVIDTTRKEARRWTESLYGSVDGSALKESKKVPGQHRWVREGTRFLSGRDFVNSCKLRINALPTKSRTSRGRRQDRLCRGGCQVPETLNHILQQCHRTHDMRIKRHDAVVSYLARGLEQRGFQVTREPKYNTDEGVRKPDLVVTKDTKAVVIDAQVVSEQSDLDLAHKRKVNYYANNSSLQRAIVRNHGAVEVDFLSATLSWRGLWSGKSVRKLLATDMIGKKDIKVVSSRVLVGGLAAWNTFNRRTSVRFDRIGVG

SEQ ID NO: 25781 - protein, 1014 aa, Ceratina japonica
MKKTREVATATARPTQPPQPGPSSAPDNVNFPCNFPSCSRTFPTKIGRGVHQRSAHPDWTDDANRTAAVKARWTEEELSLLAQREAELSTTGVRFINQALVGFLPGRSLEAIKSARKQPNYRALVIQHVDRMRQPEQSIVREEDNIEEEMDVCDSALLEYFGSLSPLGIESFKAAILDAICSSVGREDRAVTLGKLTSYLADVFPRPRTRAPRPRPRALTTEQLSRRKQRRIDYGRMQKLWRRDPGRCYNAIRDGPIATQSLPKEVMVPYWENLMTNASDSSPPPAERDDVITSLWMPVSLEEVRNAMPEMKTAAGPDGLSARLIRKVPCEVLQRIYNVLLWCRRLPVHLRDARTVLIPKNRQPSGPSEYRPITVASTLVRGFHKVLTLRMSRTISLDERQRAFRATDGCADNVFLLDIMLRYAHSRYKPLHIASIDVAKAFDTVSHAVIIQTLEVRGCPKPMVEYVKSVYSDASTVIVADGWRSHSIRPSHGVRQGDPMSPYIFNMIIDRLLKSLPQDIGANIDGVKISASAFADDLILAASTSVGLQQLLDHTEKFLSSCGMNINVGKSFTVTIGTVPHLKKTTVDVGYFTLGGQRLVAMKRTDTWKYLGVSFTPDGRLRSNPMAQLTADLEKLSHAPLKPQQRLFALRVYLLPGLYHATSLGAVRVGVLNKCDREVRKYVRKWLNLPADTPTAYFHSGIDLGGLGITSLRWSIPRIRLNRLKNLSLSSEAQTSQSGEYLRQETTKALKQLLDHGEVLDTPQKEARRWAEALYSSVDGGALKESKKVPGQNRWIREGTRFLTGRDFINSCRLRINALPTRSRTSRGRRLDRLCRAGCRVPETLNHILQVCHRTHDMRIKRHDAIVSYLARGLEQDGFNVTKEPKYQTDEGVRKPDIIAVKNNVCSVIDAQVVSEQSALDLLHKRKVSYYAENRSLRRAIAHSTGAEEIKFYSATLSWRGLWSAKSSKQLLEASLMRHRDIKVISSRVLVGGLAAWNIFNRRTSVRFDRVGVG

SEQ ID NO: 25782 - protein, 1076 aa, Dasypogon diadema
MPRTADPAQTNSNSHSDGPTSVAQSAQRDQSSSSNAAQQHRDHTVPRSPPVSPERADPLPEHRCPDCSRAFASSIGLGVHRRRVHPDQANAEVNVQRVKRRWGDEELRLMAREEASALARGVRLMNQHLVTMFADRTLESIKGVRRRADYKEMVEATSRELAANVASSSSSRDPSISEDSDSLPPHRQSPVPSITSADNSIRTAIQDLIPVVRDIAGFRAHRLIEIAQRCLNGFNVAGDCCTWIREVFPPRTNTARRPLGTLDEDNPLPVRISRKRQRRRDYAKMQELFKSNMSRAAKAILDGPAGSGWAPDIQSMTGFWEPILTQPSTVVPQNVGTRPCPALDCIWCPVTCNEITSVNASLTSAPGPDGITTRQWRAVPPPIRALFYNIVLAVGGFPSDLLLSRTVFVPKKAETATPADFRPISIASVVVRQLHKILAKRLRDANIIDARQRCLEDGCAENITVLAALLDDSRKHLKELHICSLDLAKAFDSVSHEAISAVLGRAGLPVDFVNYVARCYSNCNTVFEVAAGRSAAISITRGVRQGDPLSTIIFCLVVDEILACVSPDVGYRIEGVPSINALAYADDILLVSSSRLGMASSLGTVEAKAREYGLLFNANKCVALSIVPAGKQKKYKVLSDPQFKLAGGSFLPQLSSSDEWRYLGVDIRPVGQKRASSDLAPALDRITKAPLKPQQRLKILRCFLVPRYYHRLVLSKTTLGQLRSMDKQVRLAVRKWLRLPKDIPIGYFHSSVKSGGLGIPSFTTAVPGLLYDRLTAMAHSSSPVVRSMIGTEWVISKLDWCRHALTKEGEHLFTKERRDRWWSGYLYRSVDGKELQEAGKSSLSTWWVDAGSYGVPGRDYVQYHHVRVNCLPTRIRTSRGARRAGMEVQCRAGCQATETAAHVIQACHRTHGGRVKRHNAVCKVLASGLTSARFDVHQEPHFRTSAGLRKPDLIAVREGNAIVIDAQVVSGSASLDQAHNRKVSYYSENNELTNAIALKYGVNNTNVKYTSCTISWRGIWASGSAEFLLGMKLPRKLLAGITTRVLQGSSTNWNRWNKMTGLVYSSRQERPRTGVG

SEQ ID NO: 25783 - protein, 1232 aa, Cettia cetti
MVQALRLFHVSTATQTNPADWLEVQAPNSHPILSNVGTGPIQIVRLEFCNSAEKVGDGLGGCLVWEGLSNYPDVYEGLLLSPGTTSSRKQKEKTPQADKRTKSPVTANWSDPPIVKVPGRNPPCPCCGVRTNRMFGLIDHMLRAHGVKDILFECTKCGKRNTKFHSVACHYAKCAGKIEEPPPGEWECEVCLLRFKSKIGLGQHKRWEHPVVRNEERITASHPKESSKRGAHKKCWTLGEEDLLVELIQKYAGHKNINKMLADHFPSKTAKQISDKRRCLSQKQRVPVVTPTETSEERTLLEDNTGEEPETTVPSDLKRHYHEVIASSLDEGKVSVYLEAFQGILNDQDPTPKIKEVTNDCVETFAVTHKLEENAKKSKQRKKQVSRTVKKGRPTKWMKRRAVKRGHFLRFQKLFGTDRRKLARIILDDIEALKCEIPSEEVNKVFKERWETPGIFKGFGKFKARQGADNSKFRALITEKEVEKNIKEMAKKSAPGMDGITIPDLRKEDLDLLTAIFNLWLVSATIPDNVKSCRTVLLPKSNQPDRLKDLNNWRPITIGSVILRLFSRIMTARLEKACPIHPRQKGFTMAAGCSENLKLLQLLIKTAKKDHREIAVVFVDIAKAFDTVSHQHIVMSLRQRNVDDHIISLIVNMYENTTTEITTTGEKSAPIKILKGVKQGDPMSPLLFNLALDPLLCRLERKGVGFHQGPHKVAAMAFADDLVLVSDSWEGMTQNIKILEKFCDRTGLRTQGEKCHGIYIKPTKDSYTINDCPPWTINGTALKMIPPGETEKYLGLQIDPWVGIAKANLTSKVDTWLQRLGNAPLKPLQKLDILKVFTIPRLYYLADHTDTPVGLLESVDLQVRSQVKDWLHLPPTTCDALFYSSTRDGGLGLTRLAELIPSIQARRLHRLAQSSDEMLKYLLKEDGVESKYARLWVKAGGDKEKMPSVWKTRPLLVMRGTSRKEKLTEWEIPRPKWIYPKPCDWRQKEFQKWKTLVSQGKGIEHFENDNISNDWITRYSNIPQRKLLTALQLRANVYPTREFLARGRQELCIKTCRHCSASNETCSHIIGKCPVTQEARIKRHNDICDILVREAQKEDWTVFQEPHIRDTTGRLFKPDLVFVKEDQAYVVDVTVRFERRDNSLEKAALEKVKKYKHLHQEIQNITNAAKVAFIGFPIGARGKWRSANSTLLENLGLPKARRERVSRTLTRRALLSSVDIVHMFASKSRQPG

SEQ ID NO: 25784 - protein, 868 aa, Alaudala cheleensis
METFRVVQTVAKASKPSKKRKSHPKKGHSKNWMKKRAVQKGKYLRYQKLYYIDRGKLARMILDDIEALKCEIPSAEVNSTFKDRWETPGEFNRFGKFKIKQVTDNSKFTTLITAKEIQKNLEEMDKRSAPGPDNITIPDILRADPKFELLTELFNLWLITGTIPDSLKECRTVLLPKSNQPDRLKDINNWRPITIGSVIPRLFSRIMTARLEKACPINPRQKGFTRAAGCSENLKLLQLLMRNAKKEHKELAVVFVDIAKAFDTVSHKHIISCLKKRKVDEHIIHLIQNMYENASTRITTKKEVSDPIKILKGVKQGDPMSPLLFNLAMDPLLCRLERKGQGYQHEKFQVTAMAFADDLVLLSNSWEGMNHNIKILEAFCDLTGLQTQGQKCHGFYIKPTKDSYTINDCPPWTIKGTPLNMITPGDSEKYLGLLIDPWTNIAKADILSKLNTWLLRLERTPLKPLQKIELLRVYTIPRLFYLADHTDTPAGLLESIDLEVKAKIKRWLHLPSLTCDGLLYSSTRNGGLGLTNMSKLIPSIQARRLHRLAQSSDAVIREILKEDNPEAKYAKLWKKAGGQEDNMPSIWTTKPMVVTRRPVKDDMNEWERPTPRYKYHKPCDWRAQEYNTWKELKAQGAGIAHFENDTTSNAWITYNRGIPHRKLLTALQLRANVYPTREFLARGRKDRCNKVCRHCNRKSETCSHILGQCPVVQDARISRHNNICDFLTEIAQKQEWTVFQEPHIRDSTGTLFKPDLIFVKDKQAYVVDVTVRYERHDKNLEAAAQEKVTKYQHLGGEIQDLTNATNIKFVGFPIGSRGKWHPANDFLLEALGLPESRRVRIARALAVRALLSSVDIIHMFASKARQGG

SEQ ID NO: 25785 - protein, 891 aa, Emmelina monodactyla
MLGNQNPRILKTITEIKTKYITHTRHENSNSQIQHYLDTLKQRLNALSSRLKRYLKCTKRKAQNAQFINSESHFYRKLTSGSQQPTTPPSTQILKEFWSQIWENPVIHNRDAQWIKDAEQNDIPNMSFEFIPPEIFHQILSRIHSWKTPGADKIHNFWFKKLAYLHPYLHNHINTFIQSPELLPNFITQGITHMIAKDNDSSNPAKYRPITCLQTFYKILTACLSEIIYTHLDSNHILHEEQKGCRKHSRGCKEQLLIDSVAMKQAHLNKNNIHTMFIDYQKAFDSVPHSWLIHVLSIYKIHPILINFLKTVMNSWHTKLVLNTSSNMIETEPIQIKRGIFQGDALSPLWFCIALNPLSQLLNKTHLGYPLTTTDNQTYKLSHLLYMDDIKLFANSKDALFKLTDVTQEFSQDISMNFGIDKCKIQSIVRGKIIENTFLLSNGEEIQSLGPQNTYKYLGFKQSRLIQNKIAKQELTAQFKLRLNKILKSYLKSRNLVKAINSYVIPILTYSFGVIRWSNADLAKLQRIINTSLTKHRKHHPKSCIQRVTLSRADGGRGIIDVKNLHNKQITNLRNYFYSKSLTSLLHMQIIQIDKKMTPLNLYSIEPQPNEAIVSREQKLNQWREKSLHGRHLADLAEAHVDKVASNAWLKRGELFPETEAFLLSIQDQVIKTKNYRKFILKETNLLDMCRRCSSGSETIQHITGSCKALVQTDYKYRHDQVAAIVHQHLAHKYKFIERKGPYYKYKPETVFENQTTKLYWDRTIITDRTISANRPDITLHDKINKTIYLIDIAVPNTNNVKKTINEKLCKYQELAIEVKRQWRADTIFTVPIVVSSTGIIPKSLKNSLDVIDLPQKIQYTIQKAVILNTCRITRKFLTPVAEIHDTDVTL

SEQ ID NO: 25786 - protein, 1320 aa, Emmelina monodactyla
MENINKKYNLRRRLVSTASSNQNSDSSDDNSDTQSLYRPPSVTLSVISTLTDVEQEASTANKPEPNRSLKTRRKWTPEMNRFILRTYLQLTFLDTNTKNYVTSLHTLFTQKFPEIEATPQHFGNQRRAIVRNKLLTDEEIKEIYKQVQDELSISTISDSQPQSQFRSQLNCNNTRIRWTQEEQQELLYCFYFARIKGGGYINNLEQMFKERNYNSPIIDVFDGNKLATQARSIIARKVFPENKLLEIKTKAESDFIAMNEPILETIYEEPTTISQLEILSPTQTQIDFSCNIESTDNLIDHTLTDDSSIENINIQFGITLEKFQNTEPLNRPYIPKQKSSKKLAHIINCFNKDILPNYINHETDFITLHTVIYAAAYTIATLNGSIITKNNTYTTPRPKTKYKPPWQKRLEKRISKLRFYIGHTTQYMLGNQNPRILATITEIKTKYNTHAKYENSNTQMTHYLDTLKQKLNALSSRLRRYLKCTQRKAQNAQFINAENKFYRNLTSAPLQQSATPPSPQVLKEFWSEIWENPVNHNGNAPWIKQLQQNNIPDMKFDFVTPEIFGKVIKRIHSWKSPGADYIHNFWLKKLTYLHPYLHNHINQFILSPELLPNFITQGIPYMIAKDSDSTNPAKYRPITCLQTFYKILSACISEVIYTHIDENHILHEEQKGCVKASRGCKEQLIIDSIIMNHAHRHKKHIHNIFIDYQKAFDSVPHSWLIEVLKIYRIHPHLINFLQSTMNSWHTKLKLKTDNINIETEPLQIKRGIFQGDALSPLWFCLALNPLSQLLNESKIGYPIQTDNNKYQLSHLLYMDDIKLFADSKSGLFKLTDITQEFSQDIGMQFGIDKCKIQSIVRGKIIENAYTLNTGEQIESLGPHNAYKYLGFKQSRFINHKITKEELTSKFKNRLNKIFKSSLNSRNLVKAVNSFAIPVLTYSFGIIKWSSTNLMKLQRLINTTLTKHRKHHPKTCMQRLTLRRADGGRGIIDVQNLHNRQITNLRKYFYFKSLTSQLHSEITNIDKNITPLNLHNPEQQPNEKIVSREQKLAQWREKSLHGRHLADLAEAHVDKDASNAWLKRGELFPETEAFIMGIQDQVINTRNYRKFILKEPNVLDNCRRCRSGSETIQHITGSCKALVQSDYKHRHDQVAAIVHQHLAHKYSFIEQKVPYYKYKPETVLENHNTKIYWDRTIITDRTISANRPDITLHDKLSKTIYLIDIAVPNTNNVQKTINDKLVKYQELAIEVKRQWRADTTVTVPIVVSSTGIIPKTLKNSLNKLSLTNNIQYMIQKAIILNTCRITRKFLTPVSEIHDENISPTL

SEQ ID NO: 25787 - protein, 1320 aa, Emmelina monodactyla
MENINKKYNLRRRLVSTASSNQNSDSSDDNSDTQSLYRPPTVTLSVISTLTDVEQEASTANNPEPNRSLKTRRKWTPEMNRFILRTYLQLTSLDTNTKNYVTSLQTLFAQKFPEIEATPQHLGNQRRAIVRNKLLTDEEIKEIYKQVQDELSISTISDSQPQSQFRSQLNSNNTRIRWTQEEQQELLYCFYFARIKGGGYINNLEQMFKERNYNSPIIDVFDGNKLATQARSIIARKVFPENKLLEIKTKAESDLIAMNEPILETIHEEPTTISQLEILSPTQTQIDFSCNIESTDNLIDHTLTDDNSIENINIQFGITLEKFQNTEPLNRPYIPKQKSSKKLAHILNCFNKDILPNYINHETDFITLHTVIYAAAYTIATLNGSKITKNNTYTTPRPKTKYKPPWQKRLEKRISKLRFYIGHTTQYMLGNQNSRILATITEIKTKYNTHAKYENSNTQMTHYLDTLKQKLNALSSRLRRYLKCTQRKAQNALFINTENKFYRNLTSAPLQQSATPPSPQVLKEFWSEIWENPVNHNGNAPWIKQLQQNNIPDMKFDFVTPEILDKVIKRIHSWKSPGADNIHNFWLKKLTYLHPYLHNHINQFILSPELLPNFITQGITYMIAKDSDSTNPAKYRPITCLQTFYKVLSACISEVIYTHIDENHILHEEQKGCVKASRGCKEQLIIDSIIMNHAHRHKKHIHNIFIDYQKAFDSVPHSWLIEVLKIYKIHPHLINFLQSTMKSWHTKLKLKTENINIETEPLQIKRGIFQGDALSPLWFCLALNPLSQLLNESKIGYPIQTDNNKYQLSHLLYMDDIKLFADSKSGLFKLTDITQEFSQDIGMQFGIDKCKIQSIVRGKIIENAYTLNTGEQIESLGPHNTYKYLGFKQSRFINHKITREELTSKFKNRLNKLFKSSLNSRNLVKAVNSFAIPVLTYSFGIIKWSSTNLMKLQRLINTTLTKHRKHHPKTCIQRLTLRRADGGRGIIDVQNLHNRQITNLRKYFYFKSLTSQLHSEITNIDKNITPLNLHNPEQQPNEKIVSREQKLAQWGEKSLHGRHLADLAEAHVDKDASNAWLKRGELFPETEAFIMGIQDQVINTKNYRKFILKEPNVLDNCRRCRSGSETIQHITGSCKALVQTDYKHRHDQVAAIVHQHLAHKYNFIEQKVPYYKYKPETVLENHNTKIYWDRTIITDRTISANRPDITLHDKLSKTIYLIDIAVPNTNNVQKTINDKLVKYQELAIEVKRQWRADTTVTVPIVVSSTGIIPKTLKNSLNKLSLPNNIQYMIQKAIILNTCRITRKFLTPVSEIHVENISPTL

SEQ ID NO: 25788 - protein, 1114 aa, Emmelina monodactyla
MFKERNYNSPIIDVFDGNKLATQARSIIARKVFPESKLLEIKTKAESDFIAMNEPILETIHEELTTISQLEILSPTQTQIDFSCNIESTDNLIDHTLTDDNSIENINIQFGITLEKFQNTEPLNRPYIPKQKSSKKLAHILNCFNKDILPNYINHETDFITLHTVIYAAAYTIAKINGSKITKNNTYTTPRPKTKYKPPWQKRFEKRISKLRFYIGHTTQYMLGNQNSRILATITEIKTKYNTHAKYENSNTLMTHYLDTLKQKLNALSSRLRRYLKCTQRKAQNALFINAENKFYRNLTSAPLQQSATPPSPQVLKEFWSEIWENPVNHNDNAPWIKQLQQNNIPDMKFDFVTPEIFDKVIKRIHSWKSPGADNIHNFWLKKLTYLHPYLHNHINQFILSPELLPNFITQGITYMIAKDSDSTNPAKYRPITCLQTFYKILSACISEVIYTHIDENHILHEEQKGCVKASRGCKEQLIIDSIIMNHAHRHKKHIHNIFIDYQKAFDSVPHSWLIEVLKIYKIHPHLINFLQSTMKSWHTKLKLKAENINIETEPLQIKRGIFQGDALSPLWFCLALNPLSQLLNESKIGYPIQTDNNKYQLSHLLYMDDIKLFADSKSGLFKLTDITQEFSQDIGMQFGIDKCKIQSIVRGKIIENAYTLNTGEQIESLGPHNTYKYLGFKQSRFINHKITREELTSKFKNRLNKLFKSSLNSRNLVKAVNSFAIPVLTYSFGIIKWSSTNLMKLQRLINTTLTKHRKHHPKTCIQRLTLRRADGGRGIIDVQNLHNRQITNLRKYFYFKSLTSQLHSEITNIDKHITPLNLHNPEQQPNEKIVSREQKLAQWREKSLHGRHLADLAEAHVDKDASNAWLKRGELFPETEAFIMGIQDQVINTKNYRKFILKEPNVLDNCRRCRSGSETIQHITGSCKALVQTDYKHRHDQVAAIVHQHLAHKYNFIEQKVPYYKYKPETVLENHNTKIYWDRTIITDRTISANRPDITLHDKLSKTIYLIDIAVPNTNNVQKTINDKLVKYQELAIEVKRQWRADTTVTVPIVVSSTGIIPKTLKNSLNKLSLSNNIQYMIQKAIILNTCRITRKFLTPVSEIHDENISPTL

SEQ ID NO: 25789 - protein, 1353 aa, Emmelina monodactyla
MDHDISLAIRGNKMENLNLTKKTYNLRRRLVSIASSIERNQDDFADDYSDAQSSYRPPSVSSFVSETDSMLTDVVQEANSANTPVPNLSKRTRRKWTSEMNQFILRTYLQITTLDTNTKNYITPLHEKFSQKFPTVIATPQHISNQRRAIIRNKLLPDTVIEKIYTEVQAEITQTSTTTTQASHNLHHTNTDSSSVRIQWTLEEQKELLYCFFFARAKGGGYIKNLKQLFTDRNACNIKFCNLDGNKLATQARSVISRKIIPQADLDVIKQKAEDDLLSLEHHSTNETLNTSQDTGVESSTLYTAAIEPNSIEINELQSIQSNDFALSTNYNLPSINTENIKHQFEVNLQKFINTEPTMRPPIPKQKCSRKLSFILDCLNNFVLPNHITSEIDFLTLHTFIYVSAYTAAECNGSKIKTSNTNTDKRNRKTCKPPWQRRLEKRITKLRYYIGHTTQYIRGNRNLKIIKSIAEIKTKYIIHATYENENNHIQEYLDTLKQKLNALSSRLKRYISCTERKKQNAKFLHAEKQFYRSISQNQQNLNTQTTFPSPQVLKDFWAQIWENPQEHNKNADWLKDIEQQQSNISEMPFDLISPDLLQDVIKRTHSWKTPGTDNIHNFWFKKLTYLHPYIHNHINEIIKSPNLMPNFVTEGVTFMIPKDKNSNDPSKYRPITCLQTFYKIITSCISDCIYMHAERSNLLFEEQKGCRKASRGCKEQLIIDTIAMKQAHIKKSSIYTMFIDYCKAYDSVPHSWLIEVLKIYKIHPTLISFLKSAMNTWQTKLKLKELDTFITSEPIRIQRGIFQGDALSPLWFCLALNPLSQLLKDSNSGYSLDNYRSQHRLSHLLYMDDIKLFADSKTGLDKLADITQKFSIDIRMQFGVEKCKIQSITRGKVVPNSYTLTSGEEIESLGPEGTYKYLGFEQAQIINNKTTKDKISALFKTRLNKILKSALNSRNLIKAINTYVVPLLTYSFGVIRWSNTDLINLQRKINTSMTKHRKHHPKSCTQRLTLSRKEGGRGLVDIKNLHNRQITNLRKYFHFKAEHSEIHNLIVELDKNLTPLNLHSRQPQPNETIVSKEQKFSQWREKSLHGRHLADLTAAHVDKDASNAWLKQGELFPETEAFILGIQDQVINTRNYKKFILKEHCVVDVCRRCNSASETIQHVTGACRALVQTDYKHRHDQIAAIVHQHLAHRYKFVDRKMPYYKYKPDTVLENNLIKLYWDRTIITDRTISANRPDITLYDKVNKSIYLIDIAVPNTNNVQKTINDKLNKYQDLAIEIKRQWRADTVHTVPIVISSTGIVPKTLKTSLSVIDLPHNTLYLMQKAVILNTCRITRKFLTPLAQIQSENTQAPL

SEQ ID NO: 25790 - protein, 1353 aa, Emmelina monodactyla
MDHDISLAIRGNKMENLNLTKKTYNLRRRLVSIASSIERNQDDFADDYSDAQSSYRPPSVSSFVSETDSMLTDVVQEANSANTPVPNLSKRTRRKWTSEMNQFILRTYLQITTLDTNTKNYITPLHEKFSQKFPTVTATPQHIGNQRRAIIRNKLLPDTIIEKIYTEVQAEITQTSTTTTQATHNLHHTNTDSSSVRIQWTLEEQKELLYCFFFARAKGGGYIKNLKQLFTDRNACNIKFCNLDGNKLATQARSVISRKIIPQADLDVIKQKAEDYLLMLEHHSTNETLNTSQDTGVESSTLYTAAIEPNSIEINELQSIQSNDFALSTNYNLPSINTENIKHQFEVNLQKFINTEPTMRPSIPKQKCSRKLSFILDCLNNFVLPNHITSEIDFLTLHTFIYVSAYTAAECNGSKFKTSNTNTDKRNRKTCKPPWQRRLEKRIAKLRYYIGHTTQYIRGNRNLKIIKSIAEIKTKYIIHATYENENNHIQEYLDTLKQKLNALSSRLKRYISCTERKKQNAKFLHAEKQFYRSISQNQQNLNTQTTFPSPQVLKDFWAQIWENPQDHNKNADWLKDIEKQQTNISEMTFDLISPDLLQDVIKRTHSWKTPGTDNIHNFWFKKLTYLHPYIHNHINEIIKSPNLMPNFVTEGVTFMIPKDKNSNDPSKYRPITCLQTFYKIITSCISDCIYMHAERSNLLFEEQKGCRKASRGCKEQLIIDTIAMKQAHIKKSSIYTMFIDYCKAYDSVPHSWLIEVLKIYKIHPTLLAFLKSAMNTWQTKLKLKELDTFITSEPIRIQRGIFQGDALSPLWFCLALNPLSQLLKDSNSGYSLDNYRSQHRLSHLLYMDDIKLFADSKTGLDKLADITQKFSIDIRMQFGVEKCKIQSITRGKVVPNSYTLTSGEEIESLGPEGTYKYLGFEQAQIINNKTTKDKISALFKTRLNKILKSALNSRNLIKAINTYVVPLLTYSFGVIRWSNTDLINLQRKINTSMTKHRKHHPKSCTQRLTLSRKEGGRGLVDIKNLHNRQITNLRKYFHFKAEHSEIHNLIVELDKNLTPLHLHSRQPQPNEAIVSKEQKFSQWREKSLHGRHLADLTAAHVDKDASNAWLKQGELFPETEAFILGIQDQVINTRNYKKFILKEHSVVDVCRRCNSASETIQHVTGACRALVQTDYKHRHDQIAAIVHQHLAHRYKFVDRKMPYYKYKPDTVLENNLIKLYWDRTIITDRTISANRPDITLYDKVNKSIYLIDIAVPNTYNVLKTINDKLNKYQDLAIEIKRQWRADTVHTVPIVISSTGIVPRTLKTSLSVIDLPHNTLYLMQKAVILNTCRITRKFLTPLAQIQSENTQTPL

SEQ ID NO: 25791 - protein, 1033 aa, Pomphorhynchus laevis
MIQRKSCCELDGGEDNDEISNLFETAGTHRMIEQPNVRSSIQHIRETSASMNTDINRYAEVKSPFVPEVNNTSQEHISRQQFGECCVCFRSFRITLAGVLWKHGGRVSCPGSGLLPKSADAAAFLQDPIPLPPTVEDLVSDVKEQFRSGFRAVRRIPKTARCTVAMKLCSLLRAATISPSELINWKNLLSFPRYCLCLPPSREVSFVSWIKESCSRFPPARYSMIDLGFHRQPLSRMEKRSRRRPEPEELRCKISEKIELGDARGAMRLAMCEDTFSPYKEETSLILQHLHPPSLRSTSNDLSLPISQDTLTRCPQVVSEEIIKSISSFANHASGGHDGLSPIHLKDRTEPCCATAGQDLLTTLSNFSSMVLNGCVPLCFRPIFFGAKLIALKKPDGELRPIAIGNTLRRMVAKIACRRATGEAVAVLSPFQVGVGVPSGAEAAVHACRAHLRLMHGQNALLKLDFRNAFNCIKRSSLLAAAYRYIPAISRFVQSSYNETSWLFHGPNILLSQEGVQQGDPLGPMLFSLAVIGLSKTLHSPLNIWYLDDATLSGDVATLNDDIRRIREEGLELGLVLNEDKCEVITNNQNVANSILLSLPGSKRVSVERSTLLGSSTGDVANIDGVLDRATSSLTKMSTRLLFLARHDSLYLLRHCVGGTKLSYLLRTSPAFLRAGLLSFDAVLRSSLESLLNVTIDEQAWTQATLPIALGGLGIASAVNTALPAFLSSVSTTQGLVQRLLAPYPVFSHTDPEFEQGSSRWLLSVGSDHPDNPERRKSWSAPIQKLIFKQLLDTVPNITERARLLAAAAPAAGAFLQAIPNAATGTRLDDEGIRISIGLRLGFPLCALHTCKCGAIVDRLGRHGLDCKRSIGRHFRHAQVNGIIKAALSAAGYPCSLEPCGMSRTDGKRPDGATLVPWDCGRLLLWDHTCVNTLAPSHVDCSAAGAGALATEAERRKRIKYTCLDPSYCCFVPVAVESIGALGCEATALFELIGKRLRLATNDAQAKSHFLQRISAAIQRGNSACVRESLMQS

SEQ ID NO: 25792 - protein, 937 aa, Limonius californicus
MRLRSHTTAQASTSPTPESPVLIPRFSQSPIPTSQAISSPSVSQPSTPPPPHGSPPQISPPIVGSDSDPVRDFLLEMLSWDNLCPADFEILQGISQNSANVRSDFLGWLELLLNNFRRAAATNQNSKRPRKNKSNRGYSRGAERAFAYKKAQELFRSNRAQLASNIIDDLQDMSPENTPSLSQILDHYNAIFNAPRFDDQDPLHNFKDCPTDPYSPITVPDLQWALSATKSEAAGPDNFKISDVRKIPTNSLLILFNGMLFWSFIPTQFKRCRTILILKKGDSTDVANWRPITVSSIFLRIINKIIAKRLSDVPLHGHQRGFVKIDGCLSNNLIMQFVIKHQRKNIKPYNILTLDLKKAFDSVAHSSIKRSLRRFRVNQKISNFILDGYTDCTTNISCLSRKTGDISVSAGVKQGDPLSPILFNMVLDELIEDLEQTGLGIPLGLDRKVACLAYADDLALFAPSVFEAQHLLKRASSFFGRRGLSFNVSKCTAVTTAVVPSKKKLFTATVPRFYIDGRPIKQISVDDCFKYLGHQYGLMGVSRPDIKGLKSQLARIERAPLKPLQKLCILKTYLVPRLLFSLQSLSVARIDLRNVDKLIRISVRKSLHLPKTTPNSFLHTDTRGGGLGVISLLTLIPSIMSERIKKLELSGDPSVRSVIASTWGIALKSKFQRGLRRGDYDIGSRGQAKRMWREELEGSTSGNGLLQGSGSGVSSSWIDHPPVFWSGADCVKAVLLRSNTLPTVGAPHLRGRCRAGCPRVESLSHVLQACPISHWPRIKRHDFAVGQVKRLAEAHRWSVRVEPYIRCTDGVGKKPDLIIDNGRDVIICDVGVHWEGPRGLAAACENKIGLYSSPQFLEAVQSNYPNHHTFYVLPLILGARGTWCPRNDILIERLGGNATDKKNLINGVIRGSIMIHSYFMRNTWRGINEDRPPPPPE

SEQ ID NO: 25793 - protein, 939 aa, Bradysia coprophila
MSTVETDTDPPEQNHQTSLGSYLDQMNEFLTFVQTVRAHTPIMKRIPKAARIQVAIEFSKLVTACLQKDAPISTWFHLFSFAYIALQSPDKKNKLTKNLSIATIVKRNLETWLSVKHMPVDDFKKNILAKLQRRKRSKTAKDAEAIRLKLVQAKLCDGDIAGAIRILSSNDTIAPISIETYQKLLDKHPAGTIPVDLEGESPIDIQPVTATEVKKAVMGFAAGSSGGMDGIRPQHLKDIIGKETGEHGERVLEALGNFSDFCLNGLVPNHVTYFLYGATLCGLNKKDDNIRPIAIGNSARRLVSRIASSRIAEKTGSDLRPKQIGFGTRGGAEAGVHAARHYVNSRHSSTKVLVKLDFKNAYNEMERHPMLQSVKDKCPEIFPFMRQCYEQPTWLSFGDFTMLSQRGCQQGDPCGPAVFCLGIQDMIESLEAEFNIWYMDDGTIGGTPEVVIKDLQTVITKSADVGPQLNFAKCEVKILGVTDLAERAHILQTLNQIAPGIVERPDDIELLGSPLTISGIQSAIQRKLNKLRTMVGRMEKLNSHHSYCLLRSSLSIPQLNYLLRTTPCWNALTELEEYDRTLKAAMERIVNCRFAGNSWDEATLPVKLGGLGLRNATNLCYSSFLGSVHSVTDLVGSIVPSFSLSSDIPAVEALGAWASISQSDFPPESDRKFQHKWDLALCSRQQHDLAEKCSSVSSKARLLANIGSEAGAWLNAFPFSSLGTLLDDQSFRIAISLRLGLPLCVPHTCVCGVQVDELGLHGLSCKYSAGRYARHAIVNDLLKRALVTSKVPAMLEPTGCNRSDGKKPDGLTLVPWHNGKPLVWDFTCADTLARSYVSGNSRKAGHAARKREAHKLWLYRNLVQNFHVVPVCIETLGTVGEAGLKLIRRIGELLQNITGEKRSTSFLMQRISVAIQRGNAAAVLGTIPADTNLEEIYYL

SEQ ID NO: 25794 - protein, 980 aa, Bradysia odoriphaga
MDPVSNSTCNICGKSCKGRVGLSVHTTRKHAGQNSQPLDPPTSSESAPVAASGPNNPTAEKGNLDQMKDFLIFIQTVRAHTPIVKRIPKAARIQIAIELASLITASIQKDAPVIAWVHLFTFAYIALQSPDRKNKQTKSLSMATVVKRNLEVWMKVKRLPVDEFKENILSKLQRRRKSKTAKDTEAIRIKLVQAKLSDGDISGAIRILSSNDTIAAFNVETYKRLEEKHPPGNIAVNLSVEPTPDIQPVAATETKKSIMAFAAGSAGGMDGIRPQHLKDIVGKETGEHGERILEAISSFADFCFNGKVPSHVTHFLYGATLCGLNKKDDSIRPIAIGNTIRRLVSRIASSRIADRVGNELRPKQIGFGTRGGAEAGVHAARHFINHRHTSTKVFAKLDFRNAYNEIERHPMLQAVKTNCPEIFPFMKQCYANPTWLSFGDFTMLSQRGCQQGDPCGPAIFCMGIQEMVECLESEFNIWYMDDGSIGGSPDEVINDLQKVIAKSSEMGLQLNFAKCEVKILGEVNPEERAHILQRFNQIAPGIVERPDDIELLGSPLTISGIHSAIRSKLDKLKIMVRRMEKLNSHHSYCLLRSSLSIPQLNYLLRTTPCWNALTDLEEYDRVLKEAMESIVNCRFTGTSWDEATLPVKLGGLGLRNATNLCYSSFLGSIHSVAELVGRIVPSFTLESDVPTTEALGTWLSLSLSDAPAGSDRKFQHKWDLALCSRQQRDLWEETTSITTKARFLANNSKESGAWLNAFPFSSLGTLMDNQSFRIAVSLRLGLPLCVPHTCVCGEQVDEMGLHGLCCKNSAGRYARHAIANDLLKRALVTSKVPAMLEPTGCNRSDGKKPDGLTLVPWQNGKPLVWDFTCADTLARSYAKGNSKKAGFAAQKRESYKRWLYRNLEPNFHFVPVCIETLGTIGESGLKLIRRIGELLQNVTGEKRSTSYLLQRLSVAIQRGNAAAVLGTIPSDTNLEEVYYL

SEQ ID NO: 25795 - protein, 1348 aa, Rotylenchulus reniformis
MAYQSTNLIKTGASGSRDVDEGPITGRSTGSSAMGSSGTSTGPGLSQGNMPGSSRSYKNKTERNAQPFSSSTPDIGRAQLNSLSSSSGMGNFLTERPVPSGIPEEGGGAPCATNPSDGNMGKSTAPSSSQLQEGPSAGRRDKSNAQRWSDRDCKFVQQLSERYCNTRGTVCWANVCQAWSHAIADKDSEVENKIPRTQAALKYAVQKAKLASQGSSGSKNVRERRDVDAELVQEESNSAAESTTEKVNSSESQKDLTDKHTSDFDEFMKDFRAEFKHSSNNLERKPVSKPSKKIPDQMYNFGDKAIALICEEQKTTEGVLGVEVLNAGVYAAATTITKKLRTTEVGNSHFSRMAERDLVNKLRTMRRSLGILQRELNYRSDMTTPTDLHNCALNRLSKTLGRKLSRKRDLLDLKESLVSKVRMLSSLLKVKNEERIRKKVRKLPPKKALEVCANKGNKDVSKPISLEKVRSYWTDIIGTSKSYEIDPAIKDWNRYIKTQSYVPTPEEVGQDWEQVCKKAKPWKAPGPDGIQNHWWVRFGYANNELRKMVLEFKEGTRKIPPWFCKGRAILLHKKGDKSDPSNYRTIVCLNTCYKLCTGMIAKWVESQLGKAGLPREQLAIRSGTWGCTEAHILDSTLCRDAQESQKGLCVGWIDLRQAFDSLPHDYMLHCLKKIGLHPDIISLIRNLMSKWSIRYEQRKGYKTLRSNSLKVRSGTLQGDAFSPLLFCICLIPLQYWLNFKAPRYQTRFNSERASQFHRQDEPTVERPLHLNHIMYMDDAKLYAKDMIDLSSMIEGFRRIAAKVGLVLNDRKSGIAFLLNGRTEEQPENLFGEIPFIGADSPYKYLGIEQDVRVRQDDLWERITELILSRTRKIFSSDLTIRAMITCYNTMVTSLVRFVGICNIIGTGSYQSEIKCMRNLDKSVRGILAELKVRFPRQPLYRLYAKPHDGGLGLGSLEHTYEESTTYAYCYLATKSNLITCCQFMHHLSGRNKRSVVSDMEKVFEKYGINTNPFSQECLIRKNPGQAEIRVNGKRFIEPTPAARAIIELINESRNRQTQENLGLSEDHSTPAPGFECVAELVKYEKLGLDRARTWGWLAKGQVSHLVARNVLAAQDGTLLCLDKGHHRKCRMNCSKGNKERETIAHIVSGCEHWRTNKMLERHNMVASNIYYVLSQKLKMPALHYSSRKPSVRENEFGKLYWDRPIETISSGIRFNRPDLVYFETNPNDKDGSSPYNKIWIVEISVVWHSRIVEAELEKRQKYAVNSIEGGSRPDENLMNILQRSYRCKVIMVPIIVGVFGEAGESLIENLRLLELSANDTEALVERLQRSSVLGTHAVISAHLANSPV

SEQ ID NO: 25796 - protein, 1126 aa, Dermatophagoides pteronyssinus
MDEDWNADSHIQNQNVSPGLENLDLENNTNECSRVYNRISFSNGRVTGGDATQNSAETNGESGQLSISFEVVLESIDQSEKNAWINQLVMAVINRFGGRIPRGGWRMVHRVFNDKFQCNESEQQIKNIYNRIKSSLGTNNSNQDVMASTNNHGNIPEIKNVQLYKEICLKLNSNVIKFNEQNDAKERTAKVYSESMNNEIIDMINIAIRESSIDGRTNSLKDINNVLYACQKTYEEVTAKKKNVVPWKESIEKKIEQLEMDLNHLKQFDQNKCPSKEVKRICNKYRIHSNRAQSVEILCDQMFEKVARHKKRLWISENRKLFKKNNRNFEFNRKRFYREVEGEKLKVDESIDKEQTVEFWRDLWSGGDEPQYQEMLSFIEPILLNVDQEDDDLNKIIENTIKHLPSWKTPGHDYVYNFFIKRMTSLHPKLYLLIREAIKNPDMIDIEFYKGTTYLIAKKDNAISPKELRPITCLPNLYKLISKVATTLMGRVCDLNDVLSDNQMGTKKRCQGAKQQALINKNLNMSNEYNLKTSWIDIQKAYDSIDHNYLIELLKKLQIPDNLIKFVQRMLQNQNTDLILNKEQIGEAKIDKGVLQGDALSPLLFVLSMEPISRRINRYCEKIRVPNTNLERNHLIFIDDIKVFARDDQSLKEICWYVSDSLEKLGLKINQQKSASNIESAQVFGDMLDDEKGYKYLGILEDSRNMIKEENKQIIINKMVQRIKKLCETKLNGRNLFHAINEFALSTANYYIGIINFEPEDYVRLDVNIRKILKEYSVIRNSSNIDRLYLPRNELGRGLGNMAEKSELMLFNLNEYLLNSINYKAIIESEKAQATHLGTIKEFICRTYDIPEELLCWDMIKNKQKQRRMNRINEKALHKIVFQNDDGYIDIRQSSLWLSKGNVSPQEEGMMCKLQDRNLFWKKNKCPHCKRATATVDHLATHCGGLLNFDYKKRHNDVVRCIHMMFAKKYGITNQKRLKNYRVENVVSNERVRIKSDTPILTDNRIDHNKPDLLVHDLKTNDIWLIEVGITNKNILPNTEITKSRKYEMLSNELKTTFKANVHIIPIVITWDGLVTNYHKKHLKKIEVSTNIQAFIQTQVLKRTWESIRVDLREDILDVEYGQMEV

SEQ ID NO: 25797 - protein, 1168 aa, Gekko japonicus
MTNYETNRISERNGISPSLDSTIPPEDPLEEDTGGGIAEEVVEEGLPSDAEECCEEDNGEKKLIIIYLPAERLDCPVCKDVFGKPSGLQTHLKRRHGDLEFAFGCCLCDRIGKTSQSTLVHLRSCKGKVTDHDKLRGEFVCEFCERRFPTQIGVSQHKRHKHPEERNEEQKSKMKKEIGLKKGKVRGCWTEQAGLKKRKVRGCWTEQEEELLMELEQKFKDDRKINEAIAIVLKSKNAKQIADKRKDLRDKVAKQKENQVVEDDKNYEELKIERKMVDRVENVKERYRKLYELGLVNFKCLPGVERILERWYEGHEGIEEGIESITIDCLIKFLTEPKKKYKKCVGRKRRKGKKRNWMRRWAKKRLQYKEVQQLYEKDRKRLASLILDGREEHSCENELEKVYGVFRDKLELTTQFAGLGKFEASNMAQNECFYELITVEEVRNMVGELDTRSAAGPDGIGVKELKEFDPGGIMLCELFNLWLLSGYIPQTVKTCRSLLIPKLDDEEKFRELNNWRPLTIGSTVLRLFSRIITKKVEKMCPVNARQRGFRSSSGCSENLEMLRVILKDAKQCGKELGVVYLDIAKAFDSIAHEHIICSLRNRGVDEHVIQLIKSSLSEAVTRFKVQKGETAYIKINNGVKQGDPMSPTLFNIAMDPLINMLAKVGKGYRIGTAEISVMAFADDLVLIGDSWEAISNQLHMVQAFCEITGLKVQGSKCAGFMLSPGGGSFVINNCESWAIDGEMLKMLRPSEVYRYLGITMDPWSGIKKIDWEEQLTKWLNNLSRASLKPTQRLELLKTFVIPRLLYSLDHMETPMVKLRNLDDCIRSKMKEWLHLPACTTNSLFYTRMCDGGLGVVQLEKLVPLLRLKRLFRVAQSEDSVIREICRSVNIQGEFRQLWIELGGGEDEVPDTTYYHKEKTNCPMPRDYRDTEFERWCSLICQGSGVAVFGRDVISNAWIGNKLGLSERDYIMALKLRANVLPTREFLGRGKQDFPRSCRKCGAKYESISHVLGQCPAVQKLCILRHNKICALLAKEAKKHQWLVHHEPHLRNKKRELRKPDLVFCKGDLALVVDVTVRFEHHRHSLEQAAMEKVAYYKELEDQVMKMMGVTQVLFFGFPIGARGKWYAHNDHLFRILGLSENQGNWAARLLARRALVYSVDIIKTFMNA

SEQ ID NO: 25798 - protein, 1057 aa, Eufriesea mexicana
MEDGYTDPGGCHPPRSSTVGATRTNKPRMTRAVSTDPVPQHDPPSQSPPPPPIVHTCPICGRSFSTKSGMGVHMRRAHPNEYDQMALRVDIKLRWSEEELLLLARKEAELTSQGHPRFINQELHAVFSHRTIEAIKGVRRKEVYKEYVRSMLDEIHSNPPSSLSAATAPEAPQAPSCAGSTIMDRPRTDYLSNPILESTDIFLEYVRSLPASDDTVYSGVRLQNIIDEAISMGKSVSFQKLSSYLLDIFPSKAKTTTVLKPLQSSTTMNNRKKRRREFAATQRNWDLHRNRCVKSILEGPSRSIEPSPDMMVPFWRALMEKKDDSSPGVEDLKQDLNNIWRPITCDEIRNARLKLTTSPGPDGITARQLRAIPMDILIKIYNLLLWCGKIPQHLSRAKTIFIPKRVDSELPGDFRPITIPSILIRHLHGILARRVMMAIELDPRQRGFQPLDGCADNTTIIDLLLRSQRDNYSSCYMAILDVYKAFDCVSHRALLDTLYTYGAPEGFIKYIDQFYKTSSTQISTHGSTPTLIHPTRGVKQGDPLSPILFNMVMDRLLRNLPKEVGCHIGNVKTNAAAFADDLILFASTPTGLQQLLDVTSTYMSACGFTLNAAKCLSVSVKGQPKQKKSLIIEQKFMLGNQQIPSLRRTDRWTYLGVQFSPEGRTKFEPQLELLAKIEKLTRAPLKPQQRLYVMRSVLIPQLYHKTTLGNVMIGCLNKVDRIIRAAVRRWLHLPHDVPVAFFHAPVKEGGLGLPSLRWTAPWLRKCRLENLKWPSLEPSLTADTFIARELEKVGRRLLLNNSNISSKADVDSYWSKKLHSSVDGGGLREAVRCRQSHRWLHEPTRLLTGRDFINCIRVRINALPSKSRTTRGRPRENRMCRAGCLSVETTNHTVQQCYRSHAARIDRHNAIVRYVERSLKNRGYTTHLETPFTTPDGTLKPDLIAYNEKEALILDAQVVTDSCTLDSAHQLKLNKYNTSNLRSAVRNKYNRQNVRVGTITLNWRGIWSGASANQLLDLRAINTKDFAVISTRTAIGTLHCFRRFNEMVSRRNRTGVG

SEQ ID NO: 25799 - protein, 1530 aa, Dolomedes plantarius
MSGFPLRPAVSLPSLAPNARLTENGTFSRAAFLPTTTTLPTGPIVPLPSMPIFVDGEFKAPLPPPPPAPPAESMPTPSVPSTAGPCSYAGAVRKAHIPVQISPIASRTRLGTLTKVVKPSVIPRATKASVLRAAGKGAKSPPTLAPPPVGESCVLGPAAAKRSGKVCSALPSIRKSPEINSKAKRNSNGTNGEIASGGTPPTNTNVCNVENRVQGTPPEGNSSHASVGTVKCISTPNPPSMDAPGDRPVRRGGSPVGGLATPPRPSTSSKPTAAEEELADREGNIDNIMDNGADVSSSDGSVGASSPGILSIIMSDESQSSFRDDEGEFTVVRRKERRATPSPTNTVQGNTICPRTNVRSSNGESRANARSPPGGNIGGSQTGYPGRTLRCEDTLHFVFPVLVAPRCTERGCQAAFINKDWYSTKHSLKRHLEVVHGLDVNNERRWCSLCQGAVPVIISKHACFGQNPYFAPVQETFRYRCHDCSFSCPSKRGIKNHRRMHQRRGIADRQQQASGNTPRQSDNGNSRIPVPRTVNYASPTADNIQVTIERDPRVSEDSNVDNGVQVDRVSPDEVVNSQEVIDEELSDGEELIEAMTQGAGIDFTEADADAEPEPDDPSPSDEFIIKFREILTSGEIDWDIFQATLAEYIQFAKSFVKIPEEGAQRRGGESPRVNDPKYIQKLYRRNRRRAVRLITQNEGERCAIDPVSLAEHFCPPRPNPPNRDLFTHESPASEGIDMCQFTPEEVWAKLKSAENSAPGPDRLTYNHWRGVDPDAKALSLIFNICLKLRKVPDAWRESTTIMIPKDGPKDLPNNWRPIALGNTIVKLYTGCLGRRLTAWIEENEILCPAQKGFLPHDGAFENNFVLQNRFQSARAGGRDLCLMSLDISNAFGSVPHEAIIFALEESGAGEGFVKIIKDMYTDNFTSFLTDGGQSDSYSIQSGVRQGCPLSGLLFNIAIDPILRAVDALSTGINILAFADDILLFGDSPEELQNTVNRVANTTALLGLTLNPNKCASIHLTASPTGCVPTVFYINESPVRALADGDSFKFLGKPVGFCLVPEPSCVDDLARPGEDILSSFLAPWQRLDALKTFYYPSLNYAQRTRQFNKKQWSDVDSRLKPGIKNTLNLPRNACTDYIYGNPKKGLFGVPLAAEDSDIAMIDGAFKLLTSRDERVADLAWSELSELVGIRINRDPTSADINNYLSGANYKRTSNPNSRIWTQARAASARLGVKWHVHDDRSISLSIGEVVVLDRKKIFKTLRLVFRDRRASVLAGKECQGKTFHCFSGSSSSTHFHRTGEYTRFADWRFIHRARLGLLPLNGRAGSRASPEAKKCRRCGFFVESLSHVLNSCRRLLHRGTKRHDAIKDRIKRAAEGRSWSVRWENQYVANTTLKPDLVLTKGGEAIIIDVTVPFENGPDAFDAARRRKMEKYAPLVDVLKGRYRSVRIEAVVVGSLGSWDRKNDKVISRLCSRKYAKKMRKLIVSDTISASREIFWEHIWGTRQAPAGVHNNDQQTISSAVAEAREQAVLN

SEQ ID NO: 25800 - protein, 1530 aa, Dolomedes plantarius
MSGFPLRPAVSLPSLAPNARLTENGTFSRAAFLPTTTTLPTGPIVPLPSMPIFVDGEFKAPLPPPPPAPPAESMPTPSVPSTAGPCSYAGAVRKAHIPVQISPIASRTRLGTLTKVVKPSVIPRATKASVLRAAGKGAKSPPTLAPPPVGESCVLGPAAAKRSGKVCSALPSIRKSPEINSKAKRNSNGTNGEIASGGTPPTNTNVCNVENRVQCTPPEGNFSHASVGTVKCISTPNPPSMDAPGDRPVRRGGSPVGGLATPPRPSTSSKPTAAEEELADREGNIDNIMDNGADVSSSDGSVGASSPGILSIIMSDESQSSFRDDEGEFTVVRRKERRATPSPTNTVQGNTICPRTNVRSSNGESRANARSPPGGNIGGSQTGYPGRTLRCEDTLHFVFPVLVAPRCTERGCQAAFINKDWYSTKHSLKRHLEVVHGLDVNNERRWCSLCQGAVPVIISKHACFGQNPYFAPVQETFRYRCHDCSFSCPSKRGIKNHRRMHQRRGIADRQQQASGNTPRQSDNGNSRIPVPRTVNYASPTADNIQVTIERSPRVSEDSNVDNGVQVDRLSPDEVVNSQEVIDEELSDGEELIEAMTQGAGVDFTEADADAEPEPDDPSPSDEFIVKFREILTSGEIDWDIFQATLAEYILFARSFVKIPEEGAQRRGGENPRVNDPKYIQKLYRRNRRRAVRLITQNEGERCAIDPVALAEHFCPPRPNPPNRDLFTHESPASEGIDMCQFTPEEVWAKLKSAENSAPGPDRLTYNHWRGVDPDSKALSLIFNICLKLRKVPDAWRESTTIMIPKDGPKDLPNNWRPIALGNTIVKLYTGCLGRRLTAWIEENEILCPAQKGFLPHDGAFENNFVLQNRFQSARAGGRDLCLMSLDISNAFGSVPHEAIIFALEESGAGEGFVKIIKDMYTDNFTSFLTDGGQSDSYSIQSGVRQGCPLSGLLFNIAIDPILRAVDALSTGINILAFADDILLFGDSPDELQNTVNRVANTTALLGLTLNPNKCASIHLTASPTGCVPTVFYINESPVRALADGDSFKFLGKPVGFCLVPEPSCVDDLARPGEDILSSFLAPWQRLDALKTFYYPSLNYAQRTRQFNKKQWSDVDGRLKPGIKNTLNLPRNACTDYIYGNPKKGLFGVPLAAEDSDIAMIDGAFKLLTSRDERVADLAWSELSELVGIRINRDPTSADINNYLSGVNYKRTSNPNSRIWTQARAASARLGVKWHVHDDRSISLSIGEVVVLDRKKIFKTLRLVFRDRRASVLAGKECQGKTFHCFSGSSSSTHFHRTGEYTRFADWRFIHRARLGLLPLNGRAGSRASPEAKKCRRCGFFVESLSHVLNSCRRLLHRGTKRHDAIKDRIKRAAEGRSWSVRWENQYVANTTLKPDLVLTKGGEAIIIDVTVPFENGPDAFDAARRRKMEKYAPLVDVLKGRYRSVRIEAVVVGSLGSWDRKNDKVISRLCSRKYAKKMRKLIVSDTISASREIFWEHIWGTRQAPAGVHNNDQQTISSAVAEAREQAVLN

SEQ ID NO: 25801 - protein, 1331 aa, Coccinella septempunctata
MSERNQLSLGKQSLPGDRQGTSGVGAGRDSMRDTNGRTLRRRAPATQKATPLDEEDIDEERVQVVGRIGIQSSQEHPVVGTGSRNRTAQRGRHKWTPEQHSLLSALYRRSGPDRRGHMNRLHGLWCENCPVLNYMTQQNLRDQISHLKRRGILQRSQEQGRLEQQAEEQVTDALSQHQQLTVDITQEQAVALLSDIAGRTRTGTRSNRPTTEHVRDVPDIERAEEQVTDAPGQQHQAMTHRGEAVALEARPRTEKVREVPEIELAGEQVTDAPDRQQQRPRTVRDSSELIDNTKEAFEAAVRDPLIKPTRIKSRHKAEDLAVLNSIIQDHLNETCSLKEVEAAVRAAAYLLCPLKSTAANNNNKHRKRLNQLDIKIKSMRQQASWYQCVIDVLKGKTKPSKRMKEMIEELRATHGTVNLPTVHLLKQKAVDKIRSLAAARKKLIRRKRWIEDNNTFTAEPSKLFQPQQQEVQNPPSPQDVEEFWKSLYEQPAKTRDTPALPRFQQMCDQTLQQNDELSEISAEDIRQALKNKNDFTAPGPDGIQNYWWKSFPATHKHLARLFSGMLIRREPIPSWLVEGRTVLIPKSGDLGQPKNYRPITCRNTLYKILTSVIQDRILRVIGPVWDSIYEQMGAKKGVQGCKDNLLIDKSVCLDARHYKRDLHTSWLDYAKAFDTSPHDLIIRLLKMLKVHPNIIHAIESIIALWKTKFAIRAEGRTVYTGWVRYRRGVFQGDSLSPLLFCLTLMPLSIELRASKIGYKAGPPGRRNHLISHLMYVDDLKLYAPSRTALQQLLNIVSDYTSAMGMSFGLDKCAVFHLRRGRVDDPGEDIQLEDGMTFRCLEEGETYKFLRMKQRGVLETTQIKDALSASYKKKLRDIWKSQLSGKDKVSATNMLAIPILTYSFGVVNWTVNELLDLDRSTRKTMNMNRSLHPNSSIQRIYLPRSQGGRGLQCLEYQHYQQTLETAVRVLRSEDPLLKFVAQHELANHGALLFRAGQRAPEKLGITGVSIDPERAGAPITQADQRRLARLIRKSQSNTLLEHHMSKSLHSIFFRSLKDQDLSEELSFAFLKSASLKSETEGFVMACQDGVINTRWYKKNIMKMDTPTTCRACHSQQEMIMHILSACRVHAPSGYIERHNAALRVLYFHLRAAYEIDKEPVLPYVPLEIEAVVQNEKARIYWNYPVSTTRQITAIKPDILLLDKELKELFVVEFSSPAENNIVMKEEQKRQKYKDLVFELGTMYPGHKVRMVVLIIGCLGGMRANYVEELKIIPACRSWTEILAHRMQKAVLLGSLMSSDPMNSRCHLQLISFVKGRCKGWTKNFSVECVRGF

SEQ ID NO: 25802 - protein, 1065 aa, Coccinella septempunctata
MTHRGEAVALEARPRTEQVREVPEIELAGEQVTDAPDRQQQRPRTVRDSSELIDNTKEAFEAAVRDPLIKPTRIKSRHKAEDLAVLNSIIQDHLNETCSLEEVEAAVRAAAYLLCPPKSTAPNNNNKHRKRLNQLDIKIKSMRQQASWYQCVIDVLKGKTKPSKRMKEMIEELRATHGTVNLPTVHLLKQKAVDKIRSLAAARKKLIRRKRWIEDNNTFTAEPSKLFQPQQQEVQNPPSPQDVEEFWKSLYEQPAKTRDTPALPRFQQMCDQTLQQNDELSEISAEDIRQALKNKNDFTAPGPDGIQNYWWKSFPATHKHLARLFSGMLIRREPIPSWLVEGRTVLIPKSGDLGQPKNYRSITCLNTLYKILTSVIQDRILRVIGPVWDSIYEQRGAKKGVQGCKDNLLIDKSVCLDARHYKRDLHTSWSDYAKAFDTSPHDLIIRLLKMLKVHPNIIHAIESIIALWKTKFAIRAEGRTVYTGWVRYRRGVFQGDSLSPLLFCITLMPLLIELRASKIGYKAGPPGRRNHLISHLMYVDDLKLYAPSRTALQQLLNIVSDYTSAMGMSFGLDKCAVFHLRRGRVDDPGEDIQLEDGITFRCLEEGETYKFLGMKQRGVLETTQIKDALSASYKKKLRDIWKSQLSGKNKVSATNMLAIPILTYSFGVVNWTVNELLDLDRSTRKTMNMNRSLHPNSSIQRIYLPRSQGGRGLQCLEYQHYQQTLETAVRVLRSEDPLLKFVAQHELANHGAFLFRAGQRALEKLGITGVSIDPERAGAPITQADQRRLARLIRKSQSNTLLEHHMSKSQHSIFFRSLKDQDLSEELSFAFLNSASLKSETEGFVMACQDGVINTRWYKKNIMKMDTPTMCRACHSQQETIMHILSACRVHAPSGYIERHNAALRVLYFHLRAAYEIDKEPVLPYVPLEIEAVVQNEKARIYWNYPVSTTRQITAIKPDILLLDKELKELFVVEFSSPAENNIVMKEEQKRQKYKDLVFELGTMYPGHKVRMVVLIIGCLGGMRANYVEELKIIPACRSWAEILAHRMQKAVLLGSLHVIRSHEL

SEQ ID NO: 25803 - protein, 1302 aa, Coccinella septempunctata
MSERNQLSLGKQSLPGDRQGTSGVGAGRDSMRDTNGRMLRRRAPATQKATPLDEEDIDEERVQVVGRIGIQSSQEHPVVGTGSRNRTAQRGRHKWTPEQHSLLSALYRRSGPDRRGYMNRLHGLWCENCPDLNYMTQQNLRDQISHLKRRGILQRSQEQGRLEQQAEEQVTDALSQHQQLTVDITQEQAVALLSDIAGRTRTGTRSNRPTTEHVRDVPDIERAEEKVTDAPGQQHQAMTHRGEAVALEARPRTEQVREVPEIELAGEQVTDAPDRQQQRPRTVRDSSELIDNTKEAFEAAVRDPLIKPTRIKSRHKAEDLAVLNSIIQDHLNETCSLEEVEAAVRAAAYLLCPPKSTAANNNNKHRKRLNQLDIKIKSMRQQASWYQCVIDVLKGKTKPSKKMKEMIEELRATHGTVNLPTVHLLKQKAVDKIRSLAAARKKLIRRKRWIEDNNTFTAEPSKLFQPQQQEVQNPPSPQDVEEFWKSLYEQPAKTRDTPALPRFQQMCDQTLQQNDELSEISAEDIRQALKNKNDFTAPGPDGIQNYWWKSFPATHKHLARLFSGMLIRREPIPSWLVEGRTVLIPKSGDLGQPKNYRPITCLNTLYKILTSVIQDRILRVIGPVWDSIYEQRGAKKGVQGCKDNLLIDKSVCLDARHYKRDLHTSWLDYAKAFDTSPHDRIIQLLKMLKVHPNIIHAIESIIALWKTKFAIRAEGRTVYTGWVRYRRGVFQGDSLSPLLFCITLMPLSIELRASKIGYKAGPPGRRNYLISHLMYVDDLKLYAPSRTALQQLLNIVSDYTSAMGMSFGLDKCAVFHLRRGRVNDPGEDIQLEDGMTFRCLEEGETYKFLGMKQRGVLETTQIKDALSASYKKKLRDIWKSQLSGKNKVSATNMLAIPILTYSFGVVNWTVNELLDLDRSTRKTMSMNRSLHPNSSIQRIYLPRSQGGRGLQCLEYQHYQQTLETAVRVLRSEDPLLKFVAQHELANHGAFLFRAGQRALEKLGITGVSIDPERAGAPITQADQRRLARLIRKSQSNTLLEHHMSKSLHSIFFRSLKDQDLSEELSFAFLKSASLKSETEGFVMACHDGVINTRWYKKNIMKMDTPTTCRACHSQQETIMHILSACRVHAPSGYIERHNAALRVLYFHLRAAYEIDKEPVLPYVPLEIEAVVQNEKARIYWNYPVSTTRQITAIKPDILLLDKELKELFVVEFSSPAENNIVMKEEQKRQKYKDLVFELGTMYPGYKVRMVVLIIGCLGGMRANYVEELKIIPACRSWAEILAHRMQKAVLLGSLHVIRSHEL

SEQ ID NO: 25804 - protein, 1217 aa, Adalia bipunctata
MVGMSRLIKMMNTIQFISSVCFLGLRKVADAELALPWLSNEVHRALEYNSGQTGSSTRFNRPIIEHVRDVPKIEHGGEQVTDAQNQQHQTIALGPRPRTEQVRDFPVIGLAEEQVTDARDQQHQAKAQGPRPRTEQVRDVPVIGLAEEQVTDAPDQQHQAKAQGPRPRTEQVRDVPVIGLAEEQVKDAPDQQQQKPGTVRDIPKLIVNTREAFEAAVRNPLVKTSRIKTRHEAEDLAVLDNIIQDHLNETWSLEDVVAAVRAAASLLCPPKSTATKEDKHKLRLRRLDTKIKSMRQQASWYQCIIDVLKGKIESSKKMKDMIEELRSIHHRVDLPTVHLLKQKAVDRIRSLAAARKKLIKRQKWIEDNNTFNAKPSKLFQSQQQMTQKPPAPPEVEEFWKSIYEQRVETRDTPALLRFQQMCDQNQQQNDELSEISTEDIRQALKNKRDFTAPGLDGIQNYWWKRFPATHQHLARLFSGMLTRREPIPSWLVEGRTVLIPKSGDLGQPKNYRPITCLNTLYKILTSVIQHQILRVIGPVWDSIYEQRGAKKGVQGCKDNLLIDKSVCLDARYYKRDLHTSWLDYAKAYDTSPHELIIRLLKMLKVHPNIIHAIEKIIALWKTKFAIRTEGRTVYTGWVRYRRGVFQGDSLSPLLFCITLIPLTIELRESKIGYKAGPPGRRNHLISHLLYMDDLKLYAPSESALRQLLNIVSDYTSAMGMSFGLDKCAVFHLRRGKAEDAGEDIRLEDGMTIRHLEEGETYKFLGMKQRGVLETTQIKDALTASYKKKLRDIWKSQLSGKNKVSATNMLAIPILTYSFGVVNWTVNELLDLDRSTRKTMNMNRSLHPNSSIQRIYLPRSQGGRGLQCLEYQHYQQTLEMAVRILRSEDPLLKFVAQHEIANHGAFLFRAAQRAVEKLSITGVSINPELAGTPITQAEQRSLARLIRKSQADKLLEHHMSKNLHSIYFRSLKDQDLSEELSFAFLKSASLKSETEGFVMACQDGVLNTRWYKKNIMKMDTPTTCRACHRQQETIMHILSACRVHAPSGYVERHNAALRILYFHLRAAYKIDKEPVLPYVPLEIEAVVQNERARICWNYPVPTTRQINAVEPDILLLDKELKELFVVEFSSPAENNVVMKEEQKRQKYKDLMFELGTLYPGHKVRMVVLIIGCLGGMRANYVDELKIIPACRSLAEVLAHRMQKAVLLGSLHIIRSHEV

SEQ ID NO: 25805 - protein, 971 aa, Adalia bipunctata
MIETCSLEDVVAAVRAAASLLCPPKSTATKEDKHKLRLRRLDTKIKSMRQQASWYQCIIDVLKGKIGSSKKMKDMIEELRSIHHRVDLPTVHLLKQKAVDKIRSLTAARKKLIKRQKWIEDNNTFNAEPSKLFQSQQQMTQKPPSPPEVEEFWKSIYEQRPETRDTPALLRFQQMCDQNQQQNDELSEISTEDIKQALKNKRDFTAPGLDGIQNYWWKRFPATHQHLARLFSGMLTRREPIPSWLVEGRTVLIPKSGDLGQPKNYRPITCLNTLYKILTSVIQHQILRVIGPVWDSIYEQRGAKKGVQGCKDNLLIDKSVCLDARFYKRDLHTSWLDYAKAYDTSPHELIIRLLKMLKVHPNIIHAIENIIALWKTKFAIRTEGRTVYTGWVRYRRGVFQGDSLSPLLFCITLIPLTIELRESKIGYKAGPPGRRNHLISHLLYMDDLKLYAPSESALRQLLNIVSDYTSAMGMSFGLDKCAVFHLRRGKAEDAGEDIRLEDGMIIRHLEDGETYKFLGMKQRGVLETTQIKDALTASYKKKLRDIWKSQLSGKNKVSATNMLAIPILTYSFGVVNWTVNELLDLDRSTRKTMNMNRSLHPNSSIQRIYLPRSQGGRGLQCLEYQHYQQTLEMAVRVLRSEDPLLKFVAQHEIANHGAFLFRAAQRALEKLSITGVSINPELAGAPITQAEQRSLARLIRKSQADKLLEHHMSKTLHSIYFRSLKDQDLSEELSFAFLKSASLKSETEGFVMACQDGVLNTRWYKKNIMKMDTPTTCRACHRQQETIMHILSACSVHAPSGYVERHNAALRILYFHLRAAYGIDKEPVLPYVPLEIEAVVQNERARICWNYPVSTTRQINAVKPDILLLDKELKELFVVEFSSPAENNVVMKEEQKRQKYKDLMFELGTLYPGHKVRMVVLIIGCLGGMRANYVDELKIIPACRSLAEVLAHRMQKAVLLGSLHIIRSHEL

SEQ ID NO: 25806 - protein, 1481 aa, Adalia bipunctata
MSHKRKIHNVHYVLTKNRDDIRDNNSDDIMKVSTLLENFSSATKLPSSSNLITQIIIIIIITGYYFVVYGCDNPADPGHSQPMSDTYTLSLGKQSLPGDRQGASGVGAGRDSMRDTNGRMLRRQAPAIQEAMPSDEEDIDEERVQVVGRIGIQRSKEQPVVGTGSRNRTAQRGRHKWTPEQHNLLSALYRRSRPERRGYMNRLHGLWCENYPDLDFMTQQNLRDQISHLKRRGIIWRSQEQERTEQQAEEQVTDASSQHQQLTIDTTEEQAVALVRNIAGRTGTGIRSNRPIREHVRDVPEIENGGEQVTDAPNQQHQAIALGTRPRTEQVRDVPEIEHGEEQVTDAPNQQHQEIALGTRPRAEHVRDASEIEHVKEQVTDAPNQQHRAITPGARPRAGQVRDVPEIEHGEEQVTDAPNQQHQGIALGARPRAEQVRDVPEIEHAEEQVTDAPDQQQQMPRTVKDVPKLIVNTREAFEAAVRNPLVKATRIKTRHKAEDLAVLDKIIQDHLNETCSLEDVVAAVRAASSLLCPPKSTATNNDKHRLRLSRLDIKIKSMRQQASWYQCIIDVLKGKIKSSKKMKDMIEELRSIHRTVDLPTIHLLKQKAVDRIRSLAAARKKLIKRQKWIEDNNTFTAEPSKLFQSPQQKAQNPPSPQEVEEFWKSMYEQQAEIRDTPALLRFQQMCDQNQQQNDEPYEISTEDIRQALKNKRDFTAPGLDGIQNYWWKQFPATHQHLARLFSGMLTRREPIPSWLVEGRTVLIPKSGDLGQPKNYRPITCLNTLYKILTSVIQDQILRVIGPVWNSIYEQRGAKKGVQGCKDNLLIDKSVCLDARHYKRDLHTSWLDYAKAYDTTPHELIVRLLKMLKVYPNIIHAIENIIALWKTKFAIRAEGRTVYTGWVRYRRGVFQGDSLSPLLFCITLIPLTIELRESKIGYKAGPPGRRNHLISHLLYMDDLKLYAPSESALRQLLNIVSDYTSAMGMSFGLDKCAVFHLRRGKAEDAGEDIRLEDGMTFRHLEDGETYKFLGMKQRGVLETTQIKDALTASYKKKLRDIWKSQLSGKNKVSATNMLAIPILTYSFGVVNWTVNELLDLDRSTRKTMNMNRSLHPNSSIQRIYLPRSQGGRGLQCLEYQHYQQTLEMAVRILRSEDPLLKFVAQHEIANHGAFLFRAAQRAVEKLSITGVSINPELAGTPITQAEQRSLARLIRKSQADKLLEHHMSKNLHSIYFRSLKDQDLSEELSFAFLKSASLKSETEGFVMACQDGVLNTRWYKKNIMKMETPTTCRACHRQQETIMHILSACRVHAPSGYVERHNAALRILYFHLRAAYEIDKEPVLPYVPLEIEAVVQNERARICWNYPVSTTRQINAIKPDILLLDKELKELFVVEFSSPAENNVVMKEEQKRQKYKDLMFELGTLYPGHKVRMVVLIIGCLGGMRANYVDELKIIPACRSLAEVLAHRMQKAVLLGSLHIIRSHEL

SEQ ID NO: 25807 - protein, 1302 aa, Coccinella septempunctata
MSERNQLSLGKQSLPGDRQGTSGVGAGRDSMRDTNGRTLRRRAPATQKATPLDEEDIDEERVQVVGRIGIQSSQEHPVVGTGSRNRTAQRGRHKWTPEQHSLLSALYRRSGPDRRGYMNRLHSLWCENCPDLNYMTQQNLRDQISHLKRRGILQRPREQGGLEQQAEEQVTDALSQHQQLTVDITQEQAVALLSDIAGRTRTGTRSNRPITEHVRDVPDIERAEEQVTDAPDQQHQAMTHRSEAVALEARPRTEQVREVPEIELAGEQVTDAPDRQQQRPRTVRDSSELTDNTKEAFEAAVGDPLIKPTRIKSRHKAEDLAVLNSIIQDHLNETCSLEEVEAAVRAAAYLLCPPKSTAANNNNKHGKRLNRLDIKIKSMRQQASWYQCVIDVMKGKTKPSKRMREMIEELRAIHGTVNLPTVHLLKQKAVDKIRSLAAARKKLIRRKRWIEDNNTFTAEPSKLFQPQQQEVQNPPSPQDVEEFWKSLYEQPAKTRDTPALPRFQQMCDQTLQQNDELSEISAEDIRQALKNKNDFTAPGPDGIQNYWWKSFPATHKHLARLFSGMLIRREPIPSWLVEGRTVLIPKSGDLGQPKNYRPITCLNTLYKILTSVIQDRILRVIGPVWDSIYEQRGAKKGVQGCKDNLLIDKSVCLDARHYKRDLHTSWLDYAKAFDTSPHDLIIRLLKMLKVHPNIIHAIESIIALWKTKFAIRAEGRTVYTGWVRYRRGVFQGDSLSPLLFCITLMPLSIELRASKIGYKAGPPGRRNHLISHLMYVDDLKLYAPSRTALQQLLNIVSEYTSAMGMSFGLDKCAVFHLRRGRVDDPGEDIQLEDGMTFRRLEDGETYKFLGMKQRGVLETTQIKDALSASYKKKLRDIWKSQLSGKNKVSATNMLAIPILTYSFGVVNWTVNELLDLDRSTRKTMNMNRSLHPNSSIQRIYLPRSQGGRGLQCSEYQHYQQTLETAVRVLRSEDPLLKFVAQHELANHGAFLFRAAQRASEKLGITGVSMDPERAGAPITQADQRRLARLIRKSQSNTLLEHHMSKSLHSIFFRSLKDQDLSEELSFAFLKSASLKSETEGFVMACQDGVINTRWYKKNIMKMDTPTTCRACHSQQETIMHILSACRVHAPSGYIERHNAALRVLYFHLRAAYEIDKEPVLPYVPLEIEAVVQNEKARIYWNYPVSTTRQIKAIKPDILLLDKELKELFVVEFSSPAENNMVMKEVQKRQKYKDLVFELGTMYPGHKVRMVVLIIGCLGGMRANYVEELKIIPACRPWAEILAHRMQKAVLLGSLHIIRSHEL

SEQ ID NO: 25808 - protein, 1185 aa, Coccinella septempunctata
MNRLHGLWCENCPDLNYMTQQNLRDQISHLKRRGILQRPREQGRLEQQAEEQVTDALSQHQQLTVDITQEQAVALLSDIAGRTRTGTRSNRPITEHVRDVPDIERAEEQVTDAPDQQHQAMAHRSEAVALEARPRTEQVREVPEIELAGEQVTDAPDRQQQRPRTVRDSSELTDNTKEAFEAAVGDPLIKPTRIKSRHKAEDLAVLNSIIQDHLDETCSLEEVEAAVRAAAYLLCPPKSTAANNNIKHRKRLNRLDIKIKSMRQQASWYQCVIEVMKGKTKPSKRMREMIEELRAIHGTVNLPTVHLLKQKAVDKIRSLAAARKKLIRRKRWIEDNNTFTAEPSKLFQPQQQEVQNPPSPQDVEEFRKSLYEQPAKTRDTPALPRFQQMCDQTLQQNDELSEISAEDIRQALKNKNDFTAPGPDGIQNYWWKSFPATHKHLARLFSGMLIRREPIPSWLVEGRTVLIPKSGDLGQPKNYRPITCLNTLYKILTSVIQDRILRVIGPVWDSIYEQRGAKKGVQGCKDNLLIDKSVCLDVRHYKRDLHTSWLDYAKAFDTSPHDLIIRLLKMLKVHPNIIHAIESIIALWKTKFAIRAEGRTVNTGWVRYRRGVFQGDSLSPLLFCITLMPLSIELRASKIGYKAGPPGRRNHLISHLMYVDDLKLYAPSRTALQQLLNIVSEYTSAMGMSFGLDKCAVFHLRRGRVDDPGEDIQLEDGMTFRRLEDGKTYKFLGMKQRGVLETTQIKDALSASYKKKLRDIWKSQLSGKNKVSATNMLAIPILTYSFGVVNWTVNELLDLDRSTRKTMNMNRSLHPNSSIQRIYLPRSQGGRGLQCLEYQHYQQTLETAVRVLRSEDPLLKFVAQHELANHGAFLFRAAQRALEKLGITGVSIDPERAGAPITQADQRRLARLIRKSQSNTLLEHHMSKSLHSIFFRSLKDQDLSEELSFAFLKSASLKSETEGFVMACQDGVINTRWYKKNIMKMDTPTTCRACHSQQETIMHILSACRVHAPSGYIERHNAALRVLYFHLRAAYEIDKEPVLPYVPLEIEAVVQNEKARIYWNYPVSTTRQSNAIKPDILLLDKELKELFVVEFSSPAENNMVMKEEQKRQKYKDLVFELGTMYPGHKVRMVVLIIGCLGGMRANYVEELKIIPACRSWAEILAHRMQKAVLLGSLHIIRSHEL

SEQ ID NO: 25809 - protein, 1364 aa, Adalia bipunctata
MSDTYTLSLGKQSLPGDRQGASGVGAGRDSMRDTNGRMLRRQAPAIQEAMPSDEEDIDEERVQVVGRIGIQRSKEQPVVGTGSRNRTAQRGRHKWTPEQHSLLSALYKRSRPERRGYMNRLHGLWCENYPDLDFMTQQNLRDQISHLKRRGIIWRSQEQERTEQQAEEQVTDASSQHQQLTIDTTEEQAVALVRNIAGRTGTGIRSNRPIREHVRDVPEIENGGEQVTDAPNQQHQAIALGTRSRTEQVRDVPEIEHGEEQVTDAPNQQHQEITPGARPRAGQVRDVPEIEHGEEQVTDAPNQQHQGIALGARPRAEQVRDVPEIEHAEEQVTDAPDQQQQMPRTVTDVPKLIVNTWEAFEAAVRNPLVKATRIKTRHKAEDLAVLDRIIQDHLNETCSLEDVVAAVRAASSLLCPPKSTAKNNDKHRLRLNRLDIKIKSMRQQASWYQCIIDVLKGKIKSSKKMKDMIEELRSIHRTVDLPTVHLLKQKAVDRIRSLAAARKKLIKRQKWIEDNNTFTAEPSKLFQSPQQKAQNPPSPQEVEEFWKSLYEQQAEIRDTPALLRFQQMCDQNQQQNDEPSEISTEDIRQALKNKRDFTAPGLDGIQNYWWKKFPATHQHLARLFSGMLTRREPIPSWLVEGRTVLIPKSGDLGQPKNYRPITCLNTLYKILTSVIQYQILRVIGPVWNSIYEQRGAKKGVQGCKDNLLIDKSVCLDARHYKRDLHTSWLDYAKAYDTTPHELIVRLLKMLKVYPNIIHAIENIIALWKTKFAIRAEGRTVYTGWVRYRRGVFQGDSLSPLLFCITLIPLTIELRESKIGYKAGPPGRRNHLISHLLYMDDLKLYAPSESALRQLLNIVSDYTSSMGMSFGLDKCAVFHLRRGKAEDAGQDIRLEDGMTFRHLEDGETYKFLGMKQRGVLETTQIKDALTASYKKKLRDIWKSQLSGKNKVSATNMLAIPILTYSFGVVNWTVNELLDLDRSTRKTMNMNRSLHPNSSIQRIYLPRSQGGRGLQCLEYQHYQQTLEMAVRILRSEDPLLKFVAQHEIANHGAFLFRAAQRAVEKLSITGVSINPELAGTPITQAEQRSLARLIRKSQADKLLEHHMSKNLHSIYFRSLKDQDLSEELSFAFLKSASLKSETEGFVMACQDGVLNTRWYKKNIMKMDTPTTCRACHRQQETIMHILSACRVHAPSGYVERHNAALRILYFHLRAAYEIDKEPVLPYAPLEIEAVVQNERARICWNYPVSTTRQINAVKPDILLLDKELKELFVVEFSSPAENNVVMKEEQKRQKYKDLMFELGTLYPGHKVRMVVLIIGCLGGMRANYVDELKIIPACRSLAEVLAHRMQKAVLLGSLHIIRSHEL

SEQ ID NO: 25810 - protein, 1399 aa, Adalia bipunctata
MSDTYTKSLGKQSLPGDRQGASGVGAGRDSMRDTNGRMLRRQAPAIQEAMPSNEEDIDEERVQVVGRIGIQRSKEQPVVGTGSRNRTAQRGRHKWTPEQHSLLSSLYRRSRPERRGYMNRLHGLWCENYPDLDFMTQQNLRDQISHLKRRGIIWRSQEQEGTEQQAEEQVTDASSQHQQLTIDTTEEQAVALVRNIAGRTGTGIRSNRPIREHVRDVPEIENGGEQVTDAPNQQHQAIALGTRPRTEQVRDVPEIEHGEEQVTDAPNQKHQEIALGTRPRAEHVRDASEIEHGKEQVTDAPNQQHQAITPGARPRAGQVRDVPEKEHSEEQVTDAPNQQHQGIDLGARPRAEQVRDVPEIEHAEEQVTDAPDQQQQMPRTVADVPKLIVNTREAFEAAVRNPLVKATRIKTRHKAEDLAVFDKIIQDHLNETCSLEDVVAAVRAASSLLCPPKSTATNNDKHKLRLRRLDIKIKSMRQQASWYQCIIDVLKGKIKSSKKMKDMIEELRSIHRTVDLPTVHLLKQKAVDRIRSLAAARKKLIKRQKWIEENNTFTAEPSKLFQSPQQKAQNPPSPQEVEEFWKSLYEQQAEIRDTPALLRFQQMCDQNQQENDEPSEITIEDIRQALKNKRDFTAPGLDGIQNYWWKKFPATHRHLARLFRGMLTRREPIPSWLVEGRTVLIPKSGDLGQPKNYRPITCLNTLYKILTSAIQDQILRVMGPVWNSIYEQRGAKKGVQGCKDNLLIDKSVCLDARHYKRDLHTSWLDYAKAYDTTPHELIVRLLKMLKVYPNIIHAIENIIALWKTKFAIRAEGRTVYTGWVRYRRGVFQGDSLSPLLFCITLIPLTIELRESKIGYKAGPPGRRNHLISHLLYMDDLKLYAPSESALRQLLNIVSDYTSAMGMSFGLDKCAVFHLRRGKAEDAGEDIRLEDGMTFRHLEDGETYKFLGMKQRGVLETTQIKDALTASYKKKLRDIWKSQLSGKNKVSATNMLAIPILTYSFGVVNWTVNELLDLDRSTRKTMNMNRSLHPNSSIQRIYLPRSQGGRGLQCLEYQHYQQTLEMAVRILRSEDPLLKFVAQHEIANHGAFLFRAAQRALEKLSITGVSINPELAGAPITQAEQRSLARLIRKSQADKLLEHHMSKNLHSIYFRSLKDQDLSEELSFAFLKSASLKSETEGFVMACQDGVLNTRWYKKNIMKMDTPTTCRACHRQQETIMHILSACSVHAPSGYVERHNAALRILYFHLRAAYGIDKEPVLPYVPLEIEAVIQNERARICWNYPVSTTRQINAVKPDILLLDKELKELFVVEFSSPAENNVVMKEEQKRQKYKDLMIELGTLYPGHKVRMVVLIIGCLGGMRANYVDELKIIPACRSLAEVLAHRMQKAVLLGSLHIIRSHEL

SEQ ID NO: 25811 - protein, 1435 aa, Adalia bipunctata
MSDKFIRSLGEQSLPGDRQGASGVGAGRDSMRDTNGRMLRRQAPAIQEAMPLDEEDIDEERVQVVGRIGIQRSKEQPVVGTGSRNRTAQRGRHKWTPEQHDLLSALYRRSRPERRGYMNRLHGLWCENYPDLDYMTQQNLRDQISHLKRKGILWRSQEQERTEQQDGEQVTDASNQHQLLTIDTAEEQAVAMVINVAGQTTGTGTRSNRPITEHVRDVPRKEQGGEHVTDAPKQQHQAKASGARPRTEQISRIIRRGILWRSQEQERTEQQAEEQVTDASNQHQQLTIDTAEEQAVALVRHIAGQTGSITRFNRPITEHVRDVPKIEHGEEQVTDAQNQQHQAIALGPRPRTEQVRDVPVIELAGEQVTDAPDQRHQAIALGPRPRTEQVRDVPVIGLAEEQVTDAPDQQQQKPGTVRDVPKLIVNTREAFEAAVRNPLVKIFRMKTRHEAEDLAVLDNIIQDHLNETCSLEDVVAAVRAAASLLCPPKITATKEDKHKLRLRRLDTKIKSMRQQASWYQCIIDVLKGKIGSSKKMKDMIEELRSIHHRVDLPTVHLLKQKAVDKIRSLTAARKKLIKRQKWIEDNNTFNAEPSKLFQSQQQMTQKPPSPPEVEEFWKSIYEQRPETRDTPALLRFQQMCDQNQQQNDELSEISTEDIKQALKNKRDFTAPGLDGIQNYWWKRFPATHQHLARLFSGMLTRREPIPSWLVEGRTVLIPKSGDLGQPKNYRPITCLNTLYKILTSVIQHQILRVIGPVWDSIYEQRGAKKGVQGCKDNLLIDKSVCLDARFYKRDLHTSWLDYAKAYDTSPHELIIRLLKMLKVHPNIIHAIENIIALWKTKFAIRTEGRTVYTGWVRYRRGVFQGDSLSPLLFCITLIPLTIELRESKIGYKAGPPGRRNYLISHLLYMDDLKLYAPSESALRQLLNIVSDYTSAMGMSFGLDKCAVFHLRRGKAEDTGEDIRLEDGMIIRHLEDGETYKFLGMKQRGVLETTRIKDALTASYKKKLRDIWKSQLSGKNKVSATNMLAIPILTYSFGVVNWTVNELLDLDRSTRKTMNMNRSLHPNSSIQRIYLPRSQGGRGLQCLEYQHYQQTLEMAVRVLRSEDPLLKFVAQHEIANHGAFLFRAAQRALEKLSITGVSINPELAGAPITQADQRSLARLIRKSQSDTLIEHHMSKTLHSIYFRSLKDQDLSEELSFAFLKSASLKSETEGFVMACQDGVLNTRWYKKNIMKMDTPTTCRACHRQQETIMHILSACSVHAPSGYVERHNAALRILYFHLRAAYGIDKEPVLPYVPLEIEAVVQNERARICWNYPVSTTRQINAVKPDILLLDKELKELFVVEFSSPAENNVVMKEEQKRQKYKDLMFELGTLYPGHKVRMVVLIIGCLGGMRANYVDELKIIPACRSLAEVLAHRMQKAVLLGSLHIIRSHEL

SEQ ID NO: 25812 - protein, 1302 aa, Coccinella septempunctata
MSERNQLSLGKQSLPGDRQGTSGVGAGRDSMRDTNGRTLRRRAPATQKATPLDEEDIDEERVQVVGRIGIQSSQEHPVVGTGSRNRTAQRGRHKWTPEQHSLLSALYRRSGPDRRGYMNRLHGLWCENCPDLNYMTQQNLRDQISHLKRRGILQRSQEQGRLEQQAEEQVTDALSQHQQLTVDITQEQAVALLSDIAGRTRTGTRSNRPTTEHVRDVPDIERAEEQVTDAPGQQHQAMTHRGEAVALEARPRTEQVREVPEIELAGEQVTDAPDRQQQRPRTVRDSSELIDNTKEAFEAAVRDPLIKPSRIKSRHKAEDLAVLNSIIQDHLNETCSLEEVEAAVRAAAYLLCPPKSTAANNNNKHRKRLNQLDIKIKSMRQQASWYQCVIDVLKGKTKPSKRMKEMIEELRAAHGTVNLPTVHLLKQKAVDKIRSLAAARKKLIRRKRWIEDNNTFNAEPSKLFQPQQQEVQNPPSPQNVEEFWKSLYEQPAKTGDTPALPRFQQMCDQTLQQNDELSEISAEDIRQALKNKNDFTAPGPDGIQNYWWKSFPATHKHLARLFSGMLIRREPIPSWLVEGRTVLIPKSGDLGQPKNYRPITCLNTLYKILTSVIQDRILRVIGPVWDSIYEQRGAKKGVQGCKDNLLIDKSVCLDARHYKRDLHTSWLDYAKAFDTSPHDLIIRLLKMLKVHPNIIHAIESIIALWKTKFAIRAEGRTVYTGWVRYRRGVFQGDSLSPLLFCITLMPLSIELRASKIGYKAGPPGRRNHLISHLMYVDDLKLYAPSRTALQQLLNIVSDYTSAMGMSFGLDKCAVFHLRRGRVDDPGEDIQLEDGMTFRCLEEGETYKFLGMKQRGVLETTQIKDALSASYKKKLRDIWKSQLSGKNKVSATNMLAIPILTYSFGVVNWTVNELLDLDRSTRKTMNMNRSLHPNSSIQRIYLPRSQGGRGLQCLEYQHYQQTLETAVRVLRSEDPLLKFVAQHELANHGAFLFRAGQRALEKLGITGVSIDPERAGAPITQADQRRLARLIRKSQSNTLLEHHMSKSLHSIFFRSLKDQDLSEELSFAFLKSASLKSETEGFVMACQDGVINTRWYKKNIMKMDTPTTCRACHSQQETIMHILSACRVHAPSGYIERHNAALRVLYFHLRAAYEIDKEPVLPYVPLEIEAVVQNEKARIYWNYPVSTTRQITAIKPDILLLDKELKELFVVEFSSPAENNIVMKEEQKRQKYKDLVFELGTMYPGHKVRMVVLIIGCLGGMRANYVEELKIIPACRSWAEILAHRMQKAVLLGSLHVIRSHEL

SEQ ID NO: 25813 - protein, 1224 aa, Adalia bipunctata
MMKNNNLKRRGIIWRSQEQERTEQQAEEQVTDASSQHQQLTIDTTEEQAVALVRNIAGRTGTGIRSNRPIREHVRDVPEIENGGEQVTDAPNQQHQAIALGTRSRTEQVRDVPEIEHGEEQVTDAPNQQHQEITPGARPRAGQVRDVPEIEHGEEQVTDAPNQQHQGIALGARPRAEQVRDVPEIEHAEEQVTDAPDQQQQMPRTVTDVPKLIVNTWEAFEAAVRNPLVKATRIKTRHKAEDLAVLDRIIQDHLNETCSLEDVVAAVRAASSLLCPPKSTAKNNDKHRLRLNRLDIKIKSMRQQASWYQCIIDVLKGKIKSSKKMKDMIEELRSIHRTVDLPTVHLLKQKAVDRIRSLAAARKKLIKRQKWIEDNNTFTAEPSKLFQSPQQKAQNPPSPQEVEEFWKSLYEQQAEIRDTPALLRFQQMCNQNQQQNDEPSEISTEDIRQALKNKRDFTAPGLDGIQNYWWKKFPATHQHLARLFSGMLTRREPIPSWLVEGRTVLIPKSGDLGQPKNYRPITCLNTLYKILTSVIQDQILRVIGPVWNSIYEQRGAKKGVQGCKDNLLIDKSVCLDARHYKRDLHTSWLDYAKAYDTTPHELIVRLLKMLKVYPNIIHAIENIIALWKTKFAIRAEGRTVYTGWVRYRRGVFQGDSLSPLLFCITLIPLTIELRESKIGYKAGPPGRRNHLISHLLYMDDLKLYAPSESALRQLLNIVSDYTSSMGMSFGLDKCAVFHLRRGKAEDAGQDIRLEDGMTFRHLEDGETYKFLGMKQRGVLETIQIKDALTASYKKKLRDIWKSQLSGKNKVSATNMLAIPILTYSFGVVNWTVNELLDLDRSTRKTMNMNRSLHPNSSIQRIYLPRSQGGRGLQCLEYQHYQQTLEMAVRILRSEDPLLKFVAQHEIANHGAFLFRAAQRAVEKLSITGVSINPELAGTPITQAEQRSLARLIRKSQADKLLEHHMSKNLHSIYFRSLKDQDLSEELSFAFLKSASLKSETEGFVMACQDGVLNTRWYKKNIMKMDTPTTCRACHRQQETIMHILSACRVHAPSGYVERHNAALRILYFHLRAAYEIDKEPVLPYVPLEIEAVVQNERARICWNYPVSTTRQINAVKPDILLLDKELKELFVVEFSSPAENNVVMKEEQKRQKYKDLMFELGTLYPGHKVRMVVLIIGCLGGMRANYVDELKIIPACRSLAEVLAHRMQKAVLLGSLHIIRSHEL

SEQ ID NO: 25814 - protein, 1481 aa, Adalia bipunctata
MCHWSFHLYQSFAKNRNNNNNNNNPARGYYCVVYGCDNPADPGHSQPMSDIFIRSLGEQSLPGDRQGASGVGAGRDSMRDTNGRMLRRQAPAIQEAMPLDEEDIDEERVQVVGRIGIQRSKEQPVVGTGSRNRTAQRGRHKWTPEQHDLLSALYRRSRPERRGYMNRLHGLWCENYPDLDYMTQQNLRDQISHLKRKGILWRSQEQERTEQQDGEQVTDASNQHQLLTIDTAEEQAVAMVRNVAGQTGTGTRSNRPITEHVRDVPRKEQGGEHVTDAPKQQHQAKASGARPRTEQISRIIRRGILWRSQEQERTEQQAEEQVTDASNQHQQLTIDTAEEQAVALVRHIAGQTGSITRFNRPITEHVRDVPKIEHGEEQVTDAQNQQHQAIALGPRPRTEQVRDVPVIELAGEQVTDAPDQRHQAIALGPRPRTEQVRDVPVIGLAEEQVTDAPDQQQQKPGTVRDVPKLIVNTREAFEAAVRNPLVKIFRMKTRHEAEDLAVLDNIIQDHLNENCSLEDVVAAVRAAASLLCPPKSTATKEDKHKLRLRRLDTKIKSMRQQASWYQCIIDVLKGKIGSSKKMKDMIEELRSIHHRVDLPTVHLLKQKAVDKIRSLTAARKKLIKRQKWIEDNNTFNAEPSKLFQSQQQMTQKPPSPPEVEEFWKSIYEQRPETRDTPALLRFQQMCDQNQQQNDEVSEISTEDIKQALKNKRDFTAPGLDGIQNYWWKRFPATHQHLARLFSGMLTRREPIPSWLVEGRTVLIPKSGDLGQPKNYRPITCLNTLYKILTSVIQHQILRVIGPVWDSIYEQRGAKKGVQGCKDNLLIDKSVCLDARFYKRDLHTSWLDYAKAYDTSPHELIIRLLKMLKVHPNIIHAIENIIALWKTKFAIRTEGRTVYTGWVRYRRGVFQGDSLSPLLFCITLIPLTIELRESKIGYKAGPPGRRNHLISHLLYMDDLKLYAPSESALRQLLNIVSDYTSAMGMSFGLDKCAVFHLRRGKAEDAGEDIRLEDGMIIRHLEDGETYKFLGMKQRGVLETTRIKDALTASYKKKLRDIWKSQLSGKNKVSATNMLAIPILTYSFGVVNWTVNELLDLDRSTRKTMNMNRSLHPNSSIQRIYLPRSQGGRGLQCLEYQHYQQTLEMAVRVLRSEDPLLKFVAQHEIANHGAFLFRAAQRALEKLSITGVSINPELAGAPITQADQRSLARLIRKSQSDTLLEHHMSKTLHSIYFRSLKDQDLSEELSFAFLKSASLKSETEGFVMACQDGVLNTRWYKKNIMKMDTPTTCRACHRQQETIMHILSACSVHAPSGYVERHNAALRILYFHLRAAYGIDKEPVLPYVPLEIEAVVQNERARICWNYPVSTTRQINAVKPDILLLDKELKELFVVEFSSPAENNVVMKEEQKRQKYKDLMFELGTLYPGHKVRMVVLIIGCLGGMRANYVDELKIIPACRSLAEVLAHRMQKAVLLGSLHIIRSHEL

SEQ ID NO: 25815 - protein, 1434 aa, Adalia bipunctata
MSDKYIRSLGEQSLPGDRQGASGVGAGRDSMRDTNGRMLRRQAPAIQEAMPLDEEDIDEERVQVVGRIGIQRSKEQPVVGTGSRNRTAQRGRHKWTPEQHDLLSALYRRSRPERRGYMNRLHGLWCENYPDLDFMTQQNLRDQISHLKRKGILWRSQEQEMTEQQDGEQVTDASNQHQLLTIDTAEEQAVAMVRNVAGQTGTGTRSNRPITEHVRDVPRKEQGGEHVTDAPKQQHQAKASGARPRTEQISRIIRRGILWRSQEQERTEQQAEEQVTDASNQHQQLTIDTAEEQAVALVRNIAGQTGSSTRFNRPITEHVRDVPRIQHGGEQVTDAQNQQHQAIALGPRPRTEQVRDVPVIELAGEQVTDAPDQQHQAIALGPRPRTEQVRDVPVIGLAEEQVTDAPDQQQQKPGTVRDVPKLIVNTREAFEAAVRNPLVKTFRIKTRHEAEDLAVLDNIIQDHLNETCSLEDVVAAVRAAASLLCPPKSTATKEDKHKLRLRRLDTKIKSMRQQASWYQCIIDVLKGKIESSKKMKDMIEELRSIHHRVDLPTVHLLKQKAVDRIRSLAAARKKLIKRQKWIEDNNTFTAEPSKLFQSPQQKAQNPPSPQEVEEFWKSIYEQRAETRDTPALLRFQQMCDQNQQQNDELCEISTEDIRKALKNKRDFTAPGLDGIQNYWWKRFPATHQHLARLFSRMLTRREPIPSWLVEGRTVLIPKSGDLGQPKNYRPITCLNTLYKILTSVIQHQILRVIGPVWDSIYEQRGAKKGVQGCKDNLLIDKSVCLDARYYKRDLHTSWLDYAKAYDTSPHELIIRLLKMLKVHPNIIHAIENIIALWKTKFAIRAEGRTVYTGWVRYRRGVFQGDSLSPLLFCITLIPLTIELRESKIGYKAGPPGRRNHLISHLLYMDDLKLYAPSESALRQLLNIVSDYTSAMGMSFGLDKCAVFHLRRGKAEDAGEDIRLEDGMTIRHLEEGETYKFLGMKQRGVLETTQIKDALTASYKKKLRDIWKSQLSGKNKVSATNMLAIPILTYSFGVVNWTVNELLDLDRSTRKTMNMNRSLHPNSSIQRIYLPRSQGGRGLQCLEYQHYQQTLEMAVRILRSEDPLLKFVAQHEIANHGAFLFRAAQRAVEKLSITGVSINPELAGTPITQAEQRSLARLIRKSQADKLLEHHMSKNLHSIYFRSLKDQDLSEELSFAFLKSASLKSETEGFVMACQDGVLNTRWYKKNIMKMDTPTTCRACHGQQETIMHILSACRVHAPSGYVERHNAALRILYFHLRAAYEIDKEPVLPYVPLEIEAVVQNERARICWNYPVSTTRQINAVKPDILLLDKELKELFVVEFSSPAENNVVMKEEQKRQKYKDLMFELGTLYPGHKVRMVVLIIGCLGGMRANYVDELKIIPACRSLAEVLAHRMQKAVLLGSLHIIRSHEV

SEQ ID NO: 25816 - protein, 1364 aa, Adalia bipunctata
MSDTYKLSLGKQSLPGDRQGASGVGAGRDSMRDTNGRMLRRQAPAIQEAMPSDEEDIDEERVQVVGRIGIQRSKEQPVVGTGSRNRTAQRGRHKWTPEQHSLLSALYRRSRPERRGYMNRLHGLWCENYPDLDFMTQQNLRDQISHLKRRGIIWRSQEQERTEQQAEEQVTDASSQHQQLTIDTTEEQAVALVRNIAGRTGTGIRSNRPIREHVRDVPEIKNGGEQVTDAPNQQHQEIALGARPRAEHVRDASEIEHGKEQVTDAPNQQHRAITPGARPRAGQVRDVPGIEHGEEQVTDAPNQQHQGIALGARPRAEQVRDVPEIEHAEEQVTDAPDQQQQMPRTVTDVPKLIVNTREAFEAAVRNPLVKATRIKTRHKAEDLAVLDKIIQDHLNETCSLEDVVAAVRAASSLLCPPKSKATNNDKHRLRLSRLDIKIKSMRQQASWYQCIIDVLKGKIKSSKKMKDMIEELRSIHRTVDLPTAHLLKQKAVDRIRSLAAARKKMIKRQKWIEDNNTFTAEPSKLFQSPQQKAQNPPSLQEVEEFWKSLYEQQAEIRDTPALLRFQQMCDQNQQQNDEPSEISTEDIRQALNNKRDFTAPGLDGIQNYWWKKFPATHQHLARLFSGMLTRREPIPSWLVEGRTVLIPKSGDLGQSKNYRPITCLNTLYKILTSVIQDQILRVIGPVWNSIYEQRGAKKGVQGCKDNLLIDKSVCLDARHYKRDLHTSWLDYAKAYDTTQHELIVRFLKMLKVYPNIIHAIENIIALWKTKFAIRAEGRTVYTGWVRYRRGVFQGDSLSPLLFCITLIPLTIELRESKIGYKAGPPGRRNHLISHLLYMDDLKLYAPSESALRQLLDIVSDYTSAMGMSFGLDKCAVFHLRRGKAEDAGQDIRLEDGMTFRHLEDGETYKFLGMKQRGVLETTQIKDALTASYKKKLKDIWKSQLSGKNKVSATNMLAIPILTYSFGVVNWTVNELLDLDRSARKTMNMNRSLHPNSSIQRIYLPRSQGGRGLQCLEYQHYQQTLEMAVRILRSEDPLLKFVAQHEIANHGAFLFRAAQRAVEKLSITGVSINPELAGAPITQAEQRSLARLIRKSQADKLLEHHMSKNLHSIYFRSSKDQDLSEELSFAFLKSASLKSETEGFVMACQDGVLNTRWYKKNIMKMDTSTTCRACHRQQETIMHILSACRVHAPSGYVERHNAALRILYFHLRAAYDIDKEPVLPYVPLEIEAVVQNERARICWNYPVSTTRQINAVKPDILLLDKELKELFVVEFSSPAENNVVMKEEQKRQKYKDLMFELGTLYPGHKVRMVVLIIGCLGGMRANYVDELKIIPACRSLAEVLAHRMQKAVLLGSLHIIRSHEL

SEQ ID NO: 25817 - protein, 1185 aa, Coccinella septempunctata
MNRLHGLWCENCPDLNYITQQNLRDQISHLKRRGILQRSREQGRLEQQDEEQVTDALSQHQQLTVDITQEQAVALLSDIAGRTRTGTRSNRPITEHVRDVPDIERTEEQVTDAPGQQHQAMTHRGEAVALEARPRKEQVREVPEIELAGEQVTDAPDRQQQRPRTVRDSSELIDNTKEAFEAAVRDPLIKPTRIKSRHKAEDLAVLNSIIQDHLNETCSLEEVEAAVRAAAYLLCPPKSTAANNNKKHRKRLNRLDIKIKSMRQQASWYQCVIDVLKGKTKSSRRMKEMIEELRATHGTVNLPTVHLLKQKAVDKIRSLAAARKKLIRRKRWIEDNNTFTAEPSKLFQPQQQEVQNPPSPQDVEEFWKSLYEQPAKTRDTPALPRFQQMCDQTLQQNDELSEISAEDITQALKNKNDFTAPGPDGIQNYWWKSFPATHKHLARLFSGKLIRREPIPSWLVEGRTVLIPKSGDLGQPKNYRPITCLNTLYKILTSVIQDRILRVIGPVWDSICEQRGAKKGVQGCKDNLLIDKSVCLDARHYKRDLHTSWLDYAKAFDTSPHDLIIRLLKMLKVHPNIIHAIEAIIALWKTKFAIRAEGRTVYTGWVRYRRGVFQGDSLSPLLFCITLMPLSIELRASKIGYKAGPPGRRNHLISHLMYVDDLKLYAPSRTALQQLLNIVSDYTSAMGMSFGLDKCAVFHLRRGRVDDPGEDIQLEDGMTFRCLEEGETYKFLGMKQRGVLETTQIKDALSASYKKKLRDIWKSQLSGKNKVSATNMLAIPILTYSFGVVNWTVNELLDLDRSTRKTMNMNRSLHPNSSIQRIYLPRSQGGRGLQCLEYQHYQQTLETAVRVLRSEDPLLKFVAQHELANHGAFLFRAAQRALEKLGITGVSIDPERAGAPITQADQRRLARLIRKSQSNTLLEHHMSKSLHSIFFRSLKDQDLSEELSFAFLKSASLKSETEGFVMACQDGVINTRWYKKNIMKMDTPTTCRACHSQQETIMHILSACRVHASSGYIERHNAALRVLYFHLRAAYEIDKEPVLPYVPLEIEAVVQNEKARIYWNYPVSTTRQINAIKPDILLLDKELKELFVVEFSSPAENNIVMKEEQKRQKYKDLIFELGTMYPGHKVRMVVLIIGCLGGMRANYVEELKIIPACRSWAETLAHRMQKAVLLGSLHVIRSHEL

SEQ ID NO: 25818 - protein, 923 aa, Adalia bipunctata
MRQQASWYQCIIDVLKGKIESSKKMKDMIEELRSIHQREDLPTVHLLKQKAVDRIRSLAAARKKLIKRQKWIEDNNTFNAEPSKLFQSQQQMTQKPPSPPEVEEFWKSIYERAETRDTPALLRFQQMCDQNQQQNDELSEISTEDIRQALKNKRDFTAPGLDGIQNYWWKRFPATHQHLARLFSGMLTRREPIPSWLVEGRTVLIPKSGDLGQPKNYRPITRLNTLYKILTSVIQHQILRVIGPVWDSIYEQRGAKKGVQGCKDNLLIDKSVCLDARYYKRDLHTSWLDYAKAYDTSPHELIIRLLKMLKVHPNIIQAIENIIALWKTKFAIRTEGRTVYTEWVRYRRGVFQGDSLSPLLFCITLIPLTIELRESKIGYKAGPPGRRNHLISHLLYMDDLKLYAPSESALRQLLNIVSDYTSAMGMSFGLDKCAVFHLRRGKAEDAGEDIRLEDGMTIRHLEEGEAYKFLGMKQRGVLETTQIKDASTASYKKKLRDIWKSQLSGKNKVSATNMLAIPILTYSLGVVNWTVNELLDLDRSTRKTMNMNRSLHPNSSIQRIYLPRSQGGRGLQCLEYQHYQQTLEMAVRILRSEDPLLKFVAQHEIANHGAFLFRAAQRAVEKLSITGVSINPELAGTPITQAEQRSLARLIRKSQADKLLEHHMSKNLHSIYFRSLKDQDLSEELSFAFLKSASLKSETEGFVMACQDGVLNTRWYKKNIMKMDTPTTCRACHRQQETIMHILSACRVHAPSGYVERHNAALRILYFHLRAAYEIDKEPVLPYVPLEIEAVVQNERARICWNYPVSTTRQINAVKPDILLLDKELKELFVVEFSSPAENNVVMKEEQKRQKYKDLMFELGTLYPGHKIRMVVLIIGCLGGMRANYVDELKIIPACRPPAEVLAHRMQKAVLLGSLHIIRSHEL

SEQ ID NO: 25819 - protein, 1434 aa, Adalia bipunctata
MSERYIRSLGEQSLPGDRQGASGVGAGRDSMRDTNGRMLRRQAPAIQEAMPLDEEDIDEERVQVVGRIGIQRSKEQPVVGTGSRNRTAHRGRHKWTPEQHDLLSALYRRSRPERRGYMNRLHGLWCENYPDLDYMTQQNLRDQISHLKRKGILWRSQEQERREQQDEEQVTDASNQHQLLTIDTAEEQAVAMVRNIAGQTGTGTRSNRPITEHVRDVPRKEKGEEHVTDAPKQQHQAKALGARPRKEQISRVIRRGILWRSQEQERTEQQAEEQVTDASIQHQQLTIDTAEEQAVALVRNIAVKTGSSTRFNRPITEHVRDVPKIEHGEEQVTDAQNQQHQAIALGPRPRTEQVRDVSVIELAGEQVTDAPDQQHQAIALGSRPRTEQVRDVPVIGLAEEQVTDAADQQQKNPGTVRDVPKLIVNTREAFEAAVRNPLVKTSRIKTRHEAEDLAVLDNIIQDHLNETCSLEDVVAAVRAAASLLCPPKSTATKEDKHKLRLRRLDTKIKSMRQQASWYQCIIDVLKGKIESSKKMKDMIEELRSIHHRVDLPTVHLLKQKAVDKIRSLAAARKKLIKRQKWIEDNNTFNAEPSKLFQSQQQMTQKPPSPPEVEEFWKSIYEQRAETRDTPALLRFQQMCDQNQQQNDELSEISTEDIRQALKNKRDFTAPGMDGIQNYWWKRFPATHQHLARLFNGMLTRREPIPSWLVEGRTVLIPKSGDLGQPKNYRPITCLNTLYKILTSVIQHQILRVIGPVWDSIYEQRGAKKGVQGCKDNLLIDKSVCLDARYYKRDLHTSWLDYAKAYDTSPHELIIRILKMLKVHPNIIHAIENIIALWKTKFAIRTEGRTVYTGWVRYRRGVFQGDSLSPLLFCITLIPLTIELRESKIGYKAGPPGRRNHLISHLLYMDDLKLYAPSESALRQLLNIVSDYTSAMGMSFGLDKCAVFHLRRGKAEDAGEDIQLEDGMTIRHLEEGETYKFLGMKQRGVLETTQIKDALTASYKKKLRDIWKSQLSGKNKVSATNMLAIPILTYSFGVVNWTVNELLDLDRSTRKTMNMNRSLHPNSSIQRIYLPRSQGGRGLQCLEYQHYQQTLEMAVRILRSEDPLLKFVAQHEIANHGAFLFRAAQRAVEKLSITGVSINPELAGTPITQAEQRSLARLIRKSQADKLLEHHMSKSLHSIYFRSLKDQDLSEELSFAFLKSASLKSETEGFVMACQDGVLNTRWYKKNIMKMDTPTTCRACHRQQETIMHILSACRVHAPSGYVERHNAALRILYFHLRAAYEIDKEPVLPYVPLEIEAVIQNERARICWNYPVSTTRQINAVKPDILLLDKELKELFVVEFSSPAENNVVMKEEQKRQKYKDLMFELGTLYPGHKVRMVVLIIGCLGGMRANYVDELKIIPACRSLAEVLAHRMQKAVLLGSLHIIRSHEV

SEQ ID NO: 25820 - protein, 1302 aa, Coccinella septempunctata
MSERNQLSLGKQSLPGDRQGTSGVGAGRDSMRDTNGRTLRRRAPATQKATPLDEEDIDEERVQVVGRIGIQSSQEHPVVGTGSRNRTAQRGRHKWTPEQHSLLSALYRRSGPDRRGYMNRLHGLWCENCPDLNYMTQQNLRDQISHLKRRGILQRPREQGGLKQQAEEQVTDALSQHQQLTVDITQEQAVALLSDIAGRTRTGTRSNRPITEHVRDVPDIERAEEQVTDAPDQQHQAMTHRSEAVALEARPRTEQVREVPEIELAGEQVTDAPDRQQQRPRTVRDSSELTDTTKEAFEAAVGDPLIKPTRIKSRHKAEDLAVLNSIIQDHLNETCSLEEVEAAVRAAAYLLCPPKSAAANNNNKHRKRLNRLDIKIKSMRQQASWYQCVIDVMKGKTKPSKRMREMIEELRAIHGTVNLPTVHLLKQKAVDKIRSLAAARKKLIRRKRWIEDNNTFTAEPSKLFQPQQQEVQNPPSPQDVEEFWKSLYEQPAKTRDTPALPRFQQMCNQTLQQNDELSEISAEDIRQALKNKNDFTAPGPDGIQNYWWKSFPATHKHLARLFSGMLIRREPIPSWLVEGRTVLIPKSGDLGQPKNYRPITCLNTLYKILTSVIQDRILRVIGPVWGSIYEQRGAKKGVQGCKDNLLIDKSVCLDARHYKRDLHTSWLDYAKAFDTSPHDLIIRLLKMLKVHPNIIHAIESIIALWKTKFAIRAEGRTVYTGWVRYRRGVFQGDSLSPLLFCITLMPLSIELRASKIGYKAGPPGRRNHLISHLMYVDDLKLYAPSRTALQQLLNIVSEYTSAMGMSFGLDKCAVFHLRRGRVDDPGEDIQLEDGMTFRRLEDGETYKFLGMKQRGVLETTQIKDALSASYKKKLRDIWKSQLSGKNKVSATNMLAIPILTYSFGVVNWTVNELLDLDRSTRKTMNMNRSLHPNSSIQRIYLPRSQGGRGLQCLEYQHYQQTLETAVRVLRSEDPLLKFVAQHELANHGAFLFRAAQRALEKLGITGVSIDPERAGAPITQADQRRLARLIRKSQSNTLLEHHMSKSLHSIFFRSLKDQDLSEELSFAFLKSASLKSETEGFVMACQDGVINTRWYKKNIMKMDTPTTCRACHSQQETIMHILSACRVHAPSGYIERHNAALRVLYFHLRAAYEIDKEPVLPYVPLEIEAVVQNEKARIYWNYPVSTTRQINAIKPDILLLDKELKELFVVEFSSPAENNMVMKEEQKRQKYKDLVFELGTMYPGHKVRMVVLIIGCLGGMRANYVEELKIIPACRPWAEILAHRMQKAVLLGSLHIIRSHEL

SEQ ID NO: 25821 - protein, 1434 aa, Adalia bipunctata
MSDRYIRSLGEQSLPGDRQGASGVGAGRDSMRDTNGRMLRRQAPAIQEAMPLDEEDIDEERVQVVGRIGIQRSKEQPVVGTGSRNRTAQRGRHKWTPEQHDLLSALYRRSRPERRGYMNRLHGLWCENYPDLDYMTQQNLRDQISHLKRKGILWRSQEQERTEQQDGEQVTDASNQHQLLTIDTAEEQAVAMVRNVAGQTGTGTRSNRPITEHVRDVPRKEQGGEHVTDAPKQQHQAKASGARPRTEQISRIIRRGILWRSQEQERTEQQAEEQVTTASNQHQQLTIDTAEEQAVALVRHIAGQTGSITRFNRPITEHVRDVPKIEHGEEQVTDAQNQQHQAIALGPRPRTEQVRDVPVIELAGEQVTDAPDQRHQAIALGPRPRTEQVRDVPVIGLAEEQVTDAPDQQQQKPGTVRDVPKLIVNTREAFEAAVRNPLVKIFRMKTRHEAEDLAVLDNIIQDHLNETCSLEDVVAAVRAAASLLCPPKSTATKEDKHKLRLRRLDTKIKSMRQQASWYQCIMDVLKGKIGSSKKMKDMIEELRSIHHRVDWPTVHLLKQKAVDKIRSLTAARKKLIKRQKWIEDNNTFNAEPSKLFQSQQQMTQKPPSPPEVEEFWKSIYEQQPETRDTPALLRFQQMCDQNQQQNDELSEISTEDIKQALKNKRDFTAPGLDGIQNYWWKRFPATHQHLARLFSGMLTRREPIPSWLVEGRTVLIPKSGDLGQPKNYRPITCLNTLYKILTSVIQHRILRVIGPVWDSICEQRGAKKGVQGCKDNLLIDKSVCLDARFYKRDLHTSWLDYAKAYDTSPHELIIRLLKMLKVHPNIIHAIENIIALWKTKFAIRTEGRTVYTGWVRYRRGVFQGDSLSPLLFCITLIPLTIELRESKIGYKAGPPGRRNHLISHLLYMDDLKLYAPSESALRQLLNIVSDYTSAMGMSFGLDKCAVFHLSRGKAEDAGEDIQLEDGMIIRHLEDGETYKFLGMKQRGVLETTQIKDALTASYKKKLRDIWKSQLSGKNKVSATNMLAIPILTYSFGVVNWTVNELLDLDRSTRKTMNMNRSLHPNSSIQRIYLPRSQGGRGLQCLEYQHYQQTLEMAVRVLRSEDPLLKFVAQHEIANHGAFLFRAAQRALEKLSITGVSINPELAGAPITQADQRSLARLIRKSQSDTLLEHHMSKTLHSIYFRSLKDQDLSEELSFAFLKSASLKSETEGFVMACQDGVLNTRWYKKNIMKMDTPTTCRACHRQQETIMHILSACSVHAPSGYVERHNAALRILYFHLRAAYGIDKEPVLPYVPLEVEAVVQNERARICWNYPVSTTRQINAVKPDILLLDKELKELFVVEFSSPAENNVVMKEEQKRQKYKDLMFELGTLYPGHKVRMVVLIIGCLGGMRANYVDELKIIPACRSLAEVLAHRMQKAVLLGSLHIIRSHEL

SEQ ID NO: 25822 - protein, 1464 aa, Adalia bipunctata
MMKNNNKPARGYYCVVYGCDNPADPGHSQPMSDKYIRGLGEQSLPGDRQGASGVGAGRDSMRDTNGRMLRRQAPAIQEAMPLDEEDIDEERVQVVGRIGIQRSKEQPVVGTGSRNRTAQRGRHKWTPEQHDLLSALYRRSRPERRGYMNRLHGLWCENYPDLDYMTQQNLRDQISHLKRKGILWRSQEQERMEQQDGEQVTDASNQHQLLTIDTAEEQAVAMVRNVAGQTGTGTRSNRPITEHVRDVPRKEQGGEHVTDAPKQQHQAKASGARPRTEQISRIIRRGILWRSQEQERTEQQAEEQVTDASNQHQQLTIDTAEEQAVALVRNIAGQTGSSTRFDRPITEHVRDVPRIEHGEEQVTDAQNQQHQAIALGPRPRTEQVRDVPVIELAGEQVTDAPDQQHQAIALGPRPRTEQVRDVPVIGLAEEQVTDTPDQQQQKPGTVRDVPKLIVNTREAFEAAVRNPLVKTFRIKTRHEAEDLAVLDNIIQDHLNETCSLEDVVAAVRAAASLLCPPKSTATKEDKHKLRLRRLDTKIKSMRQQASWYQCIIDVLKGKIESSKKMKDMIEELRSIHHRVDLPTVHLLKQKAVDRIRSLAAARKKLIKRQKWIEDNNTFTAEPSKLFQSPQQKTQNPPSPQEVEEFWKSIYEQRAETRDTPALLRFQQMCDQNQQQNDELCEITTEDIRQALKNKRDFTAPGLDGIQNYWWKRFPATHQHLARLFSGVLTRREPIPSWLVEGRTVLIPKSGDLGQPKNYRPITCLNTLYKILTSVIQHQILRVIGPVWDSIYEQRGAKKGVQGCKDNLLIDKSVCLDARYYKRDLHTSWLDYAKAYDTSPHELIIRLLKMLKVHPNIIHAIENIIALWQTKFAIRAEGRTVYTGWVRYRRGVFQGDSLSPLLFCITLIPLTIELRESKIGYKAGPPSRRNHLISHLLYMDDLKLYAPSESALRQLLNIVSDYTSAMGMSFGLDKCAVFHLRRGKAEDAGEDIPLEDGMTIRHLEEGETYKFLGMKQRGVLETTQIKDALTASYKKKLRDIWKSQLSGKNKVSATNMLAIPILTYSFGVVNWTVNELLDLDRSTRKTMNMNRSLHPNSSIQRIYLPRSQGGRGLQCLEYQHYQQTLEMAVRILRSEDPLLKFVAQHEIANHGAFLFRAAQRAVEMLSITGVSINPELAGTPITQAEQRSLARLIRKSQADKLLEHHMSKNLHSIYFRSLKDQDLSEELSFAFLKSASLKSETEGFVMACQDGVLNTRWYKKNIMKMDTPTTCRACHGQQETIMHILSACRVHAPSEYVERHNAALRILYFHLRAAYEIDKEPVLPYVPLEIEAVVQNERARICWNYPVSTTRQINAVKPDILLLDKELKELFVVEFSSPAENNVVMKEEQKRQKYKDLMFELGTLYPGHKVRMVVLIIGCLGGMRANYVDELKIIPACRSLAEVLAHRMQKAVLLGSLHIIRSHEV

SEQ ID NO: 25823 - protein, 1469 aa, Adalia bipunctata
MSDKYIRSLGEQSLPGDRQGASGVGAGRDSMRDTNGRMLRRQAPAIQEAMPLDEEDIDEERVQVVGRIGIQRSKEQPVVGTGSRNRTAQRGRHKWTPEQHDLLSALYRRSRPGRRGYMNRLHGLWCENYPDLDYMTQQNLRDQISHLKRKGILWRSQEQERTEQQDEEQVTDASNQHQLLTIDTAEEQAVAMVRNIAGQTGTGTRSNRPITEHVRDVPRKEQGGEHVTDSPKQQHQAKALGARPRTEQISRVIRRGILWRSQEQERTEKQAEEQVTDASNQHQQLTIDTVEEQAVALVRNIAGQTGSSTRFNRPITEHVRDVPKIEHGGEQVTDAQNQQHQTIALGPRPRTEQMRDFPLIGLAEEQVTDARDQQHQAKAQGPRPRTEQVRDVPVIGLAEEQVTDAPDQQHQAKAQGPRPRTEQVRDVPVIGLAEEQVTDAPDQQQQKPGTVRDIPKLIVNTREAFEAAVRNPLIKTSRIKTRHEAEDLAALDNIIQDHLNETCSLEDVVAAVRAAASLLCPPKSTATKEDKHKLRLRRLDTKIKSMRQQASWYQCIIDVLKGKIESSKKMKDMIEELRSIHHRVDLPTFHLLKQKAVDRIRSLAAARKKLIKRQKWIEDNNTFNAEPSKLFQSQQKMTQKPPAPPEVEEFWKSIYEQRVETRDTPALLRFQQMCDQNQQQNDELSEISTEDIRQALKNKRDFTAPGLDGIQNYWWKRFPATHQHLARLFSGMLTRREPIPSWLVEGRTVLIPKSGDLGQPKNYRPITCLNTLYKILTSVIQHQILRVIGPVWDSIYEQRGAKKGVQGCKDNLLIDKSVCLDARYYKRDLHTSWLDYAKAYDTSPHELIIRLLKMLKVHPNIIHAIEKIIALWKTRFAIRTEGRTVYTRWVRYRRGVFQGDSLSPLLFCITLIPLTIELRESKIGYKAGPPGRRNHLISHLLYMDDLKLYAPSESALRQLLNIVSDYTSAMGMSFGLDKCAVFNLRRGKAEDAGEDIRLEDGMTIRHLEEGETYKFLGMKQRDVLETTQIKDALTASYKKKLRDIWKSQLSGKNKVSATNMLAIPILTYSFGVVNWTVNELLDLDRSTRKTMNMNRSLHPNSSIQRIYLPRSQGGRGLQCLEYQHYQQTLEMAVRILRSEDPLLKFVAQHEIANHGAFLFRAAQRAVEKLSITGVSINPELAGTPITQAEQRSLARLIRKSQADKLLEHHMSKNLHSIYFRSLKDQDLSEELSFAFLKSASLKSETEGFVMACQDGVLNTRWYKKNIMKMDTPTTCRACHRQQETIMHILSACRVHAPSGYVERHNAALRILYFHLRAAYEIDKEPVLPYVPLEIEAVVQNERARICWNYPISTTRQINAVKPDILLLDKELKELFVVEFSSPAENNVVMKEEQKRQKYKDLMFELGTLYPGHKVRMVVLIIGCLGGMRANYVDELKIIPACRSLAEVLAHRMQKAVLLGSLHIIRSHEV

SEQ ID NO: 25824 - protein, 1302 aa, Coccinella septempunctata
MSERNQLSLGKQSLPGDRQGTSGVGAGRDSMRDTNGRTLRRRAPATQKATPLDEEDIDEERVQVVGRIGIQSSQEHPVVGTGSRNRTAQRGRHKWTPEQHSLLSALYRRSGPDRRGYMNRLHGLWCENCPDLNYMTQQNLRDQISHLKRRGILQRSQEQGRLEQQAEEQVTDALSQHQQLTVDITQEQVVALLSDIAGRTRTGTRSNRPTTEHVRDVPDIERAEEQVTDAPGQQHQAMTHRGEAVALEARPRTEQVREVPEIELAGEQVTDAPDRQQQRPRTVRDSSELIDNTKEAFEAAVRDPLIKPTRIKSRYKAEDLAVLNSIIQDHLNETCSLEEVEAAVRAAAYLLCPPKSTAANNNNKHRKRLNQLDIKIKSMRQQASWYQCVIDVLKGKTKPSKRMKEMIEELRATHGTVNLPTVHLLKQKAVDKIRSLAAARKKLIRRKRWIEDNNTFTAEPSKLFQPQQQEVQNPPSPLDVEEFWKSLYEQPAKTRDTPALPRFQQMCDQTLQQNDELSEISAEDIRQALKNKNDFTAPGPDGIQNYWWKSFPATHKHLARLFSGMLIRREPIPSWLVEGRTVLIPKSGDLGQPKNYRPITCLNTLYKILTSVIQDRILRVIGPVWDSIYEQRGAKKGVQGCKDNLLIDKSVCLDARHCKRDLHTSWLDYAKAFDTSPHDLIIRLLKMLKVHPNIIHAIESIIALWKTKFAIRAEGRTVYTGWVRYRRGVFQGDSLSPLLFCITLMPLSIELRASKIGYKAGPPGRRNHLISHLMYVDDLKLYAPSRTALQQLLNIVSDYTSAMGMSFGLDKCAVFHLRRGRVDDPGEDIQLEDGMTFRCLEEGETYKFLGMKQRGVLETTQIKDALSASYKKKLRDIWKSQLSGKNKVSATNMLAIPILTYSFGVVNWTVNELLDLDRSTRKTMNMNRSLHPNSSIQRIYLPRSQGGRGLQCLEYQHYQQTLETAVRVLRSEDPLLKFVAQHELANHGAFLFRAGQRALEKLGITGVSIDPERAGAPITQADQRRLARLIRKSQSNTLLEHHMSKSLHSIFFRSLKDQDLSEELSFAFLKSASLKSETEGFVMACQDGVINTRWYKKNIMKMDTPTTCRACHSQQETIMHILSACRVHAPSGYIERHNAALRVLYFHLRAAYEIDKEPVLPYVPLEIEAVVQNEKARIYWNYPVSTTRQINAIKPDILLLDKELKELFVVEFSSPAENNIVMKEEQKRQKYKDLVFELGTMYPGHKVRMVVLIMGCLGGMRANYVEELKIIPACRSWAEILAHRMQKAVLLGSLHVIRSQEL

SEQ ID NO: 25825 - protein, 1243 aa, Coccinella septempunctata
MTAQRGRHKWTPEQHSLLSALYRRSGPDRRGYINRLHGLWCENCPDLNYMTQQNLRDQISHLKRRGILQRSREQGRLEQQAEEQVTDALSQHQQLTVDITQEQAIALLSDIAGRTRTGTRSNRPITEHVRDVPDIERAEEQVTDAPDQQHQAMTHRSEAVALEARPRTEQVREVPEIELAGEQVTDAPDRQQQRPRTVRDSSELIDNTKEAFEAAVGDPLIKPTRIKSRHKAEDLAVLNSIIQDHLNETCSLEEVEAAVRAAAYLLCPPKSTAANNNNKHRKRLNRLDIKIKSMRQQASWYQCVIDVMKGKTKPSKRMREMIEELRAIHGTVNLPTVHLLKQKAVDKIRSLAAARKKLIRRKRWIEDNNTFTAEPSKLFQPQQQEVQNPPSPQDVEEFWKGLYEQPAKTRDTPALPRFQQICDQTLQQNDELSEISAEDIRQALKNKNDFTAPGPDGIQNYWWKSFPATHKHLARLFSGMLIRREPIPSWLVEGRTVLIPKSGDLGQPKNYRPITCLNTLYKILTSVIQDRILRVIGPVWDSIYEQRGAKKGVQGCKDNLLIDKSVCLDARHYKRDLHTSWLDYAKAFDTSPHDLIIRLLKMLKVHPNIIHAIESIIALWKTKFAIRAEGRTAYTGWVRYRRGVFQGDSLSPLLFCITLMPLSIELRASKIRYKAGPPGRRNHLISHLMYVDDLKLYAPSRTALQQLLNIVSEYTSAMGMSFGLDKCAVFHLRRGRVDDPGEDIQLEDGMTFRRLEDEETYKFLGMKQRGVLETTQIKDALSASYKKKLRDIWKSQLSGKNKVSATNMLAIPILTYSFGVVNWTVNELLDLDRSTRKSMNMNRSLHPNSSIQRIYLPRSQGGRGLQCLEYQHYQQTLETAVRVLRSEDPLLKFVAQHELANHGAFLFRAAQRALEKLGITGVSIDPERAGAPITQADQRKLARLIRKSQSNTLLEHHMSKSLHSIFFRSLKDQDLSEELSFAFLKSASLKSETEGFVMACQDGVINTRWYKKNIMKMDTPTTCRACHSQQETIMHILSACRVHAPSGYIERHNAALRVLYFHLRAAYEIDKEPVLPYVPLEIEAVVQNEKARIYWNYPVSTTRQINAIKPDILLLDKELKELFVVEFSSPAENNMVMKEEQKRQKYKDLVFELGTMYPGHKVRMVVLIIGCLGGMREKMLFPQYSKKIIIQQHTNHILIPRVQDKPKKVTNPHHDSPNGTSKLMIVHRSKYHIGHNNCHISYT

SEQ ID NO: 25826 - protein, 924 aa, Coccinella septempunctata
MRQQASWYQCVIDVMKGKTKPSKRMREMIEELRAIHGTVNLPTVHLLKQKAVDKIRSLAAARKKLIRRKRWIEDNNTFTAEPSKLFQPQQQEVQNPPSPQDVEEFWKSLYEQPAKTRDTPALPRFQQMCDQTLQQNDELSEISAEDIRQALKNKNDFTAPGPDGIQNYWWKSFPATHKHLARLLSGMLIRREPIPSWLVEGRTVLIPKSGDLGQPKNYRPITCLNTLYKILTSVIQDRILRVIGPVWDSIYEQRGAKKGVQGCKDNLLIDKSVCLDARHYKRDLHTSWLDYAKAFDTSPHDLIIRLLKMLKVHPNIIHAIESIIALWKTKFATRAEGRTVYTGWVRYRRGVFQGDSLSPLLFCITLMPLSIELRASRIGYKAGPPGRRNHLISHLMYVDDLKLYAPSRTALQQLLNIVSEYTSAVGMSFGLDKCAVFHLRRGRVDDPGEDIQLEDGMTFRRLEDGETYKFLGMKQRGVLETTQIKDALSASYKKKLRDIWKSQLSGKNKVSATNMLAIPILTYSFGVVNWTVNELLDLDRSTRKTMNMNRSLHPNSSIQRIYLPRSQGGRGLQCLEYQHYQQTLETAVRVLRSEDPLLKFVAQHELANHGAFLFRAAQRALEKLGITGVSIDPERAGAPTTQADQRRLARLIRKSQSNTLLEHHMSKSLHSIFFRSLKDQDLSEELSFAFLKSASLKSETEGFVMACQDGVINTRWYKKNIMKMDTPTTCRACHSQQETIMHILSACRVHAPSGYIERHNAALRVLYFHLRAAYEIDKEPVLPYVPLEIEAVVQNEKARIYWNYPVSTTRQINAIKPDILLLDKELKELFVVEFSSPAENNMVMKEEQKRQKYKDLVFELGTMYPGHKVRMVVLIIGCLGGMRANYVEELKIIPACRSWAEILAHRMQKAVLLGSLHIIRSHEL

SEQ ID NO: 25827 - protein, 1467 aa, Adalia bipunctata
MSDKYIRSLGEQSLPGDRQGASGVGAGRDSMRDTNGRMLRRQAPAIQEAMPLDEEDIDEERVQVVGRIGIQRSKEQPVVGTGSRNRTAQRGRHKWTPEQHDLLSALYRRSRPEIRGYMNRLHGLWCENYPDLDYMTQQNLRDQISHLKRKGILWRSQEQERTEQQEEEQVTDASNQHQLLTIDTAEEQAVAMVRNIAGQTGTGTRSNRPITEHVRDVPRKEQGGEHVTDAPKQQHQAKALGARPRTEQISRVIRRGILWRSQEQERTEKQAEEQVTDASNQHQQLTIDTAGEQAVALVRNIAGQTGSSTRFNRPITEHVRDVPKKEHGGEQVTDAQNQQHQAIALGPRPRTEQVRDFPVIGLAEEQVTDARDQQHQAKAQGPRPRTEQVRDVPVIGLAEEQVTDAPDQQHQAKAQGPRTEQVRDVPVIGLAEEQVTDAPDQQQQKPGTVRDIPKLIVNTREAFEAAVRNPLVKTSRIKTRHEAEDLAVLDNIIQDHLNETCSLEDVVAAVRAAASLLCPPKSTATKEDKNKLRLRRLDTKIKSMRQQASWYQCIIDVLKGKIESSKKMKDMIEELRSIHHRVDLPTVHLLKQKAVDRIRSLAAARKKLIKRQKWIEDNNTFNAEPSKLFQSQQQMTQKPPSPPEVEEFWKSIYEQRVETRDTPALLRFQQMCDQNQQQNDELSEISTEDIRQALKNKRDFTAPGLDGIQNYWWKRFPATHQHLARLFSGMLTRREPIPSWLVEGRTVLIPKSGDLGQPKNYRPITCLNTLYKILTSVIQHQILRVIGPVWDSIYEQRGAKKGVQGCKDNLLIDKSVCLDARYYKRDLHTSWLDYAKAYDTSPHELIIRLLKMLKVHPNIIHTIEKIIALWKTRFAIRTEGRTVYTGWVRYRRGVFQGDSLSPLLFCITLIPLTIELRESKIGYKAGPPGRRNHLISHLLYMDDLKLYAPSESALRQLLNIVSDYTSAMGMSFGLDKCAVFHLRRGKAEDAGEDIRLEDGMTIRHLEEGETYKFLGMKQRGVLETTQIKDALTASYKKKLRDIWKSQLSGKNKVSATNMLAIPILTYSFGVVNWTVNELLDLDRSTRKTMNMNRSLHPNSSIQRIYLPRSQGGRGLQCLEYQHYQQTLEMAVRILRSEDPLLKFVAQHEIANHGAFLFRAAQRAVEKLSITGVSINPELAGTPITQAEQRSLARLIRKSQADKLLEHHMSKNLHSIYFRSLKDQDLSEELSFAFLKSASLKSETEGFVMACQDGVLNTRWYKKNIMKMDTPTTCRACHRQQETIMHILSACRVHAPSGYVERHNAALRILYFHLRDAYEIDKEPVLPYVPLEIEAVVQNERARICWNYPVSTTRQINAVKPDILLLDKELKELFVVEFSSPAENNVVMKEEQKRQKYKDLMFELGTLYPGHKVRMVVLIIGCLGGMRANYVDELKIIPACRSLAEVLAHRMQKAVLLGSLHIIRSHEV

SEQ ID NO: 25828 - protein, 930 aa, Adalia bipunctata
MKTRHEAKDLAVLDNIIQDHLNETCSLEDVVAAVRAAASLLCPPKSTATKEDKHKLRLRRLDTKIKSMRQQASWYQCIIDVLKGKIESSKKMKDMIEELRSIHHRVDLPTVHLLKQKAVDRIRSLAAARKKLIKRQKWIEDNNTFNAEPSKLFQSQQQMTQKPPAPPEVEEFWKSIYEQRVETRDTPALLRFQQMCDQNQQQNDELSEISTEDIRQALKNKRDFTAPGLDGTQNYWWKRFPATHQHLARLFSGMLTRREPIPSWLVEGRTVLIPKSGDLGQPKNYRPITCLNTLYKILTSVIQHQILRVIGPVWDSIYEQRGAKKGVQGCKDNLLIDKSVCLDARYYKRDLHTSWLDYAKAYDTSPHELIIRLLKMLKVHPNIIHAIEKIIALWKTKFAIRTEGRTVYTGWVRYRRGVFQGDSLSPLLFCITLIPLTIELRESKIGYKAGPPGRRNHLISHLLYMDDLKLYAPSESALRQLLNIVSDYTSAMGMSFGLDKCAVFHLRRGKAEDAGEDIRLEDGMTIRHLEEGETYKFLGMKQRGVLETTQIKNALTASYKKKLRDIWKSQLSGKNKVSATNMLAIPILTYSFGVMNWTVNELLDLDRSTRKTMNMNRSLHPNSSIQRIYLPRSQGGRGLQCLEYQHYQQTLEMAVRILRSEDPLLKFVAQHEVANHGAFLFRAAQRAVEKLSITGVSINSELAGTPITQAEQRSLARLIRKSQADKLLEHHMSKNLHSIYFRSLKDQDLSEELSFAFLKSASLKSETEGFVMACQDGVLNTRWYKKNIMKMDTPTTCRACHRQQETIMHILSACRVYAPSGYVERHNAALRILYFHLRAAYEIDKEPVLPYVPLEIEAVVQNERARICWNYPISTTRQINAVKPDILLLDKELKELFVVEFSSPAENNVVMKEEQKRQKYKDLMFELGTL

SEQ ID NO: 25829 - protein, 1257 aa, Coccinella septempunctata
MRDTNGRTLRRRAPAMQKATPLDEEDIDEERVQVVGRIGIQSSQEHPVVGTGSRNRTAQRGRHKWTPEQHSLLSALYRRSGPDRRGYMNRLHGLWCENCPDLNYMTQQNLRDQISHLKRRGILQRPREQGRLEQQAEEQVTDALSQHQQLTVDITQEQAVALLSDIAGRTRTGTRSNRPITEHVRDAPDQQHQAMTHRSEAVALEARPRTEQVREVPEIELAEEQVTDAPDRQQQRPRRDSSELIDNTKEAFEAAVGDPLIKPTRIKSRHKAEDLAVLNSIIQDHLNETCSLEEVEAAVRAAAYLLCPPKSTAANDNNKHRKRLNRLDIKIKSMRQQASWYQCVIDVLKGKTKPSKRMREMIEELRAIHGTVNLPTVHLLKQKAVDKIRSLAAARKKLIRRKRWIEDNNTFTAEPSKLFQHQQQEVQNPPSPQDVEEFWKSLYEQPAKTRDTPALPRFQQMCDQTLQQNDELSEISPEDIRQALKNKNDFTAPGPDGIQNYWWKSFPATHKHLARLFSGMLIRREPIPSWLVEGRTVLIPKSGDLGQPKNYRPITCLNTLYKIFTSVIQDRILRVIGPVWHSIYEQRGAKKEVQGCKDNLLIDKSVCLDARHYKRDLHTSWLDYAKAFDTSPHDLIIRLLKMLKVHPNIIHAIESIIALWKTKFAIRAEGRTVYTGWVRYRRGVFQGDSLSPLLFCITLMPLSIELRASKIGYKAGPPGRRNHLISHLMYVDDLKLYAPSRAALQQLLNIVSEYTSAMGMSFGLDKCAVFHLRRGRVDDPGEDIQLEDGMTFRRLEEGETYKFLGMKQRGVLETTQIKDALSASYKKKLRDIWKSQLSGKNKVSATNMLAIPILTYSFGVVNWTVNELLDLDRSTRKTMNMNRSLHPNSSIQRIYLPRSQGGRGLQCLEYQHYQQTLETAVRVLRSEDPLLKFVAQHELANHGAFLFRAGQRALEKLSITGVSIDPERAGAPITQADQRRLARLIRKSQSNTLLEHHMSKSLHSIFFRSLKDQDLSEELSFAFLKSASLKSETEGFVMACQDGVINTRWYKKNIMKMDTPTTCRACHSQQETIMHILSACRVHAPSGYIERHNAALRVLYFHLRAAYEIDKEPVLPYVPLEIEAVVQNEKARIYWNYPVPTTRQINAIKPDILLLDKELKELFVVEFSSPAENNMVMKEEQKRQKYKDLVFELGTMYPGHKVKMVVLIIGCLGGMRANYVEELKIIPACRSWAEILAHRMQKAVLLGSLHIIRSHEL

SEQ ID NO: 25830 - protein, 1185 aa, Coccinella septempunctata
MNRLHGLWCENCPDLNYMTQQNLRDQISHLKRRGILQRPREQGGLEQQAEEQVTDALSQHQQLTVDITQEQAVALLSDIAGRTRTGTRSNRPITEHVRDVPDIERAEEQVTDAPDQQHQAMTHRSEAVALEARPRTEQVREVPEIELAGEQVTDAPDRQQQRPRTVRDSSELTDNTKEAFEAAVGDPLIKPTRIKSRHEAEDLAVLNSIIQDHLNETCSLEEVEAAVRAAAYLLCPPKSAAANNNNKHRKRLNRLDIKIKSMRQQASWYQCVIDVMKGKTKPSKRMREMIEELRAIHGTVNLPTVHLLKQKAVDKIRSLAAARKKLIRRKRWIEDNNTFTAEPSKLFQPQQQEVQNPPSPQDVEEFWKSLYEQPAKTRDTPALPRFQQMCDQTLQQNDELSEISAEDIRQALKNKNDFTAPGPDGIQNYWWKSFPATHKHLARLFSGMLIRREPIPSWLVEGRTVLIPKSGDLGQPKNYRPITCLNTLYKILTSVIQDRILRVIGPVWDSIYEQRGAKKGVQGCKDNLLIDKSVCLDARHYKRDLHTSWLDYAKAFDTSPHDLIIRLLKMLKVHPNIIHAIESIIALWKTKFAIRAEGRTVYTGWVRYRRGVFQGDSLSPLLFCITLMPLSIELRASKIGYKAGPPGRRNHLISHLMYVDDLKLYAPSRTALQQLLNIVSEYTSAMGMSFGLDKCAVFHLRRGRVDDPGEDIQLEDGMTFRRLEDGETYKFLGMKQRGVLETTQIKDALSASYKKKLRDIWKSQLSGKNKVSATNMLAIPILTYSFGVVNWTVNELLDLDRSTRKTMNMNRSLHPNSSIQRIYLPRSQGGRGLQCLEYQHYQQTLETAVRVLRSEDPLLKFVAQHELANHGAFLFRAAQRALEKLGITGVSINPERAGAPITQADQRRLARLIRKSQSNTLLEHHMSKSLHSIFFRSLKDQDLSEELSFAFLKSASLKSETEGFVMACQDGVINTRWYKKNIMKMDTPTTCRACHSQQETIMHILSACRVHAPSGYIERHNAALRVLYFHLRAAYEIDKEPVLPYVPLEIEAVVQNEKARIYWNYPVSTTRQIKAIKPDILLLDKELKELFVVEFSSPAENNMVMKEEQKRQKYKDLVFELGTMYPGHKVRMVVLIIGCLGGMRANYVEELKIIPACRPWAEILAHRMQKAVLLGSLHIIRSHEL

SEQ ID NO: 25831 - protein, 1386 aa, Adalia bipunctata
MSDTYTLSLGKQSLPGDRQGASGVGAGRDSMRDTNGRMLRRQAPAIQEAMPSNEEDIDEERVQVVGRIGIQRSKEQPVVGTGSRNRTAQRGRRKWTPEQHSLLSALYRRSRPERRGYMNRLHGLWCENYPDLDFMTQQNLRDQISHLKRRGIIWRSQEQERTEQQAEEQVTDASSQHQQLTIDTTEEQAVALVRNIAGRTGTGICSNRPIREHVRDVSEIENGGEQVTDAPNQQHQAIALGTRPTTEQVRDVPEIEHGEEQVTDAPNQQHQEIALGTRPRAEHVRDGPNQQHRAITPGARPRARQVRDVPEKEHGEEQVTDAPNQQHQGIALGARPRAEQVRDVPVIEHAEEQVTDNPDQQQQMPRTVTDVPKLIVNTREAFEAAVRNPLVKATRIKTKQKAEDLAVLDKIIQDHLNETCSLEDVVAAVRVASSLLCPPKSTATNNDKHRLRLSRLDIKIKSMRQQASWYQCIIDVLTGKIKSSKKMKDMIEELRSIHRTVDLPTVHLLKQKAVDRIKSLAAARKKLIKRQKWIEDNNTFTAEPSKLFQSPQQKAQNPPSPQEVEEFWKSLYEQQAEIRDTPALLRFQQMCDQNQQQNDEPSEISTEDIRQALKNKRDFTAPGLDGIQNYWWKKFPATHQHLARLFSGMLTRREPIPSWLVEGRTVLIPKSGDLGQPKNYRPITCLNTLYKILTSVIQDQTLRVIGPVWNSIYEQRGAKKGVQGCKDNLLIDKSVCLDARHYKRDLHTSWLDYAKAYDTTPHELIVRLLKMLKVYPNIIHAIENIIALWKTKFAIRAEGRTVYTGWVRYRRGVFQGDSLSPLLFCITLIPLTIELRESKIGYKAGPPGRGNHLISHLLYMDDLKLYAPSESALRQLLNIVSDYTSAMGMSFGLDKCAVFHLRRGKAEDAGQDIRLEDGMTFRHLEDGETYKFLGMKQRGVLETTQIKDALTASYKKKLRDIWKSQLSGKNKVSATNMLAIPILTYSFGVVNWTVNELLDLDRSTRKTMNMNRSLHPNSSIQRIYLHRSQGGRGLQCLEYQHYQQTLEMAVRILRREDPLLKFVAQHEIANHGAFLFRTAQRAVEKLSITGVSINPELAGTPITQAEQRSLARLIRKSQADKLLEHHMSKNLHSIYFRSLRDQDLSEELSFAFLKSASLKSETEGFVMACQDGVLNTRWYKKNIMKMDTPTTCRACHRQQETIMHILSACRVHAPSGYVERHNAALRILYFHLRAAYEIDKEPVLPYVPLEIEAVVQNERARICWNYPVSTTRQINAVKPDILLLDKELKELFVVEFSSPAENNVVMKEEQKRQKYKDLMFELGTLYPGHKVRMVVLIIGCLGGMRANYVDELKIIPACRSLAEVLAHRMQKAVLLRSLHIIRSHEL

SEQ ID NO: 25832 - protein, 1467 aa, Adalia bipunctata
MSDKYIRSLGEQSLPGDRQGASGVGAGRDSMRDTNGRMLRRQAPAIQEAMPLDEEDIDEERVQVVGRIGIQRSKEQPVVGTGSRNRTAQRGRHKWTPEQHDLLSALYRRSRPEIRGYMNRLHGLWCENYPDLDYMTQQNLRDQISHLKRKGILWRSQEQERTEQQEEEQVTDASNQHQLLTIDTAEEQAVAMVRNIAGQTGTGTRSNRPITEHVRDVPRKEQGGEHVTDAPKQQHQAKALGARPRTEQISRVIRRGILWRSQEQERTEKQAEEQVTDASNQHQQLTIDTAGEQAVALVRNIAGQTGSSTRFNRPITEHVRDVPKKEHGGEQVTDAQNQQHQAIALGPRPRTEQVRDFPVIGLAEEQVTDARDQQHQAKAQGPRPRTEQVRDVPVIGLAEEQVTDAPDQQHQAKAQGPRTEQVRDVPVIGLAEEQVTDAPDQQQQKPGTVRDIPKLIVNTREAFEAAVRNPLVKTSRIKTRHEAEDLAVLDNIIQDHLNETCSLEDVVAAVRAAASLLCPPKSTATKEDKNKLRLRRLDTKIKSMRQQASWYQCIIDVLKGKIESSKKMKDMIEELRSIHHRVDLPTVHLLKQKAVDRIRSLAAARKKLIKRQKWIEDNNTFNAEPSKLFQSQQQMTQKPPSPPEVEEFWKSIYEQRVETWDTPALLRFQQMCDQNQQQNDELSEISTEDIRQALKNKRDFTAPGLDGIQNYWWKRFPATHQHLARLFSGMLTRREPIPSWLVEGRTVLIPKSGDLGQPKNYRPITCLNTLYKILTSVIQHQILRVIGPVWDSIYEQRGAKKGVQGCKDNLLIDKSVCLDARYYKRDLHTSWLDYAKAYDTSPHELIIRLLKMLKVHPNIIHTIEKIIALWKTRFAIRTEGRTVYTGWVRYRRGVFQGDSLSPLLFCITLIPLTIELRESKIGYKAGPPGRRNHLISHLLYMDDLKLYAPSESALRQLLNIVSDYTSAMGMSFGLDKCAVFHLRRGKAEDAGEDIRLEDGMTIRHLEEGETYKFLGMKQRGVLETTQIKDALTASYKKKLRDIWKSQLSGKNKVSATNMLAIPILTYSFGVVNWTVNELLDLDRSTRKTMNMNRSLHPNSSIQRIYLPRSQGGRGLQCLEYQHYQQTLEMAVRILRSEDPLLKFVAQHEIANHGAFLFRAAQRAVEKLSITGVSINPELAGTPITQAEQRSLARLIRKSQADKLLEHHMSKNLHSIYFRSLKDQDLSEELSFAFLKSASLKSETEGFVMACQDGVLNTRWYKKNIMKMDTPTTCRACHRQQETIMHILSACRVHAPSGYVERHNAALRILYFHLRAAYEIDKEPVLPYVPLEIEAVVQNERARICWNYPVSTTRQINAVKPDILLLDKELKELFVVEFSSPAENNVVMKEEQKRQKYKDLMFELGTLYPGHKVRMVVLIIGCLGGMRANYVDELKIIPACRSLAEVLAHRMQKAVLLGSLHIIRSHEV

SEQ ID NO: 25833 - protein, 1272 aa, Coccinella septempunctata
MRDTNGRTLRRRAPATQKATPLDEEDIDEERVQVVGRIGIQSSQEHPVVGTGSRNRTAQRGRHKWTPEQHSLLSALYRRSGPDRRGYMNRLHGLWCENCPDLNYMTQQNLRDQISHLKRRGILQRSREQGRLEQQGEEQVTDALSQHQQLTVDITQEQAVAILSDIAGRTRTGTRSNRPITEHVRDVPDIERPEEQVTDAPGQQHQAMTHRGEAVALEARPRTEQVREVPEIELAGEQVTDAPDRQQQRPRTVRDSSELIDNTKEAFEAAVRDPLIKPTRIKSRHKAEDLAILNSIIQDHLNETCSLEEVEAAVRAAAYLLCPPKSTAANNNNKLRKRLNRLDIKIKSIRQQASWYQSVIDVLKGKTKSSKRMKEMIEELRATHGTVNLPTVHLLKQKAVDKIRSLAAARKKLIRRKRWIEDNNTFTAEPSKLFQPQQQEVQNPPSPQDVEEFWRSLYEQPAKTRDTPALPRFQQMCDQTLQQNDELSEISAEDITQALKNKNDFTAPGPDGIQNYWWKSFPATHKHLARLFSGMLIRREPIPSWLVEGRTVLIPKSGDLGQPKNYRPITCLNTLYKILTSVIQNRILRVIGPVWDSIYEQRGAKKGVQGCKDNLLIDKSVCLDARHYKRDLHTSWLDYAKAFDTSPHDLIIRLLKMLKVHPNIIHAIEAIIELWKTKFAIRAEGRTVYTGWVRYRRGVFQGDSLSPLLFCITLMPLSIELRASKIGYKAGPPGRRNHLISHLMYVDDLKLYAPSRTALQQLLNIVSDYTSAMEMSFGLDKCAVFHLRRGRVDDPGEDIQLEDGMTFRRLEDGETYKFLVMKQRGVLETTQIKDALSASYKKKLRDIWKSQLSGKNKVSATNMLAIPILTYSFGVVNWTVNELLDLDRSTRKTMNMNRSLHPNSSIQRIYLPRSQGGRGLQCLEYQHYQQTLETAVRVLRSEDPLLKFVAQHELANHGAFLFRAGQRALEKLGITGVSIYPERAGAPITQADQRRLARLIRKSQSNTLLEHHMSKSLHSIFFRSLKDQDLSEELSFAFLKSASLKSETEGFVKACQDGVINTRWYKKNIMKMDTPTTCRACHSQQETIMHILSDGRVHAPSGYIERHNAALRVLYFHLRAAYEIDKEPVLPYVPLEIEAVVQNEKARIYWNYPVSTTRQINAIKPDILLLDKELKELFVVEFSSPAENNIVMKEEQKRQKYKDLVFELGTMYPGHKVRMVVLIIGCLGGMRANYVEELKIIPACRSWAETLAHRMQKAVLLGSLHVIRSHEL

SEQ ID NO: 25834 - protein, 1023 aa, Adalia bipunctata
MPRTVTDVPKLIVNTREAFEAAVRNPLVKAARIKTRQKAEDLAVLDKMIQDHLNETCSLEDVVAAVRAASSLLCPPKSTATNNDKHRLRLSRLDIKIKSMRQQASWYQCIIDVLKGKVKSSKKMKDMIEELRSIHRTVDLPTVHLLKQKAVDRIRSLAAARKKLIKRQKWIEDNNTFTAEPSKLFQSPQQKAQNPPSPQEVEEFWKSLYEQQAEIRDTPALLRFQQMCDQNQQQNDEPSEISTEDIRQALKNKRDFTAPGLDGIQNYWWKKFPATHQHLARLFSGMLTRREPIPSWLVEGRTVLIPKSGDLGQPKNYRPITCLNTLYKILTSVIQDQILRVIGPVWNSIYEQRGAKKGVQGCKDNLLIDKSVCLDARHYKRDLHTSWLDYAKAYDTTPHELIVRLLKMLKVYPNIIHAIENIIALWKTKFAIRAEGRTVYTGWVRYRRGVFQGDSLSPLLFCITLIPLTIELRESKIGYKAGPPGRRNHLISHLLYMDDLKLYAPSESTLRQLLNIVSDYTSAMGMSFGLDKCAVFHLRRGKAEDAGEDIRLEDGMTFRHLEDGETYKFLGMKQRGVLETTQIKDALTASYKKKLRDIWKSQLSGKNKVSATNMLAIPILTYSFGVVNWTVNELLDLDRSTRKTMNMNRSLHPNSSIQRIYLPRSQGGRGLQCLEYQHYQQTLEMAVRILRSEDPLLKFVAQHEIANHGAFLFRAAQRAVEKLSITGVSINPELAGTPITQAEQRSLARLIRKSQADKLLEHHMSKNLHSIYFRSLKDQDLSEELSFAFLKSASLKSETEGFVMACQDGVLNTRWYKKNIMKMDTTTTCRACHRQQETIMHILSACRVHAPSGYVERHNAALRILYFHLRAAYKIDKEPVLPYVPLEIEAVVQNERARICWNYPVSTTRQINAVKPDILLLDKELKELFVVEFSSPAENNVVMKEEQKRQKYKDLMFELGTLYPGHKVRMVVLIIGCLGGMRANYVDELKIIPACRSLAEVLAHRMQKAVLLGSLHIIRSHEL

SEQ ID NO: 25835 - protein, 1434 aa, Adalia bipunctata
MSDIFIRSLGEQSLPGDRQGASGVGAGRDSMRDTNGRMLRRQAPAIQEAMPLDEEDIDEERVQVVGRIGIQRSKEQPVVGTGSRNRTAQRGRHKWTPEQHDLLSALYRRSRPERRGYMNRLHGLWCENYPDLDYMTQQNLRDQISHLKRKGILWRSQEQERTEQQDGEQVTDASNQHQLLTIDTAEEQAVAMVRNVAGQTGTGTRSNRPITEHVRDVPRKEQGGEHVTDAPKQQHQAKASGARPRTEQISRIIRRGILWRSQEQERTEQQAEEQVTDASNQHQQLTIDTAEEQAVALVRHIAGQTGSITRFNRPITEHVRDVPKIEHGEEQVTDAQNQQHQAIALGPRPRTEQVRDVPVIELAGEQVTDAPDQRHQAIALGPRPRTEQVRDVPVIGLAEEQVTDAPDQQQQKPGTVRDVPKLIVNTREAFEAAVRNPLVKIFRMKTRHEAEDLAVLDNIIQDHINENCSLEDVVAAVRAAASLLCPPKSTATKEDKHKLRLRRLDTKIKSMRQQASWYQCIIDVLKGKIGSSKKMKDMIEELRSIHHRVDLPTVYLLKQKAVDKIRSLTAARKKLIKRQKWIEDNNIFNAEPSKLFQSQQQMTQKPPSPPEVEEFWKSIYEQRPETRDTPALLRFQQMCDQNQQQNDEVSEISTEDIKQALKNKRDFTAPGLDGIQNYWWKRFPATHQHLARLFSGMLTRREPIPSWLVEGRTVLIPKSGDLGQPKNYRPITCLNTLYKILTSVIQHQILRVIGPVWDSIYEQRGAKKGVQGCKDNLLIDKSVCLDARFYKRDLHTSWLDYAKAYDTSPHELIIRLLKMLKVHPNIIHAIENIIALWKTKFAIRTEGRTVYTGWVRYRRGVFQGDSLSPLLFCITLIPLTIELRESKIGYKAGPPGRRNHLISHLLYMDDLKLYAPSESALRQLLNIVSDYTSAMGMSFGLDKCAVFHLRRGKAEDAGEDIRLEDGMIIRHLEDGETYKFLGMKQRGVLETTRIKDALTASYKKKLRDIWKSQLSGKNKVSATNMLAIPILTYSFGVVNWTVNELLDLDRSTRKTMNMNRSLHPNSSIQRIYLPRSQGGRGLQCLEYQHYQQTLEMAVRVLRSEDPLLKFVAQHEIANHGAFLFRAAQRALEKLSITGVSINPELAGAPITQADQRSLARLIRKSQSDTLLEHHMSKTLHSIYFRSLKDQDLSEELSFAFLKSASLKSETEGFVMACQDGVLNTRWYKKNIMKMDTPTTCRACHRQQETIMHILSACSVHAPSGYVERHNAALRILYFHLRAAYGIDKEPVLPYVPLEIEAVVQNERARICWNYPVSTTRQINAVKPDILLLDKELKELFVVEFSSPAENNVVMKEEQKRQKYKDLMFELGTLYPGHKVRMVVLIIGCLGGMRANYVDELKIIPACRSLAEVLAHRMQKAVLLGSLHIIRSHEL

SEQ ID NO: 25836 - protein, 904 aa, Adalia bipunctata
MKVIIIIIIEELRSIHHRVDLPTVHLLKQKSVDKIRSLAAARKKLIKRQKWIEDNNTFNAEPSKLFQSQQQTTQKPPSPPEVEEFWKSIYEQRAETRDTPALLRFQQMCDQNQQQNDELSQISTEDIRQALKNKRDFTAPGLDGIQNYWWKRFPATHQHLARLFSGMLTRREPIPSWLVEGRTVLIPKSGDLGQPKNYRPITCLNTLYKILTSVIQHQILRVIGPVWDSIYEQRGAKKGVQGCKDNLLIDKSVCLDARFYKRDLHTSWLDYAKAYDTSPHELIIRLLKMLKVHPNIIHAIENIIALWKTKFSIRTEGRTVYTGWVRYRRGVFQGDSLSPLLFCITLIPLTIELRESKIGYKAGPPGRRNHLISHLLYMDDLKLYAPSESALRQLLNIVSDYTSAMGMSFGLDKCAVFHLRRGKAEDAGEDIRLEDGLTIRHLEDGETYKFLGMKQRGVLETTQIKDALTASYKKKLRDIWKSQLSGKNKVSATNMLAIPILTYSFGVVNWTVNELLDLDRSTRKTMNMNRSLHPNSSIQRIYLPRSQGGRGLQCLEYQHYQQTLEMAVRILRSEDPLLKFVAQHEIANHGAFLFRAAQRAVEKLSITGVSINPELAGTPITQAEQRSLARLIRKSQADKLLDHHMSKNLHSIYFRSLKDQDLSEELSFAFLKSASLKSETEGFVMACQDGVLNTRWYKKNIMKMDTSTTCRACHRQQETIMHILSACRVHAPSGYVERHNAALRILYFHLRAAYEIDKEPVLPYVPLEIEAVVQNERARICWNYPVSTTRQINAVKPDILLLDKELKELFVVEFSSPAENNVVMKEEQKRQKYKDLMFELGTLYPGHKVRMVVLIIGCLGGMRANYVDELKIIPACRSLAEVLAHRMQKAVLLGSLHIIRSHEL

SEQ ID NO: 25837 - protein, 1302 aa, Coccinella septempunctata
MSERNQLSLGKQSLSGDRQGTSGVGAGRDSMRDTNGRTLRMRAPATQEATPLDEEDIDEERVQVVGRIGIQSSQEHPVVGTGSRNRTSQRGRHKWTPEQHSLLSALYRRSGPDRRGHMNRLHGLWCENCPDLNYMTQQNLRDQISHLKRRGILQRSREQGRLEQQAEEQVTDALSQHQQLTVDITQEQAAALLSDIAGRTRTCTRSNRPITEHVRDVPDIERAEEQVTDAPDQQHQAMTHRSEAVALEARPRTEQVREVPEIELAEEQVTDAPDRQQQRPRTVRDSSELIENTKEAFEAAVGDPLIKPTRIKSRHKAEDLAVLNSIIQDHLNETCSLEEVEAAVRAAAYLLCPPKSTAANNNNKHRKRLNRLDIKIKSMRQQASWYQCVIDVLKGKTKPSKRMREMIGELRATHGTVNLSTVHLLQQKAVDKIRSLAAARKKLIRRKRWIEDNNTFTAEPSKLFQPQQQEVQNPPSPQDVEEFWKSLYEQPAKTRDTPALPRFQQMCDQTLQQNDELSEISAENIRQAPKNKNDFTAPGPDGIQNYWWKSFPATHKHLARLFSGMLIRREPIPSWLVEGRTVPIPKSGDLGQPKNYRPITCLETLYKILTSVIQDRILRVIGPVWDSIYEQRGAKKGVQGCKDNLLIDKSVCLDAKHYKRDVHTSWLDYAKAFDTSAHDLIIRLLNMLKVHPNIIHAIESIIALWKTKFAIRAEGRTVYTGWVRYRRGVFQGDSLSLLLFCITLMPLSIELRASKIGYKAGPPGRRNHLISHLMYVDDLKLYAPSRTALQQLLNIVSDYTSAMGMSFGLDKCAVFHLRRGRVDDPGEDIQLEDGMTFRRLEEGETYKFLGMKQRGVLETTQIKDALSASYKKKLRDIWKSQLSGKNKVSATNMLAIPILTYSFGVVNWTVNELLDLDRSTRKTMNMNRSLHPNSSIQRIYLPRSQGGRGLQCLEYQHYQQTLETAVRVLRSEDPLLKFVAQHELANHGAFLFRAGQRALEKLGITGVSIDPERAGAPITQADQRRLARLIRKSQSNTLLEHHMSKSLHSIFFRSLKDQDLSEELSFVFLKSASLKSETEGFVMACQDGVINTRWYKKNIMKMDNPTTCRACHSQQETIMHILSACRVHAPSGYIERHNAALRVLYFHLRAAYEIDKEPVLPYVPLEIEAVVQNEKARIYWNYPVSTTRQINAIKPDILLLDKELKELFVVEFSSPAENNMVMKEEQKRQKYKDLVFELGTMYPGHKVKMVVLIIGCLGGMRANYVEELKIIPACRSWAEILAHRMQKAVLLGSLHIIRSHEL

SEQ ID NO: 25838 - protein, 1302 aa, Coccinella septempunctata
MSERNQLSLGKQSLPGDRQGTSGVGAGRDSMRDTNGRTLRRRAPATQKATPLDEEDIDEERVQVVGRIGIQSSQEHPVVGTGSRNRTAQRGRHKWTPEQHSLLSALYRRSGPDRRGYMNRLHGLWCENCPDLNYMTQQNLRDQISHLKRRGILQQSREQGRLEQQDEEQVTDALSQHQQLTVDITQEQAVALLSDIAGRTRTGTRSNRPITEHVRDVPDIERAEEQVTDAPGQQHQAMTHRGEAVALEARPRTEQVREVPEIELAGEQVTDAPDRQQQRPRTVRDSSELIDNTKEAFEAAVRDPLIKPTRIKSRHKAEDLAVLNSIIQDHLNETCSLEEVEAAVRAAAYLLCPPKSTAANNNNKHRKRLNRLDIKIKSMRQQASWYQCVIDVLKGKTKPSKRIKEMIEELRATHGTVNLPTVHLLKQKAVDKIRSLAAARKKLIRRKRWIEDNNTFTAEPSKLFQPQQQEVQNPPSPQDVEEFWKSLYEQPAKTRDTPALPRFQQMCDQTLQQNDELSEISAEDIRQALKNKNDFTAPGPDGIQNYWWKSFPATHKHLARLFSGMLIRREPIPSWLVEGRTVLIPKSGDLGQPKNYRPITCLNTLYKILTSVIQDRILRVIGPVWDSIYEQRGAKKGVQGCKDNLLIDKSVCLDARHYKRDLHTSWLDYAKAFDTSPHDLIIRLLKMLKVHPNIIHAIEAIIALWKTKFAIRAEGRTVYTGWVRYRRGVFQGDSLSPLLFCITLMPLSIELRASKIGYKAGPPGRRNHLISHLMYVDDLKHYAPSRTALQQLLNIVSDYTSAMGMSFGLDKCAVFHLRRGRVDDPGEDIQLEDGMTFRCLEEGETYKFLGMKQRGVLETTQIKDALSASYKKKLRDIWKSQLSGKNKVSATNMLAIPILTYSFGVVNWTVNELLDLDRSTRKTMNMNRSLHPNSSIQRIYLPRSQGGRGLQCLEYQHYQQTLETAVRVLRSEDPLLKFVAQHELANHGAFLFRAGQRALEKLGITGVSIDPERAGAPITQADQRRLARLIRKSQSNTLLEHHMSKSRHSIFFRSLKDQDLSEELSFAFLKSASLKSETEGFVMACQDGVINTRWYKKNIMKMDTPTTCRACHSQQETIMHILSACRVHAPSGYIERHNAALRVLYFHLRAAYEIDKEPVLPYVPLEIEAVVQNEKARIYWNYPVSTTRQINAIKPDILLLNKELKELFVVEFSSPAENNIVMKEQQKRQKYKDLVFELGTMYPGHKVRMVVLIIGCLGGMRANYVEELKIIPACRSWAEILAHRMQKAVLLGSLHIIRSHEL

SEQ ID NO: 25839 - protein, 899 aa, Adalia bipunctata
MKDMIEELRSIHRTVDLPTIHLLKQKAVDRIRSLAAARKKLIKRQKWIEDNNTFTAEPSKLFQSPQQKAQNPPSPQEVEEFWKSLYEQQAEIRAPALLRFQQMCDQNQQQNDEPSEISTEDIRQALKNKRDFTAPGLDGIQNYWWKQFPATHQHLARLFSGMLTRREPIPSWLVEGRTVLIPKSGDLGQPKNYRPITCLNTLYKILTSVIQDQILRVIGPVWNSIYEQRGAKKGVQGCKDNLLIDKSICLDARHYKRDLHTSWLDYAKAYDTTPHELIVRLLKMLKVYPNIIHAIENIIALWKTKFAIRAEGRTVYTGWVRYRRGVFQGDSLSPLLFCITLIPLTIELRESKIGYKAGPPGRRNHLISHLLYMDDLKLYAPSESALRQLLNIVSDYTSAMGMSFGLDKCAVFHLRRGKAEDAGEDIRLEDGMTFRHLEDGETYKFLGMKQRGVLETTQIKDALTASYEKKLRDIWKSQLSGKNKVSATNMLAIPILTYSFGVVNWTMNELLDLDRSTRKTMNMNRSLHPNSSIQRIYLPRSQGGRGLQCLEYQHYQQTLEMAVRILRSEDPLLKFVAQHEIANHGAFLFRAAQRAVEKLSITGVSINPELAGTPITQAEQRSLARLIRKSQADKLLEHHMSKNLHSIYFRSLKDQDLSEELSFAFLKSASLKSETEGFVMACQDGVLNTRWYKKNIMKMDTPTTCRACHRQQETIMHILSACRVHAPSGYVERHNAALRILYFHLRAAYEIDKEPVLPYVPLEIEAVVQNERARICWNYPVSTTRQINAIKPDILLLDKELKELFVVEFSSPAENNVVMKEEQKRQKYKDLMFELGTLYPGHKVRMVVLIIGCLGGMRANYVDELKIIPACRSLAEVLAHRMQKAVLLGSLHIIRSHEL

SEQ ID NO: 25840 - protein, 1243 aa, Adalia bipunctata
MVRNVAGQTGTGTRSNRPITEHVRDVPRKEQGGEHVTDAPKQQHQAKASGARPRTEQISRIIRRGILWRSQEQERTEQQAEEQVTDASNQHQQLTIDTAEEQAVAFVRHIAGQTGSITRFNRPITEHVRDVPKIEHGEEQVTDAQNQQHQAIALGPRPRTEQVRDVPVIELAGEQVTDAPDQRHQAIALGPRPRTEQVRDVPVIGLAEEQVTDAPDQQQQKPGTVRDVPKLIVNTREAFEAAVRNPLVKIFRMKTRHEAEDLAVLDNIIQDHLNENCSLEDVVAAVRAAASLLCPPKSTATKEDKHKLRLRRLDTKIKSMRQQASWYQCIIDVLKGKIGSSKKMKDMIEELRSIHHRVDLPTVHLLKQKAVDKIRSLTAARKKLIKRQKWIADNNTFNAEPSKLFQSQQQMTQKPPSPPEGEEFWKSIYEQRPETRDTPALLRFQQMCDQNQQQNDEVSEISTEDIKQALKNKRDFTAPGLDGIQNYWWKRFPATHQHLARLFSGMLTRREPIPSWLVEGRTVLIPKSGDLGQPKNYRPITCLNTLYKILTSVIQHQILRVIGPVWDSIYEQRGAKKGVQGCKDNLLIDKSVCLDARFYKRDLHTSWLDYAKAYDTSPHELIIRLLKMLKVHPNIIHAIENIIALWKTKFAIRTEGRTVYTGWVRYRRGVFQGDSLSPLLFCITLIPLTIELRESKIGYKAGPPGRRNHLISHLLYMDDLKLYAPSESALRQLLNIVSDYTSAMGMSFSLDKCAVFHLRRGKAEDAGEDIRLEDGMIIRHLEDGETYKFLGMKQRGVLETTRIKDALTASYKKKLRDIWKSQLSGKNKVSATNMLAIPILTYSFGVVNWTVNELLDLDRSTRKTMNMNRSLHPNSSIQRIYLPRSQGGRGLQCLEYQHYQQTLEMAVRVLRSEDPLLKFVAQHEIANHGAFLFRAAQRALEKLSITGVSINPELAGAPITQADQRSLARLIRKSQSDTLLEHHMSKTLHSIYFRSLKDQDLSEELSFAFLKSASLKSETEGFVMACQDGVLNTRWYKKNIMKMDTPTTCRACHRQQETIMHILSACSVHAPSGYVERHNAALRILYFHLRAAYGIDKEPVLPYVPLEIEAVVQNERARICWNYPVSTTRQINAVKPDILLLDKELKELFVVEFSSPAENNVVMKEEQKRQKYKDLMFELGTLYPGHKVRMVVLIIGCLGGMRANYVDELKIIPACRSLAEVLAHRMQKAVLLGSLHIIRSHEL

SEQ ID NO: 25841 - protein, 927 aa, Adalia bipunctata
MKSMRQQASWYQCIIDVLKGKIESSKKMKDMIEELRSIHHRVDLPTVHLLKQKAVDKIRSLAAARKKLMKRQKWIEDNNTFNAEPSKLFQSQQQMTQKPPSPPEVEEFWKSIYEQRAETRDTPALLRFQQMCDQNQQQNDELSEISTEDIRQALKNKRDFSAHGMDGIQNYWWKRFPATHQHLARLFNGMLTRREPIPSWLVEGRTVLIPKSGDLGPPKNYRPITCLNTLYKILTSVIQHQILRVIGPVWDSIYEQRGAKKGVQECKDNLLIDKSVCLYARYYKRDLHTSWLDYAKAYDTSPHELIIRLLKMLKVHPNIIHAIENIIALWKTKFAIRTEGRTVYTGWVRYRRGVFQGDSLSPLLFCITLIPLTIELRESKIGYKAGPPGRRNHLISHLLYMDDLKLYAPSESALRQLLNIVSDYTSAMGMSFGLDKCAVFHLRRGKAEDAGEDIQLGDGMTIRHLEEGETYKFLGMKQRGVLETTQIKDALTASYKKKLRDIWKSQLSGKNKVSATNMLAIPILTFSFGVVNWTVNELLDRDRSTRKTMNMNPSLHPNSSIQRIYLPRSQGGRGLQCLEYQHYQQTLEMAVRIKRSEDPLLKFVAQHEIANHGAFLFRAAQRAVEKLSITGVSINPELAGTPITQAEQRSLARLIRKSQADKLLEHHMRKSLHSIYFRSLKDQDLSEELSFAFLKSASLKSETEGFVMACQDGVLNTRWYKKNIMKMDTPTTCRACHRQQETIMHILSACRVHAPSGYVERHNAALRILYFHLRAAYEIDKEPVLPYVPLEIEAVIQNVRARICWNYPVSTTRQINAVKPDILLLDKELKELFVVEFSSPAENNVVMKEEQKGQNYKDLLFELGTLYPGHKVRMVVLIIGCLGGMRANYVEELKIIPACRSLAEVLAHRMQKAVLLGSLHIIRSHEV

SEQ ID NO: 25842 - protein, 1191 aa, Coccinella septempunctata
MSERNQLSLGKQSLPGDRQGTSGVGAGRDSMRDPNGRTLRRRAPATQKAKPLDEEDIDEERVQVVGRIGIQSSQEHPVVGTGSRNRTAQRGRHKWTPEQHSLLSALYRRSGPDRRGYMNRLHGLWCENCPDLNYMTQQNLRDQISHLKRRGILQRPREQGRLEQQAEEQVTDALSQHQQLTVDITQEQAVALLSDIAGRTRTGTRSNRPITEHVRDVPDIERAEEQVTDAPDQQHQAMTHRSEAVALEARPRTEQVREVPEIELAGEQVTDAPDRQQQRPRTVRDSSELTDNTKEAFEAAVGDPLIKPTRIKSRHKAEDLAVLNSIIQDHLNETCSLEEVEAAVRTAAYLLCPPKSTAANNNNKHRKRLNRLDIKIKSMRQQASWYQCVIDVMKGKTKPNKRMREMIEELRAIHGTVNLPTVHLLKQKAVDKIRSLAAARKKLIRRKRWIEDNNTFTAEPSKLFQPQQQEVQNPPSPQDVEEFWKSLYEQPAKTRDTPALPRFQQMCDQTLQQNDELSEISAEDIRQALKNKNDFTAPGPDGIQNYWWKSFPATHKHLARLFSGMLIRREPIPSWLVEGRTVLIPKSGDLGQPKNYRPITCLNTLYKILTSVIQDRILRVIGPVWDSIYEQRGAKKGVQGCKDNLLIDKSVCLDARHYKRDLHTSWLDYAKAFDTSPHDLIIRLLKMLKVHPNIIHAIESIIALWKTKFAIRAEGRTVYTGWVRYRRGVFQGDSLSPLLFCITLMPLSIELRASKIGYKAGPPGRRNHLISHLMYVDDLKLYAPSRTALQQLLNIVSEYTSAVGMSFGLDKCAVFHLRRERVDDPGEDIQLEDGMTFRRLEDRETYKFLGMKQRGVLETTQIKDALSASYKKKLRDIWKSQLSGKNKVSATNMLAIPILTYSFGVVNWTVNELLDLDRSTRKTMNMNRSLHPNSSIQRIYLPRSQGGRGLQCLEYQHYQQTLETAVRVLRSEDPLLKFVAQHELANHGAFLFRAAQRALEKLGITGVSIDPERAGAPITQADQRRLARLIRKSQSNTLLEHHMSKSLHSIFFRSLKDQDMSEELSFAFLKSASLKSETEGFVMACQDGVINTRWYKKNIMKMDTPTTCRACHSQQETIMHILSACRVHAPSGYIERHNAALRVLYFHLRAAYEIDKEPVLPYVPLEIEAVFQNEKARIYWNYPQQRGRSMQ

SEQ ID NO: 25843 - protein, 1404 aa, Adalia bipunctata
MRDTNGRMLRRQAPAIQEAMPLDEEDIDEERVQVVGRIGIQRSKEQPVVGTGSRNRTAQRGRHKWTPEQHDLLSALYRRSRPERRGYMNRLHGLWCENYPDLDYMTQQNLRDQISHLKRKGILWRSQEQERTKQQDGEQVTDASNQHQLLTIDTAEEQAVAMVRNVAGQTGTGTRSNRPITEHVRDVPRKEQGGEHVTDAPKQQHQAKASGARPRTEQISRIIRRGILWRSQEQERTEQQAEEQVTDASNQHQQLTIDTAEEQAVALVRNIAGQTGSSTRFNRPITEHVRDVPRIEHGEEQVTDAQNQQHQAIALGPRPRTEQVRDVPVIELAGEQVTDAPDQQHQAIALGPRPRTEQVRDVPVIGLAEEQVTDAPDQQQQKPGTVRDVPKLIVNTREAFEAAVRNPLVKTFRIKTRHEAEDLAVLDNIIQDHLNETCSLEDVVAAVRAAASLLCPPKSTATKEDKHKLRLRRLDTKIKSMRQQASWYQCIIDVLKGKIESSKKMKDMIEELRSIHHRVDLPTVHLLKQKAVDRIRSLAAARKKLIKRQKWIEDNNTFTAEPSKLFQSPQQKAQNPPSPQEVEEFWKSIYEQRAETRDTPALLRFQQMCDQNQQQNDELCEISTEDIRQALKKKRDFTAPGLDGIQNYWWKRFPATHQHLARLFSGVLTRREPIPSWLVEGRTVLIPKSGDLGQPKNYRPITCLNTLYKILTSVIQHQILRVIGPVWDSIYEQRGAKKGVQGCKDNLLIDKSVCLDARYYKRDLHTSWLDYAKAYDTSPHELIIRLLKMLKVHPNIIHAIENIIALWKTKFAIRAEGRTVYTGWVRYRRGVFQGDSLSPLLFCITLIPLTIELRESKIGYKAGPPGRRNHLISHLLYMDDLKLYAPSKSALRQLLNIVSDYTSAMGMSFGLDKCAVFHLRRGKAEDAGEDIRLEDGMTIRHLEEGETYKFLEMKQRGVLETTQIKDALTASYKKKLRDIWKSQLSGKNKVSATNMLAIPILTYSFGVVNWTVNELLDLDRSTRKTMNMNRSLHPNSSIQRIYLPRSQGGRGLQCLEYQHYQQTLEMAVRILRSEDPLLKFVAQHEIANHGAFLFRAAQRAVEKLSITGVSINPELAGTPITQAEQRSLARLIRKSQADKLLEHHMSKNLHSIYFRSLKDQDLSEELSFAFLKSASLKSETEGFVMACQDGVLNTRWYKKNIMKMDTPTTCRACHGQQETIMHILSACRVHAPSGYVERHNAALRILYFHLRAAYEIDKEPVLPYVPLEIEAVVQNERARICWNYPVSTTRQINAVKPDILLLDKELKELFVVEFSSPAENNVVMKEEQKRQKYKDLMFELGTLYPGHKVRMVVLIIGCLGGMRANYVDELKIIPACRSLAEVLAHRMQKAVLLGSLHIIRSHEV

SEQ ID NO: 25844 - protein, 1249 aa, Coccinella septempunctata
MSERNQLSLGKQSLPGDRQGTSGVGAGRDSMRGTNGRTLRRRAPATQKATPLDEEDIDEERVQVVGRIGVQSSQEHPVVGTGSRNRTAQRGRHKWTPEQHSLLSALYRRSGPDRRGYMNRLHGLWCENCPDLNYMTQQNLRDQISHLKRRGILQRSREQGRLEQQAEEQVTDALSQHQQLTVDITQEQAVALLSDIAGRTRTGTRSNRPITEHVRDVPDIERAEEQVTDAPDQQHQAMTHRSEAVALEARPRTEQVREVPEIELAGEQVTDAPDRQQQRPRTVRDSSELIDNTKEAFEVAVGDPLIKPTRIKSRHKAEDLAVLNSIIQDHLNETCSLEEVEAAVRAAAYLLCPPKSTAANNNNKHRKRLNRLDIKIKSMRQQASWYQCVIDVLKGKTKPSKRMREMIEELRAIHGTVNLPTVHLLKQKALDKIRSLAAARKKFIRRKRWIEDNNTFTAEPSKLFQPQQQEVQNPPSPQDVEEFWKRLYEQPAKTRDTPALPRFQQMCDQTLQQNDELSEISAEDIRQALKNKNDFTAPGPDGIQNYWWKSFPATHKHLARLFSGMLIRREPIPSWLVEGRTVLIPKSGDLGQPKNYRPITCLNTLYKILTSVIQDRILRVIGPVWDSIYEQRGAKKGVQGCKDNLLIDKSVCLDARHYKRDLHTSWLDYAKAFDTSPHDLIIRLLKMLKVHPNIIHAIESIIALWKTKFAIRAEGRTVYKGWVDDLKLYAPSRTALQQLLNIVSEYTSAMGMSFGLDKCAVFHLRRGRVDDPGEDIQLEDGMTFRRLEEGETYKFLGMKQRGVLETTQIKDALSASYKKKLRDIWKSQLSGKNKVSATNMLAIPILTYSFGVVNWTVNELLDLDRSTKKTMNMNRSLHPNSSIQRIYLPRSQGGRGLQCLEYQHYQQTLETAVRVLRSEDPLLKFVAQHELENHGAFLFRAGQRALEKLGITGVSIDPERAGAPITQADQRRLARLIRKSQSNTLLEHHMGKSLHSIFFRSLKDQDLSEELSFAFLKSASLKSETEGFVMACQDGVINTRWYKKNIMKMDTPTTCRACHSQQETIMHILSACRVHAPSGYIERHNAALRVFYFHLRAAYEIDKEPVLPYVPLEIEAVVQNEKARIYWNYPVSTTRQINAIKPDILLLDKELKELFVVEFSSPTENNMVMKEEQKSQKYRDLVFELGTMYPGHKVRMVVLIIGCLGGMRANYVDELKIIPACRSWAEILAHRMQKAVLLGSLHIIRSHEL

SEQ ID NO: 25845 - protein, 1434 aa, Adalia bipunctata
MSDIFIRSLGEQSLPGDRQGASGVGAGRDSMRDTNGRMLRRQAPAIQEAMPLDEEDIDEERVQVVGRIGIQRSKEQPVVGTGSRNRTAQRGRHKWTPEQHDLLSALYRRSRPERRGYMNRLHGLWCENYPDLDYMTQQNLRDQISHLKRKGILWRSQEQERTEQQDGEQVTDASNQHQLLTIDTAEEQAVAMVRNVAGQTGTGTRSNRPITEHVRDVPRKEQGGEHVTDAPKQQHQAKASGARPRTEQISRIIRRGILWRSQEQERTEQQAEEQVTDASNQHQQLTIDTAEEQAVALVRHIAGQTGSITRFNRPITEHVRDVPKIEHGEEQVTDAQNQQHQAIALGPRPRTEQVRDVPVIELAGEQVTDAPDQRHQAIALGPRPRTEQVRDVPEIGLAEEQVTDAPDQQQQKPGTVRDVPKLIVNTREAFEAAVRNPLVKIFRMKTRHEAEDLAVLDNIIQDHLNENCSLEDVVAAVRAAASLLCPPKSTATKEDKHKLRLRRLDTKIKSMRQQASWYQCIIDVLKGKIGSSKKMKDMIEELRSIHHRVDLPTVHLLKQKAVDKIRSLTAARKKLIKRQKWIEDNNTFNAEPSKLFQSQQQMTQKPPSPPEVEEFWKSIYEQRPETRDTPALLRFQQMCDQNQQQNDEVSEISTEDIKQALKNKRDFTAPGLDGIQNYWWKRFPATHQHLARLFSGMLTRREPIPSWLVEGRTVLIPKSGDLGQPKNYRPITCLNTLYKILTSVIQHQILRVIGPVWDSIYEQRGAKKGVQGCKDNLLIDKSVCLDARFYKRDLHTSWLDYAKAYDTSPHELIIRLLKMLKVHPNIIHAIENIIALWKTKFAIRTEGRTVYTGWVRYRRGVFQGDSLSPLLFCITLIPLTIELRESKIGYKAGPPGRRNHLISHLLYMDDLKLYAPSESALRQLLNIVSDYTSAMGMSFGLDKCAVFHLRRGKAEDAGEDIRLEDGMIIRHLEDGETYKFLGMKQRGVLETTRIKDALTASYKKKLRDIWKSQLSGKNKVSATNMLAIPILTYSFGVVNWTVNELLDLDRSTRKTMNMNRSLHPNSSIQRIYLPRSQGGRGLQCLEYQHYQQTLEMAVRVLRSEDPLLKFVAQHEIANHGAFLFRAAQRALEKLSITGVSINPELAGAPITQADQRSLARLIRKSQSDTLLEHHMSKTLHSIYFRSLKDQDLSEELSFAFLKSASLKSETEGFVMACQDGVLNTRWYKKNIMKMDTPTTCRACHRQQETIMHILSACSVHAPSGYVERHNAALRILYFHLRAAYGIDKEPVLPYVPLEIEAVVQNERARICWNYPVSTTRQINAVKPDILLLDKELKELFVVEFSSPAENNVVMKEEQKRQKYKDLMFELGTLYPGHKVRMVVLIIGCLGGMRANYVDELKIIPACRSLAEVLAHRMQKAVLLGSLHIIRSHEL

SEQ ID NO: 25846 - protein, 1469 aa, Adalia bipunctata
MSDKYIRSLGEQSLPGDRQGASGVGAGRDSMRDTNGRMLRRQAPAIQEAMPLDEEDIDEERVQVVGRIGIQRSKEQPVVGTGSRNRTAQRGRHKWTPEQHDLLSALYKRSRPERRGYMNRLHGLWCENYPDLDYMTQQNLRDQISHLKRKGILWRSQEQERTKQQDEEQVTDASNQHQPLTIDTAEEQAVAMVRNIAGQTGTGTRSNRPITEHVRDVPKIEHGEEQVTDAQNQQHQAIALGPRPRTEQVRDVPVIGLVEEQVTDAPKQQHQAKALGARPRTEQISRVIRRGILWRSQEQERTEQQAEEQVTDASNQHQQLTIDTAEEQAVALVGNIASQTRSGTRFNRPITEHVRDVPKIEHGEEQVTDAQNQQHQAIALGPRPRTEQVRDVPVIGLVEEQVTDAPEQQHQAIALGPRPRTEQVRDVPVIGLAGEQVTDAPDQQQQKPGTVRDVPKLIVNTREAFEAAVRNPLVKTSRIKTRHEAEDLAVLDNIIQDHLNETCSLEDVVAAVRAAASLLCPPKSTATKEDKHKLRLRRLDTKIKSMRQQASWYQCIIDVLKGKIESSKKMKDMIEELRSIHHRVDLPTVHLLKQKAVDKIRSLAAARKKLIKRQKWIEDNNTFNAEPSKLFQSQQQMTQKPPSPPEVEEFWKSIYEQRAETRDTPALLRFQQMCDQNQQQNDELSEISTEDIRQALKNKRDFTAPGLDGIQNYWWKRFPATHQHLARLFSRMLTRREPIPSWLVEGRTVLIPKSGDLGQPKNYRPITCLNTLYKILTSVIQHQILRVIGPVWDSIYEQRGAKKGVQGCKDNLLIDKSVCLDARYYKRDLHTSWLDYAKAYDTSPHELIIRLLKMLKVHPNIVHAIENIIALWKTKFAIRTEGRTVYTGWVRYRRGVFQGDSLSPLLFCITLIPLTIELRESKIGYKAGPPGRRNHLISHLLYMDDLKLYAPSESALRQLLNIVSDYTSAMGMSFGLDKCAVFHLRRGKAEDAGEDIRLEDGMIIRHLEDGETYKFLGMKQRGVLETTQIKDALTASYKKKLRDIWKSQLSGKNKVSATNMLAIPILTYSFGVVNWTVNELLDLDRSTRKTMNMNRSLHPNSSIQRIYLPRSQGGRGLQCLEYQHYQQTLEMAVRVLRSEDPLLKFVAQHEIANHGAFLFRAAQRALEKLSITGVSINPELAGAPITQADQRSLARLIRKSQSDTLLEHHMSKTLHSIYFRNLKDQDLSEELSFAFLKSASLKSETEGFVMACQDGVLNTRWYKKNIMKMDTPTTCRACHRQQETIMHILSACSVHAPSGYVERHNAALRILYFHLRAAYGIDKEPVLPYVPLEIEAVVQNERARICWNYPVSTTRQINAVKPDILLLDKELKELFVVEFSSPAENNVVMKEEQKRQKYKDLMFELGTLYPGHKVRMVVLIIGCLGGMRANYVDELKIIPACRSLAEVLAHRMQKAVLLGSLHIIRSHEL

SEQ ID NO: 25847 - protein, 1097 aa, Adalia bipunctata
MRKNNNNVGPRPRTEQVRDVPVIELAGEQVTDAPDQQHQAIALGPRPRTEQVRDVPAIGLAEEQVTDAADQQQKNPGTVRDVPKLIVNPREAFEAAVRNPLVKTSRIKTRHEAEDLAVLDNIIQDHLNETCSLEDVVAAVRAAASLLCPPKSTATKEDKHKLRLRRLDTKIKSMRQQASWYQCIIDVLKGKIESSKKMKDMIEELRSIHHRVDLPTVHLLKQKAVDKIRSLAAARKKLIKRQKWIEDNNIFNAEPSKLFQSQQQMTQKPPSPPEVEEFWKSIYEQRAETRDTPALLRFQQMCDQNQQQNDELSEISTQDIRQALKNKRDFTAPGMDGIQNYWWKRFPATHQHLARLFNGMLTRREPIPSWLVEGRTVLIPKSGDLGQPKNYRPITCLNTLYKILTSVIQHQILRVIAPVWDSIYEQRGAKKGVQGCKDNLLIDKSVCLDARYYKRDLHTSWLDYAKAYDTSPHELIIRLLKMLKVHPNIIHAIENLIALWKTKFAIRTEGRTVYTGWVRYRKGVFQGDSLSPLLFCITLIPLTIELRESKIGYKAGPPGRRNHLISHLLYMDDLKLYAPSESALRQLLNIVSDYTSAMGISFGLDKCAVFHLRRGKAEDAGEDIQLEDGMTIRHLEEGETYKFLGMKQRGVLETTQIKDALTASYKKKLRDIWKSQLSGKNKVSATNMLAIPILTYSFGVVNWTVNELLDLDRSTRKTMNMNRSLHPNSSIQRIYLPRSQGGRGLQCLEYQHYQQTLEMAVRILRSEDPLLKFVAQHEIANHGAFLFRAAQRAVEKLSITGVSINPELAGTPITQAEQRSLARLIRKSQADKLLEHHMSKSLHSIYFRSLKDQDLSEELSFAFLKSASLKSETEGFVMACQDGVLNTRWYKKNIMKMDTPTTYRACHRQQETIMHILSACRVHAPSGYVERHNAALRILNFHLRAAYEIDKEPVLPYVPLEIEAVIQNERARICWNYPVSTTRQINAVKPDILLLDKELKELFVVEFSSPAENNVVMKEEQKRQKYKDLMFELGTLYPGHKVRMVVLIIGCLGGMRANYVDELKIIPACRSLAEVLAHRMQKAVLLGSLHIIRSHEV

SEQ ID NO: 25848 - protein, 1302 aa, Coccinella septempunctata
MSERNQLSLGKQSLPGDRQGTSGVGAGRDSMRDTNGRTLRRRAPATQKATPLDEEDIDEERVQVVGRIGIQSSQEHPVVGTGSRNRTAQRGRHKWTPEQHSLLSALYRRSGPDRRGYMNRLHGLWCENCPDLNYMTQQNLRDQISHLKRRGILQRPREQGRLEQQAEEQVTDALSQHQQLTVDITQEQAVALLSDIAGRTRTGTRSNRPITEHVRDVPDIERAEEQVTDAPDQQHQAMTHRSEAVALEARPRTEQVREVPEIELAGEQVTDAPDRQQQRPRTVRDSSELTDNTKEAFEAAVGDPLIKPTRIKSRHKAEDLAVLNSIIQDHLNETCSLEEVEAAVRTAAYLLCPPKSTAANNNNKHRKRLNRLDIKIKSMRQQASWYQCVIDVMKGKTKPSKRMREMIEELRAIHGTVNLPTVHLLKQKAVDKIRSLAAARKKLIRRKRWIEDNNTFTAEPSKLFQPQQQEVQNPPSPQDVEEFWKSLYEQPAKTRDTPALPRFQQMCDQTLQQNDELSEISAEDIRQALKNKNDFTAPGPDGIQNYWWKSFPAAHKHLARLFSGTLIRREPIPSWLVEGRTVLIPKSGDLGQPKNYRPITCLNTLYKILTSVIQDRILRVIGPVWESIYEQRGAKKGVQGCKDNLLIDKSVCLDARHYKRDLHTSWLDYAKAFDTSPHDLIIRLLKMLKVHPNIIHAIESIIALWKTKFAMRAEGRTVYTGWVRYRRGVFQGDSLSPLLFCITLMPLSIELRASKIGYKAGPPGRRNHLISHLMYVDDLKLYAPSRTALQQLLNIVSEYTSAVGMSFGLDKCAVFHLRRGRVDDPGEDIQLEDGMTFRRLEDGETYKFLGMKQRGVLETTQIKDALSASYKKKLRDIWKSQLSGKNKVSATNMLAIPILTYSFGVVNWTVNELLDLDRSTRKTMNMNRSLHPNSSIQRIYLPRSQGGRGLQCLEYQHYQQTLETAVRVLRSEDPLLKFVAQHELANHGAFLFRAAQRALEKLGITGVSIDPERAGAPITQADQRRLARLIRKSQSNTLLEHHMSKSLHSIFFRSLKDQDLSEELSFAFLKSASLKSETEGFVMACQDGVINTRWYKKNIMKMDTPTTCRACHSQQETIMHILSACRVHAPSGYIERHNAALRVLYFHLRAAYEIDKEPVLPYVPLEIEAVAQNEKARIYWNYPVSTTRQINAIKPDILLLDKELKELFVVEFSSPAENNMVMKEEQKRQKYKDLVFELGTMYPGHKVRMVVLIIGCLGGMRANYVEELKIIPACRSWAEILAHRMQKAVLLGSLHIIRSHEL

SEQ ID NO: 25849 - protein, 1350 aa, Coccinella septempunctata
MEIIIIIIIIIIIIIIIIIIIIVPARGYYLVVYGCDNPADPGHSQPMSERNQLSLGKQSLPGDRQGTSGVGAGRDSMRDTNGRTLRRRAPATQKATPLDEEDIDEERVQVVGRIGIQSSQEHPVVGTGSRNRTAQRGRHKWTPEQHSLLSALYRRSGPDRRGYMNRLHGLWCENCPDLNYMTQQNLRDQISHLKRRGILQRSREQGRLEQQAEEQVTDALSQHQQLTVDITQEQAVALLSDIAGRTRTGARSNRPITEHVRDVPDIERAEEQVTDAPGQQHQAMTHRGEAVALEARPRTEQVREVPEIELAGEQVTDAPDRQQQRPRTVRDSSELVDNTKEAFEAAVGDPLIKPTRIKSRHKAEDLAVLNSIIQDHLNETCSLEEVEAAVRAAAYLLCPPKSTAANNNNNNKHRKRLNRLDIKIKSMRQQASWYQCVIDVMKGKTKPSKRMREMIEELRAIHGTVNLPTVHLLKQKAVDKIRSLAAARKKLIRRKRWIEDNNTFTAEPSKLFQPQQQEVQNPPSPQDVEEFWKSLYEQPAKTRDTPALPRFQQMCDQTLQQNDELSEISAEDIRQALKNKNDFTAPGPDGIQNYWWKSFPATHKHLARLFSGMLIRREPIPSWLVEGRTVLIPKSGDLGQPKNYRPITCLNTLYKILTSVIQDRILRVIGPVWDSIYEQRGAKKGVQGCKDNLLIDKSVCLDARHYKRDLHTSWLDYAKAFDTSPHDLIIRLLKMLKVHPNIIHAIESIIALWKTKFAIRAEGRTVYTGWVRYRRGVFQGDSLSPLLFCITLMPLSIELRASKIGYKAGPPGRRNHLISHLMYVDDLKLYAPSRTALQQLLNIVSEYTSAVGMSFGWGKCAVFHLRRGRVDDPGEDIQLEDGMTFRRLEDGETYKFLGMKQRGVLETTQIKDALSASYKKKLRDIWKSQLSGKNKVSATNMLAIPILTYSFGVVNWTVNELLDLDRSTRKTMNMNRSLHPNSSIQRIYLPRSQGGRGLQCLEYQHYQQTLETAVRVLRSEDPLLKFVAQHELANHGAFLFRAAQRALEKLGITGVSIDPERAGAPITQVDQRRLARLIRKSQSNTLLEHHMSKSLHSIFFRSLKDQELSEELSFAFLKSASLKSETEGFVMACQDGVINTRWYKKNIMKMDTPTTCRACHSQQETIMHILSACRVHAPSGYIERHNAALRVLYFHLRAAYEIDKEPVLPYVPLEIEAVVQNEKARIYWNYPVSTTRQINAIKPDILLLDKELKELFVVEFSSPAENNMVMKEEQKRQKYKDLVFELGTMYPGHKVRMVVLIIGCLGGMRANYVEELKIIPACRSWAEILAHRMQKAVLLGSLHIIRSHEL

SEQ ID NO: 25850 - protein, 991 aa, Adalia bipunctata
MKTRHEAEDLAVLDNIIQDHLNETCSLEDVVAAVRAAASLLCPPKSTATKEDKHKLRLRRLDTKIKSMRQQASWYQCNIDVLKGKIESSKKMKDMIEELRSIHHRVDLPTVHLLKQKAVDRVRSLAAARKKLIKRQKWIEDNNTFNAEPSKLFQSQQQMTQKPPSPPEVEQFWKSIYEQRAETRDTPALLRFQQMCDQNQQQNDELSEISTEDIRQALKNKRDFTAPGLDGIQNYWWKRFPATHQHLARLFSGMLTRREPISLWLVEGRTVLIPKSGDLGQPKNYRPITCLNTLYKILTSVIQHQILRVIGPVWDSIYEQRGAKKGVQGCKDNLLIDKSVCLDARYYKRHLHTSWLDYAKAYDTSPHELIIRLLKMLKVHPNIIHAIENIIALWKTKFAIRTEGRTVYTGWVRYRRGVFQGDSLSPLLFCITLIPLTIELRESKIGYKAGPPGRRNHLISHLLYMDDLKLYAPSESALRQLLNIVSDYTSAMGMSFGLDKCAVFHLRRGKAEDAGEDIRLEDGMTIRHLEEGETYKFLGMKQRGVLETTQIKDALTASYKKKLRDIWKSQLSGKNKVSATNMLAIPILTYSFGVVNWTVNELLDLDMSTRKTMNMNRSLHPNSSIQRIYLPRSQGGRGLQCLEYQHYQQTLEMAVRILRSEDPLLKFVAQHEIANHGAFLFRAAQRAVEKLSITGVSINPELAGTPITQAEQRSLARLIRKSQADKLLEHHMSKNLHSIYFRSLKDQDLSEELSFAFLKSASLKSETEGFVMACQDGVLNTRWYKKNIMKMDTPTTCRACHRQQETIMHILSACRVHAPSGYVERHNAALRILYFHLRAAYEINKEPVLPYVPLEIEAVVQNERARICWNYPVSTTRQINAVKPDILLMDKELKELFVVEFSSPAENNVVMKKEQKRQKYKDLMFELGTLYPGHKVRMVVLIIGCLGGMRANYVDELKIIPACRSLAEVLAHRMQKAVLLGSLHIIRSHEL

SEQ ID NO: 25851 - protein, 899 aa, Adalia bipunctata
MKDIEELRSIHHRVDLPTVHLLKQKAVDKIRSLAAARKKLIKRQKWIEDNNTFNAEPSKLFQSQQQMTQKPPSPPEVEEFWKSIYEQRAETRDTPALLRFQQMCDQNQQQNDELSEISTEDIRQALKNKRDFTAPGMDGIQNYWWKRFPATHQHLARLFNGMLTRREPIPSWLVEGRTVLIPKSGDLGQPKNYRPITCLNTLYKILTSVIQHQILRVIGPVWDSIYEQRGAKKGVQGCKDNLLIDKSVCLDARYYKRDLHTSWLDYAKAYDTSPHELIIRLLKMLKVHPNIIHAIENIIALWKTRFAIRTEGRTVYTGWVRYRRGVFQGDSLSPLLFCITLIPLTIELRESKIGYKAGPPGRRNHLISHLLYMDDLKLYAPSESALRQLLNIISDYTSAMGMSFGLDKCAVFHLRRGKAEDAGEDIQLEDGMTIRHLEEGETYKFLGMKQRGVLETTQIKDALTASYKKKLRDIWKSQLSGKNKVSATNMLAIPILTYSFGVVNWTVNELLDLDRSTRKTMNMNRSLHPNSSIQRIYLPRSQGGRGLQCLEYQHYQQTLEMAVRILRSEDPLLKFVAQHEIANHGAFLFRAAQRAVEKLSITGVSINPELAGTPITQAEQRSLARLIRKSQADKLLEHHMSKSQHSIYFRSLKDQDLSEELSFAFLKSASLKSETEGFVMACQDGVLNTRWYKKNIMKMDTPTTCRACHRQQETIMHILSACRVHAPSGYVERHNAALRILYFHLRAAYEIDKEPVLPYVPLEIEAVIQNERARICWNYPVSTTRQINAVKPDILLLDKELKELFVVEFSSPAENNVVMKEEQKRQKYKDLMFELGTLYPGHKVRMVVLIIGCLGGMRANYVDELKIIPACRSLAEVLAHRMQKAVLLGSLHIIRSHEV

SEQ ID NO: 25852 - protein, 924 aa, Adalia bipunctata
MRQQASWYQCIIDVLKGKIGSSKRVKDMIEELRSIHHRVDLPTVHLLKQKAVDKIRSLAAARKKLIKRQKWIEDNNTFNVEPSKLFQPQQQMTQKPPSPQEVEEFWKSIYEQRAETRDTPALLRFQQMCDQNQQQNDEPSEISTEDIRQALKNKRDFTAPGLDGIQNYWWKKFPATHQHLARLFSGMLTRREPIPSWLVEGRTVLIPKSGDLGQPKNYRPITCLNTLYKILTSVIQDQILRVIGPVWNSIYEQRGAKKGVQGCKDNLLIDKSVCLDARHYKRDLHTSWLDYAKAYDTTPHELIVRLLKMLKVYPNITHAIENIIALWKTKFAIRAEGRTVYTGWVRYRRGVFQGDSLSPLLFCITLIPLTIELRESKIGYKAGPPGRRNHLISHLLYMDDLKLYAPSESALRQLLKIVSDYTSAMGMSFGLDKCAVFHLRRGKAEDAGEDIRLEDGMTFRHLEDGETYKFLGMKQRGVLETTQIKDALTASYKKKLRDIWKSQLSGKNKVSATNMLAIPILTYSFGVVNWTVNELLDLDRSTRKTMNMNRSLHPNSSIQRIYLPRSQGGRGLQCLEYQHYQQTLEMAVRILRSEDPLLKFVAQHEIANHGAFLFRAAQRAVEKLSITGVSINPELAGTPITQAEQRSLARLIRKSQADKLLEHHMSKNLHSIYFRSLKDQDLSEELSFAFLKSASLKSETEGFVMACQDGVLNTRWYKKNIMKMDTPTTCRACHRQQETIMHILSACRVHAPSGYVERHNAALRILYFHLRAAYEIDKEPVLPYVPLEIEAVVQNERARICWNYPVSTTRQINAIKPDILLLDKELKELFVVEFSSPAENNVVMKEEQKRQKYKDLMFELGTLYPGHKVRMVVLIIGCLGGMRANYVDELKIIPACRSLAEVLAHRMQKAVLLGSLHIIRSHEL

SEQ ID NO: 25853 - protein, 1399 aa, Adalia bipunctata
MSDTYKLSLGKQSLPGDRQGASGVGAGRDSMRDTNGRMLRRQAPAIQEAMPSDEEDIDEERVQVVGRIGIQRSKEQPVVGTGSRNRTAQRGRHKWTPEQHSLLSALYRRSRPERRGYMNRLHGLWCENYPDLDFMTQQNLRDQISHLKRRGIIWRSQEQERTEQQAEEQVTDASSQHQQLTIDTTEEQAVALVRNIAGRTGTGIRSNRPIREHVRDVPGIKNGGEQMTDAPNQQHQATALGTRPRTEQVRDVPEIEHGEEQVTDAPNQQHQEIALGTRPRAEHVRDASEIEHGKEQVTDAPNQQHRAITPGARPRAGQVRDVPEIEHGEEQVTDAPNQQHRGIALGARPRAEQVRDVPEIEYAEEQVTDAPDHKQQMPRTVTDVPKLIVNTREAFEAAVRNPLVKATRIKTRHKAEDLAVLDKIIQDHLNETCSLEDVVAAVRAASSLLCPPKSKATNNDKHRLRLSRLDIKIKSMRQQASWYQCIIDVLKGKIKSSKKMKDMIEELRSIHRTVDLPTVRLLKQKAVDRIRSLAAARKKLIKRQKWIEDNNTFTAEPSKLFQSPQQKAQNPPSPQEVEEFWKSLYEQQAEIRDTPALLRFQQMCDQNQQQNDEPSEISTEDIRQALKNKRDFTAPGLDGIQNYWWKRFPATHQHLARLFSGMLTRREPIPSWLVEGRTVLIPKSGDLGQPKNYRPITCLNTLYKILTSVIQHQILRVIGPVWDSIYEQRGAKKGVQGCKDNLLIDKSVCLDARFYKRDLHTSWLDYAKAYDTSPHELITRLLKMLKVHPNIIHAIENIIALWKTKFAIRTEGRTVYTGWVRYRRGVFQGDSLSPLLFCMTLIPLTIELRESKIGYKAGPPGRRNHLISHLLYMDDLKLYAPSESALRQLLNIVSDYTSAMGMSFGLDKCAVFHLRRGKAEDAGEDIRLEDGMIIRHLEDGETYKFLGMKQRGVLETTQIKDALTASYKKKLRDIWKSQLSGKNKVSATNMLAIPILTYSFGVLNWTVNELLDLDRSTRKTMNMNRSLHPNSSIQRIYLPRSQGGRGLQCLEYQHYQQTLEMAVRVLRSEDPLLKFVAQHEIANHGAFLFRAAQRALEKLSITGVSINPESAGAPITQADQRSLARLIRKSQSDTLLEHHMSKTLHSIYFRSLKDQDLSEELSFAFLKSASLKSETEGFVMACQDGVLNTRWYKKNIMKMDTPTTCRACHRQQETIMHILSACSVHAPSGYVERHNAALRILYFHLRAAYGIDKEPVLPYVPLEIEAVVQNERARICWNYPVSTTRQINALKPDILLLDKELKELFVVEFSSPAENNVVMKEEQKRQKYKDLMFELGTLYPGHKVRMVVLIIGCLGGMRANYVDELKIISACRSLAEVLAHRMQKAVLLGSLHIIRSHEL

SEQ ID NO: 25854 - protein, 1303 aa, Coccinella septempunctata
MSERNQLSLGKQSLPGDRQGTSGVGAGRDSMRDTNGRTLRRRAPATQKATPLDEEDIDEERVQVVGRIGIQSSQEHPVVGTGSRNRTAQRGRHKWTPEQHSLLSALYRRSGPDRRGYMNRLHGLWCENCPDLNYMTQQNLRDQISHLKRRGILQRSREQGRLEQQAEEQVTDALSQHQQLTVDITQEQAAALLSDIAGRTRTGTRPNRPITEHVRDVPDIERAEEQVTDAPDQQHQAMTHRSEAAALEARPRTEQVREVPEIELAGEQVTDAPDRQQQRPRTVRDSSELVDNTKEAFEAAVGDPLIKPTRIKSRHKAEDLAVLNSIIQDHLNETCSLEEVEAAVRAAAYLLCPPKSTAANNNNNKHRKRLNRLDIKIKSMRQQASWYQCVIDVMKGKTKPSKRMREMIEELRAIHGTVNLPTVHLLKQKAVDKIRSLAAARKKLIRRKRWIEDNNTFTAEPSKLFQPQQQEVQNPPSPQDVEEFWKSLYEQPAKTRDTPALPRFQQMCDQTLQQNDELSEISAEDIRQALKNKNDFTAPGPDGIQNYWWKSFPATHKHLARLFSGMLIRREPIPSWLVEGRTVLIPKSGDLGQPKNYRPITCLNTLNKILTSVIQDRILRVIGPVWDSIYEQRGAKKGVQGCKDNLLIDKSVCLDARHYKRDLHTSWLDYAKAFDTSPHDLIIRLLKMLKVHPNIIHAIESIIALWKTKFAIRAEGRTVYTGWVRYRRGVFQGDSLSPLLFCITLMPLSIELRASRIGYKAGPPGRRNHLISHLMYVDDLKLYAPSRTALQQLLNIVSEYTSAVGMSFGLDKCAVFHLRRGRVDDPGEDIQLEDGMTFRRLEDGETYKFLGMKQRGVLETTQIKDALSASYKKKLRDIWKSQLSGKNKVSATNMLAIPILTYSFGVVNWTVNELLDLDRSTRKTMNMNRSLHPNSSIQRIYLPRSQGGRGLQCLEYQHYQQTLETAVRVLRSEDPLLKFVAQHELANHGAFLFRAAQRALEKLGITSVSIDPERAGAPITQADQRRLARLIRKSQSNTLLEHHMSKSLHSIFFRSLKDQDLSEELSFAFLKSASLKSETEGFVLACQDGVINTRWYKKNIMKMDTPTTCRACHSQQETIMHILSACRVHAPSGYIERHNAALRVLYFHLRAAYEIDKEPVLPYVPLEIEAVVQNEKARIYWNYPVSTTRQINAIKPDILLLDKELKELFVVEFSSPAENNMVMKEEQKRQKYKDLVFELGTMYPGHKVRMVVLIIGCLGGMRANYVEELKIIPACRSWAEILAHRMQKAVLLGSLHIIRSHEL

SEQ ID NO: 25855 - protein, 1302 aa, Coccinella septempunctata
MSERNQLSLGKQSLPGDRQSTSGVGAGRDSMRDTNGRTLRRRAPATQKATPLDEEDIDEERVQVVGRIGIQSSQEHPVVGTGSRNRTAQRGRHKWTPEQHSLLSALYRRSGPDRRGYMNRLHGLWCENCPDLNCMTQQNLRDQISHLERRGILQRPREQGRLEQQAEEQVTDALSQHQQLTVDITQEQAGALLSDIAGRTRTGTRSNRPITEHVRDVPDIERAEEQVTDAPDQQHQAMTHRSEAVALEARPRTEQVREVPEIELAEEQVTDAPDRQQQRPRTVRDSSELIDNTKEALEAAVGDPLIKPTRIKSRHKAEDLAVLKSIIQDHLNETCSLEEVEAAVRAAAYLLCSPKSTAANNNNKHRKRLNRLDIKIKSMRQQASWYQCVIDVLKGKTKPSKRMKEMIEELRAIHGTVNLPTVHLLKQKAVDKIRSLAAARKKLIRRKRWIEDNNTFTAEPSKLFQPQQQEVQNPPSPQDVEEFWKSLYEQPAKTRDTPALPRFQQMCDQTLQQNDELSEISAEDIRQALKNKNDFTAPGPDGIQNYWWKSFPATHKHLARLFSGMLIRREPIPSWLVEGRTVLIPKSGDLGQPKNYRPITCLNTLYKILTSDIQDRILRVIGPVWDSIYEQRGAKKGVQGCKDNLLIDKSVCLDARHYKRDLHTSWLDYAKAFDTSPHDLIIRLLKMLKVHPNIIHAIESIIALWKTKFAIRVEGRTVYTGWVRYRRGVFQGDSLSPLLFCITLMPLSIELRASKIGYKAGPPGRRNHLISHLMYVDDLKLYALSRTALQQLLNIVSDYTSAMGMSFGLDKCAVFHLRRGRVDDPGEDIQLEDGMTFRRLEEGETYKFLGMKQRGVLETTQIKDALSASYKKKLRDIWKSQLSGKNKVSATNMLAIPILTYSFGVVNWTVNELLDLDRSTRKTMNMNRSLHPKSSIQRIYLPRSRGGRGLQCLEYQHYQQTLETAVRVLRSEDPLLKFVAQHELANHRAFLFRAGQRALEKLGITGVSIDPERAGAPITQTDQGRLARLIRKSQSNTLLEHHMSKSLHSIFFRSLKDQDLSEELSFAFLKSASLKSETEGFVMACQDGVINTRWYKKNIMKMDTPTTCRACHSQQETIMHILSACRVHAPSGYIERHNAALRVLYFHLRAAYEIDKEPVLPYVPLEIEAVVQNEKARIYWNYPVPTTRQINAIKPDILLLDKELKELFVVEFSSPAENNIVMKEEQKRQKYKDLVFELGTMYPGHKVKMVLLIIGCLGGMRANYVEELKIIPACRFWAEILAHRMQKAVLLGSLHIIRSHEL

SEQ ID NO: 25856 - protein, 1046 aa, Adalia bipunctata
MARTVTDVPTLIVNTREAFEAAVRNPLVKATRIKTRHKAEDLAVLDKIIQDHLNETCSLEDVVAAVRAASSLLCPPKSAATNDKHRLRLSRLDIKIKSMRQQASWYQCIIDVLKGKIKSSKKMKDMIEELRSIHRTVDLPTVHLLKQKAVDRIRSLAAARKKLIKRQKWIEDNNTFTAEPSKLFQSPQQKAQNPPSLQEVEEFWKSLYEQQAEIRDTPALLRFQQMCDQNQQQNDEPSEISTEDIKQALKNKRDFTAPGLDGIQNYWRKKFPATHQHLARLFSGMLTRREPIPSWLVEGRTVLIPKSGDLGQPKNYRPITCLNTLYKILTSVIQDQILRVIGPVWNSIYEQRGAKKGVQGCKDNLLIDKSVCLDARHYKRDLYTSWLDYAKAYDTTPHELIVRLLKMLKVYPNIIHAIENIIALWKTKFTIRAEGRTVYTGSVRYRRGVFQGDSLSSLLFCITLIPLTIELRESKIGYKAGPPGRRNHLISHLLYMDDLKLYAPSESALRQLLNIVSDYTSAMGMSFGLDKCAVFHLRRGKTEDAGEDIRLEDGMTFRHLEDGETYKFLGMKQRGVLETTQIKDALTASYKKKLRDIWKSQLSGKNKVSATNMLAIPILTYSFGVVNWTVNELLDLDRSTRKTMNMNRSLHPNSSIQRIYLPRSQGGRGLQCLEYQHYQQTLEMAVRILRSEDPLLKFVAQHEIANHGAFLFRAAQRAVEKLSITGVSINPELAGTPITQAEQRSLARLIRKSQADKLLEHHMSKNLHSIYFRSLKDQDLSEDLSFAFLKSANLKSETEGFVMACQDGVLNTRWYKKNIMKMDTPTTCRACHRQQETIMHILSACRVHAPSGYLERHNAALRILYFHLRAAYEIDKEPVLPYVPLEIEAVVQNERARICWNYPVSTTRQINAVKPDILLLDKELKELFVVEFSSPAENNVVMKEEQKRQKYKDLMFELGTLYPGHKVRMVVLIIGCLGGMRANYVDELKIIPACRSLAEVYWRTECRKQCCSGHFISSGPMNSRSHLQLISFVKGHYEGRMKNSSI

SEQ ID NO: 25857 - protein, 1435 aa, Adalia bipunctata
MSDKFIRSLGEQSLPGDRQGASGVGAGRDSMRDTNGRMLRRQAPAIQEAMPLDEEDIDEERVQVVGRIGIQRSKEQPVVGTGSRNRTAQRGRHKWTPEQHDLLSALYRRSRPERRGYMNRLHGLWCENYPDLDYMTQQNLRDQISHLKRKGILWRSQEQERTEQQDGEQVTDASNQHQLLTIDTAEEQAVAMVRNVAGQTTGTGTRSNRPITEHVRDVPRKEQGGEHVTDAPKQQHQAKASGARPRTEQISRIIRRGILWRSQEQERTEQQAEEQVTDASNQHQQLTIDTAEEQAVALVRHIAGQTGSITRFNRPITEHVRDVPKIEHGEEQVTDAQNQQHQAIALGPRPRTEQVRDVPVIELAGEQVTDAPDQRHQAIALGPRPRTEQVRDVPVIGLAEEQVTDAPDQQQQKPGTVRDVPKLIVNTREAFEAAVRNPLVKIFRMKTRHEAEDLAVLDNIIQDHLNETCSLEDVVAAVRAAASLLCPPKSTATKEDKHKLRLRRLDTKIKSTRQQASWYQCIIDVLKGKIGSSKKMKDMIEELRSIHHRVDLPTVHLLKQKAVDKIRSLTAARKKLIKRQKWIEDNNTFNAEPSKLFQSQQQMTQKPPSPPEVEEFWKSIYEQRPETRDTPALLRFQQMCDQNQQQNDELSEISTEDIKQALKNKRDFTAPGLDGIQNYWWKRFPATHQHLARLFSGMLTRREPIPSWLVEGRTVLIPKSGDLGQPKNYRPITCLNTLYKILTSVIQHQILRVIGPVWDSIYEQRGAKKGVQGCKDNLLIDKSVCLDARFYKRDLHTSWLDYAKAYDTSPHELIIRLLKMLKVHPNVIHAIENIIALWKTKFAIRTEGRTVYTGWVRYRRGVFQGDSLSPLLFCITLIPLTIELRESKIGYKAGPPGRRNYLISHLLYMDDLKLYAPSESALRQLLNIVSDYTSAMGMSFGLDKCAVFHLRRGKAEDAGEDIRLEDGKIIRHLEDGETYKFLGMKQRGVLETTRIKDALTASYKKKLRDIWKSQLSGKNKVSATNMLAIPILTYSFGVVNWTVKELLDLDRSTRKTMNMNRSLHPNSSIQRIYLPRSQGGRGLQCLEYQHYQQTLEMAVRVLRSEDPLLKFVAQHEIANHGAFLFRAAQRALEKLSITSVSINPELAGAPITQADQRSLARLIRKSQSDTLLEHHMSKTLHSIYFRSLKDQDLSEELSFAFLKSASLKSETEGFVMACQDGVQNTRWYKKNIMKMDTPTTCRACHRQQETIMHILSACSVHAPSGYVERHNAALRILYFHLRAAYGIDKEPVLPYVPLEIEAVVQNERARICWNYPVSTTRQINAVKPDILLLDKELKELFVVEFSSPAENNVVMKEEQKRQKYKDLMFELGTLYPGHKVRMVVLIIGCLGGMRANYVDELKIIPACRSLAEVLAHRMQKAVLLGSLHIIRSHEL

SEQ ID NO: 25858 - protein, 1470 aa, Adalia bipunctata
MYNNNNNNNNNNSPARGYYCVVYGCDNPADPGHSQPMSDKYIRSLGEQSLPGDRQGASGVGAGRDSMRDTNGRMLRRQAPAIQEAMPLDEEDIDEERVQVVGRIGIQRSKEQPVVGTGSRNRTAQRGRHKWTPEQHDLLSALYRRSRPERRGYMNRLHGLWCENYPDLDYMTQQNLRDQISHLKRKGILWRSQEQERTEQQDGEQVTDASNQHQLLTIDTAEEQAVAMVRNVAGQTGTGTRSNRPITEHVRDVPRKEQGGEHVTDAPKQQHQAKASGARPRTEQISRIIRRGILWRSQEQERTEQQAEEQVTDASNQHQQLTIDTAEEQAVALVRHIAGQTGSITRFNRPITEHVRDVPKIEHGEEQVTDAQNQQHQAIALGPRPRTEQVRDVPVIELAGEQVTDAPDQRHQAIALGPRPRTEQVRDVSVIGLAEEQVTDAPDQQQQKPGTVRDVPKLIVNTREAFEAAVRNPLVKIFRMKTRHEAEDLAVLDNIIQDHLNETCSLEDVVAAVRAAASLLCPPKSTATKEDKHKLRLRRLDTKIKSMRQQASWYQCIIDVLKGKIGSSKKMKDMIEELRSIHHRVDLPTVHLLKQKAVDKIRSLTAARKKLIRRQKWIEDNNTFNAEPSKLFQSQQQMTQKPPSPPEVEEFWKSIYEQRPETRDTPALLRFQQMCDQNQQQNDELSEISTEDIKQALKNKRDFTAPGLDGIQNYWWKRFPATHQHLARLFSGMLTRREPIPSWLVEGRTVLIPKSGDLGQPKNYRPITCLNTLYKILTSVIQHQILRVIGPVWDSIYEQRGAKKGVQGCKDNLLIDKSVCLDARFYKRDLHTSWLDYAKAYDTSPHELIIRLLKMLKVHPNIIHAIENIIALWKTKFAIRTEGRTVYTGWVRYRRGVFQGDSLSPLLFCITLIPLTIELRESKIGYKAGPPGRRNHLISHLLYMDDLKLYAPSESALRQLLNIVSDYTSAMGMSFGLDKCAVFHLRRGKAEDAGEDIRLEDGMIIRHLEDGETYKFLGMKQRGVLETTQIKDALTASYKKKLRDIWKSQLSGKNKVSATNMLAIPILTYSFGVVNWTVNELLDLDRSTRKTMNMNRSLHPNSSIQRIYLPRSQGGRGLQCLEYQHYQQTLEMAVRVLRSEDPLLKFVAQHEIADHGAFLFRAAQRALEKLNITGVSINPELAGAPITQADQRSLARLIRKSQSDTLLEHHMSKTLHSIYFRSLKDQDLSEELSFAFLKSASLKSETEGFVMACQDGVLNTRWYKKNIMKMDTPTTCRACHRQQETIMHILSACSVHAPSGYVERHNAALRILYFHLRAAYGIDKEPVLPYVPLEIEAVVQNERARICWNYPVSTTRQINAVKPDILLLDKELKELFVVEFSSPAENNVVMKEEQKRQKYKELIFELGTLYPGHKVRMVVLIIGCLGGMRANYVDELKIIPACRSLAEVLAHRMQKAVLLGSLHIIRSHEL

SEQ ID NO: 25859 - protein, 1364 aa, Adalia bipunctata
MSDTYTLSLGKQSLPGDRQGASGVGAGRDSMRDTNGRMLRRQAPAIQEAMPSDEEDIDEERVQVVGRIGIQRSKEQPVVGTGSRNRTAQRGRHKWTPEQHSLLSALYKRSRPERRGYMNRLHGLWCENYPDLDFMTQQNLRDQISHLKRRGIIWRSQEQERTEQQAEEQVTDASSQHQQLTIDTTEEQAVALVRNIAGRTGTGIRSNRPIREHVRDVPEIENGGEQVTDAPNQQHQAIALGTRSRTEQVRDVPEIEHGEEQVTDAPNQQHQEITPGARPRAGQVRDVPEIEHGEEQVTDAPNQQHQGIALGARPRAEQVRDVPEIEHAEEQVTDAPDQQQQMPRTVTDVPKLIVNTWEAFEAAVRNPLVKATRIKTRHKAEDLAVLDRIIQDHLNETCSLEDVVAAVRAASSLLCPPKSTAKNNDKHRLRLNRLDIKIKSMRQQASWYQCIIDVLKGKIKSSKKMKDMIEELRSIHRTVDLPTVHLLKQKAVDRIRSLAAARKKLIKRQKWIEDNNTFTAEPSKLFQSPQQKAQNPPSPQEVEEFWKSLYEQQAEIRDTPALLRFQQMCDQNQQQNDEPSEISTEDIRQALKNKRDFTAPGLDGIQNYWWKKFPATHQHLARLFSGMLTRREPIPSWLVEGRTVLIPKSGDLGQPKNYRPITCLNTLYKILTSVIQYQILRVIGPVWNSIYEQRGAKKGVQGCKDNLLIDKSVCLDARHYKRDLHTSWLDYAKAYDTTPHELIVRLLKMLKVYPNIIHAIENIIALWKTKFAIRAEGRTVYTGWVRYRRGVFQGDSLSPLLFCITLIPLTIELRESKIGYKAGPPGRRNHLISHLLYMDDLKLYAPSESALRQLLNIVSDYTSSMGMSFGLDKCAVFHLRRGKAEDAGQDIRLEDGMTFRHLEDGETYKFLGMKQRGVLETTQIKDALTASYKKKLRDIWKSQLSGKNKVSATNMLAIPILTYSFGVVNWTVNELLDFDRSTRKTMNMNRSLHPNSSIQRIYLPRSQGGRGLQCLEYQHYQQTLEMAVRILRSEDPLLKFVAQHEIANHGAFLFRAAQRAVEKLSITGVSINPELAGTPITQAEQRSLARLIRKSQADKLLEHHMSKNLHSIYFRSLKYQDLSEELSFAFLKSASLKSETEGFVMACQDGVLNTRWYKKNIMKMDTPTTCRACHRQQETIMHILSACRVHAPSGYVERHNAALRILYFHLRAAYEIDKEPVLPYVPLEIEAVVQNERARICWNYPVSTTRQINAVKPDILLLDKELKELFVVEFSSPAENNVVMKEEQKRQKYKDLMFELGTLYPGHKVRMVVLIIGCLGGMRANYVDELKIIPACRSLAEVLAHRMQKAVLLGSLHIIRSHEL

SEQ ID NO: 25860 - protein, 924 aa, Coccinella septempunctata
MRQQASWYQCVIDVLKGKTKPSKRMREMIEELRAIHGTVNLPTVHLLKQKAVDKIRSLAAARKKLIRRKRWIEDNNTFTAEPSKLFQPQQQEVQNPPSPQDVEEFWKSLYEQPAKTRDTPALPRFQQMSDHTLQQNDELSEISAEDIRQALKNKNDFTAPGPDGIQNYWWKSFPATHKHLARLFSGMLIRREPIPSWLVEGRTVLIPKSGDLGQPKNYRPITCLNTLYKILTSVIQDRILRVIGPVWDSIYEQRGAKKGVQGCKDNLLIDKSVCLDARHYKRDLHTSWLDYAKAFDTSPHDLIIRLLKMLKVHPNIIHAIESIIALWKTKFAFRAEGRTVYTGWVRYRRGVFQGDSLSPLLFCITLMPLSIELRASKIGYKAGPPGRRNHLISHLMYVDDLKLYAPSRTALQQLLNIVSDYTSAMGMSFGLDKCAVFHLRRGRVDDPGEDIQLEDGMTFRRLEEGETYKFLGMKQRGVLETTHIKDALSASYQKKLRDIWKSQLSGKNKVSATNMLAIPILTCSFGVVNWTVNELLDLDRSTRKTMNMNRSLHPNSSIQRIYLPRSQGGRGLQCLEYQHYQQTLETAVRVLRSEDPLLKFVAQHELANHGAFLFRAGQRALEKLGITGVSIDPERAAAPITQADQRRLARLIRKSQSNTLLEHHMSKSLHSIFFRSLKDQDLSEELSFAFLKSASLKSETEGFVMACQDGVINTRWYKKNIMKMDTPTTCRACHSQQETIMHILSACRVHAPSGYIERHNAALRVLYFHLRAAYEIDKEPVLPYVPLEIEAVVQNEKARIYWNYPVSTTRQINAIKPDILLLDKELKELFVVEFSSPAENNMVMKEEQKRQKYKDLVFELGTMYPGHKVRMVVLIIGCLGGMRANYVEELKIIPACRSWAEILAHRMQKAVLLGSLHIIRSHEL

SEQ ID NO: 25861 - protein, 1178 aa, Coccinella septempunctata
MNRLHGLWCENCPDLNYMTQQNLRDQISHLKRRGILQRPREQGRSEQQAEEQVADALSQHQQLTVDITQEQAVALLSDIAGRTRTGTRSNRPITEHVRDVPDIERAEEQVTDAPDQQHQAMTHRSEAVALEARPRTEQVREVPEIELAEEQVTDAPDRQQQRPRRDSSELIDNTKEAFEAAVGDPLIKPTRIKSRHKAEDLAVLNSIIQDHLNETCSLEEVEAAVRAAAYLLCPPKSTAANNNNKHRKRLNRLDIKIKSMRQQASWYQCVIDVLKGKTKPSKRMREMIEELRAIHGTVHLLKQKAVDKIRSLAAARKKLIRRKRWIEDNNTFTAEPSKLFQPQQQEVQNPPSPQDVEEFWKSLYEQPAKTRDTPALPRFQQMCDQTLQQNDELSEISPEDIRQALKNKNDFTAPGPDGIQNYWWKSFPATHKHLARLFSGMLIRREPIPSWLVEGRTVLIPKSGDLGQPKNYRPITCLNTLYKIFTSVIQDRILRVIGPVWDSIYEQRGAKRGVQGCKDNLLIDKSVCLDDRHYKRDLHTSWLDYAKAFDTSPHDLIIRLLKMLKVHPNIIHAIESIIALWKTKFAIRAEGRTVCTGWVRYRRGVFQGDSLSPLLFCITLMPLSIELRASKIGYKAGPPGRRNHLISHLMYVDDLKLYAPSRTSLQQLLNIVSDYTSAMGMSFGLDKCAVFHFRRGRVDDPGEDIQLEDGMTFRRLEEGETYKFLGMKQRGVLETTQIKDALSASYKNKLRDIWKSQLSGKNKVSATNMLAIPILTYSFGVVNWTVNELLDLDRSTRKTMNMNRSLHPNSSIQRIYLPRSQGGRGLQCLEYQHYQQTLETAVRVLRSEDPLLKFVAQHELANHGAFLFRAGQRALEKLGITGVSIDSERAGAPITQADQRRLARLIRKSQSNTLLEHHMSKSLHSIFFRSLKDQDLSEELSFAFLKSASLKSETEGFVMACQDGVINTRWYKKNIMKMDTPTTCRACHSQQETIMHILSSCRVHAPSGYIERHNAALRVLYFHLRAAYEIDKEPVLPYVPLEIEAVVQNEKARIYWNYPVPTTRQINAIKPDILLLDKELKELFVVEFSSPAENNMVMKEEQKRQKYKDLVFELGTMYPGHKVKMVVLIIGCLGGMRANYVEELKIIPACRSWAEILAHRMQKAVLLGSLHIIRSHEL

SEQ ID NO: 25862 - protein, 1300 aa, Coccinella septempunctata
MSERNQLSLGKQSLPGDRQGTSGVGAGRDSMRDTNGRTLRRRAPAIQKATPLDEEDIDEERVQVVGRIGIQSSQEHPVVGTGSRNRTAQRGRHKWTPEQHSLLSALYRRSGPDRRGYMNRLHGLWCENCPDLNYMTQQNLRDQISHLKRRGILQRPREQGRSEQQAEEQVADALSQHQQLTVDITQEQAVALLSDIAGRTRNGTRSNRPITEHVRDVPDIERAEEQVTDAPDQQHQAMTHRSEAVALEARPRTEQVREVPEIELAEEQVTDAPDRQQQRPRRDSSELIDNTKEAFEAAVGDPLIKPNRIKSRHKAEDLAVLNSIIQDHLNETCSLEEVEAAVRAAAYLLCPPKSTAANNNNKHRKRLNRLDIKIKSMRQQASWYQCVIDVLKGKTKPSKRMREMIEELRAIHGTVNLPTVHLLKQKAVDKIRSLAAARKKLIRRERWIEDNNTFTAEPSKLFQPQQQEVQNPPSPQDVEEFWKSLYEQPAKTRDTPALPRFQQMCDQTLQQNDELSEISPEDIRQALKNKNDFTAPGPDGIQNYWWKSFPATHKHLARLFSGMLIRREPIPSWLVEGRTVLIPKSGDLGQPKNYRPITCLNTLYKIFTSVIQDRILRVIGPVWDSIYEQRGAKKGVQGCKDNLLIDKSVCLDARHYKRDLHTSWLDYAKAFDTSPHDLIIRLLKMLKVHPNIIHAIESIIALWKTKFAIRAEGRTVCTGWVRYRRGVFQGDSLSPLLFCITLMPLSIELRASKIGYKAGPPGRRNHLISHLMYVDDLKLYAPSRTALQQLLNIVSDYTSAMGMSFGLDKCAVFHLRRGRVDDPGEDIQLEDGMTFRRLEEGETYKFLGMKQRGVLETTQIKDALSASYKKKLRDIWKSQLSGKNKVSATNMLAIPILTYSFGVVNWTVNELLDLDRSTRKTMNMNRSLHPNSSIQRIYLPRSQGGRGLQCLEYQHYQQTLETAVRVLRSEDPLLKFVAQHELANHGAFLFRAGQRALEKLGITGVSIDPERAGAPITQADQRRLARLIRKSQSNTLLEHHMSKSLHSIFFRSLKDQDLSEELSFAFLKSASLKSETEGFVMACQDGVINTRWYKKNIMKMDTPTTCRACHSQQETIMHILSACRVHAPSGYIERHNAALRVLYFHLRAAYEIDKEPVLPYVPLEIEAVVQNEKARIYWNYPVPTTRQINAIKPDILLLDKELKELFVVEFSSPAENNMVMKEEQKRQKYKDLVFELGTMYPGHKVKMVVLIIGCLGGMRANYVEELKIIPACRSWAEILAHRMQRAVLLGSLHIIRSHEL

SEQ ID NO: 25863 - protein, 1303 aa, Coccinella septempunctata
MSERNQLSLGKQSLPGDRQGTSGVGAGRDSMRDTNGRTLRRRAPATQKATPLDEEDIDEERVQVVGRIGIQSSQEHPVVGTGSRNRTAQRGRHKWTPEQHSLLSALYRRSGPDRRGYMNRLHGLWCENCPDLNYMTQQNLRDQISHLKRRGILQRSREQGRLEQQAEEQVTDALSQHQQLTVDITQEQAVALLSDIAGRTRTGTRPNRPITEHVRDVPDIERAEEQVTDAPDQQHQAMTQRSEAAALEARPRTEQVREVPEIELAGEQVTDAPDRQQQRPRTVRDSSELVDNTKEAFEAAVGDPLIKPTRIKSRHKAEDLAVLNSIIQDHLNGTCSLEEVEAAVRAAAYLLCPPKSTAANNNNNKHRKRLNRLDIKIKSMRQQASWYQCVIDVMKGKTKPSKRMREMIEELRAIHGTVNLPTVHLLKQKAVDKIRSLAAARKKLIRRKRWIEDNNTFTAEPSKLFQPQQQEVQNPPSPQDVEEFWKSLYEQPAKTRDTPALPRFQQMCDQTLQQNDELSEISAEDIRQALKNKNDFTAPGPDGIQNYWWKSFPATHKHLARLFSGMLIRREPIPSWLVEGRAVLIPKSGDLGQPKNYRPITCLNTLYKILTSVIQDRILRVIGPVWDSIYEQRGAKKGVQGCKDNLLIDKSVCLDARHYKRDLHTSWLDYAKAFDTSPHDLIIRLLKMLKVHPNIIHAIESIIALWKTKFAIRAEGRTVYTGWVRYRRGVFQGDSLSPLLFCITLMPLSIELRASRIGYKAGPPGRRNHLISHLMYVDDLKLYAPSRTALQQLLNIVSEYTSAMGMSFGLDKCAVFHLRRGRVDDPGEDIQLEDGMTFRSLEDGETYKFLGMKQRGVLETTQIKDALSASYKKKLRDIWKSQLSGKNKVSATNMLAIPILTYSFGVVNWTVNELLDLDRSTRKTMNMNRSLHPNSSIQRIYLPRSQGGRGLQCLEYQHYQQTLETAVRVLRSEDPLLKFVAQHELANHGAFLFRAAQRALEKLGITGVSIDPERAGAPITQADQRRLARLIRKSQSNTLLEHHMSKSQHSIFFRSLKDQDLSEELSFAFLKSASLKSETEGFVMACQDGVINTRWYKKNIMKMDTPTTCRACHSQQETIMHILSACRVHAPSGYIERHNAALRVLYFHLRAAYEIDKEPVLPYVPLEIEAVVQNEKARIYWNYLVSTTRQIKAIKPDILLLDKELKELFVVEFSSPAENNMVMKEEQKRQKYKDLVFELGTMYPGHKVRMVVLIIGCLGGMRANYVEELKIIPACRPWAEILAHRMQKVVLLGSLHIIRSHEL

SEQ ID NO: 25864 - protein, 900 aa, Adalia bipunctata
MKDMIEELRSIHHRVDLPTVHLLKQKAVDKIRSLAAARKKLIKRQKWIEDNNTFNAEPSKLFQSQQQMTQKPPSPPEVEEFWKSIYEQRAETRDTPALLRFQQMCDQNQQQNDELSQISTEDIRQALKNKRDFTAPGLDGIQNYWWKRFPATHQHLARLFSGMLTRREPIPPWLVEGRTVLIPKSGDLGQPKNYRPITCLNTLYKILTSVIQHQILRVIGPVWDSIYEQRGAKKGVQGCKDNLLIDKSVCLDARYYKRDLHTSWLDYAKAYDTSPHELIIRLLKMLKVHPNIIHAIENIIALWKTKFSIRTEGRTVYTGWVRYRRGVFQGDSLSPLLFCITLIPLTIELRESKIGYKAGPPGRRNHLISHLLYMDDLKLYAPSESALRQLLNIVSDYTSAMGMSFGLDKCAVFHLRRGKAEDAGEDIRLEDGLTIRHLEDGETYKFLGMKQRGVLETTQIKDALTASYKKKLRDIWKSQLSGKNKVSATNMLAIPILTYSFGVVNWTVNELLDLDRSTRKTMNMNRSLHPNSSIQRIYLPRSQGGRGLQCLEYQHYQQTLEMAIRILRSEDPLLKFVAQHEIANHGAFLFRAAQRALEKLSITGVSINPDLAGTPITRADQRSLARLIRKSQSDTLLEHHMSKTLHSIYFRSLKDQDLSEELSFAFLKSASLKSETEGFVMACQDGVLNTRWYKKNIMKMDTPTTCRACHRQQETIMHILSACSVHAPSGYVERHNAALRILYFHLRAAYGIDKEPVLPYVPLEIEAVVQNDRARICWNYPVSTTRQINAVKPDILLLDKELKELFVVEFSSPAENNVVMKEEQKRQKYKDLMFELGTLYPGHKIRMVVLIIGCLGGMRANYVDELKIIPACRPLAEVLAHRMQKAVLLGSLHIIRSHEL

SEQ ID NO: 25865 - protein, 1434 aa, Adalia bipunctata
MSDKYIRSLGEQSLPGDRQGASGVGAGRDSMRDTNGRMLRRQAPAIQEAMPLDEEDIDEERVQVVGRIGIQRSKEQPVVGTGSRNRTAQRGRHKWTPEQHDLLSALYRRSRPERRGYMNRLHGLWCENYPDLDYMTQQNLRDQISHLKRKGILWRSQEQERTEQQDGEQVTDASNQQQLLTIDTAEEQAVAMVRNVAGQTRTGTRSNRPITEHVRDVPRKEQGGEHVTDAPKQQHQAKASGARPRTEQISRIIRRGILWRSQEQERTEQQAEEQVTDASNQHQQLTIDTAEEQAVALVRNIASQTGSSTRFNRPITEHVRDVPRIEHGEEQVTDAQNQQQQAIALGPRPRTEQVRDVPVIELAGEQVTDAPDQQHQAIALGPRPRTEQVRDVPVIGLAEEQVTDAPDQQQQKPGTVRDVPKLIINTREAFEAAVRNPLVKTFRIKTRHEAEDLAVLDNIIQDHLNETCSLEDVVAAVRAAASLLCPPKSTATKEDKHKLRLRRLDTKIKSMRQQASWYQCIIDVLKGKIESSKKMKDMIEELRSIHHRVDLPTVHLLKQKAVDRIRSLAAARKKLIRRQKWIEDNNTFTAEPSKLFQSPQQKAQNPPSPQEVEEFWKSIYEQRAETRDTPALLRFQQMCDQNQQQNDELCEISTEDIRQALKNKRDFTAPGLDGIQNYWWKRFPATHQHLARLFSGVLTRREPIPSWLVEGRTVLIPKSGDLGQPKNHRPITCLNTLYKILTSVIQQQILRVIGPVWDSIYEQRGAKKGVQGCKDNLLIDKSVCLDARYYKRDLHTSWLDYAKAYDTSPHELIIRLLKMLKVHPNIIHAIENIIALWKTKFAIRAEGRTVYTGWVRYRRGVFQGDSLSPLLFCITLIPLTIELRESKIGYKAGPPGRRNHLISHLLYMDDLKLYAPSESALRQLLNIVSDYTSAMGMSFGLDKCAVFHLRRGKAEDAGEDIRLEDGMTIRHLEEGETYKFLGMKQRGVLETTQIKDALTASYKKKLRDIWKSQLSGKNKVSATNMLAIPILTYSFGVVNWTVNELLDLDRSTRKTMNMNRSLHPNSSIQRIYLPRSQGGRGLQCLEYQHYQQTLEMAVRILRSEDPLLKFVAQHEIANHGAFLFRAAQRAVEKLSITGVSINPELAGTPITQAEQRSLARLIRKSQADKLLEHHMSKNLHSIYFRSLKDQDLSEELSFAFLKSASLKSETEGFVMACQDGVLNTRWYKKNIMKMDTPTTCRACHGQQETIMHILSACRVHAPSGYVERHNAALRILYFHLRAAYEIDKEPVLPYVPLEIEAVVQNERARICWNYPVSTTRQINAVKPDILLLDKELKELFVVEFSSPAENNVVMKEEQKRQKYKDLMFELGTLYPGHKVRMIVLIIGCLGGMRANYVDELKIIPACRSLAEVLAHRMQKAVLLGSLHIIRSHEV

SEQ ID NO: 25866 - protein, 1434 aa, Adalia bipunctata
MSDKYIRSLGEQSLPGDRQGASGVGAGRDSMRDTNGRMLRRQAPAIQEAMPLDEEDIDEERVQVVGRIGIQRSKEQPVVGTGSRNRTAQRGRHKWTPEQHDLLSALYKRSRPERRGYMNRLHGLWCENYPDLDYMTQQNLRDQISHLKRKGILWRSQEQERMKQQDEEQVTDASNQHQPLTIDTAEEQAVAMVRNIAGQTGTGTRSNRPITEHVRDVPRKEQGEEHVTDAPKQQHQAKALGARPRTEQISRVIRRGILWRSQEQERTEQQAEEQVTDASNQHQQLTIDTAEEQAVALVGNIASQTRSGTRFNRPITEHVRDVPKIEHGEEQVTDAQNQQHQAIALGPRPRTEQVRDVPVIGLVEEQVTDAPEQQHQAIALGPRPRTEQVRDVPVIGLAEEQVTDAPDQQQQKPGTVRDVPKLIVNTREAFEAAVRNPLVKTSRIKTRHEAEDLAVLDNIIQDHLNETCSLEDVVAAVRAAASLLCPPKSTATKEDKHKLRLRRLDTKIKSMRQQASWYQCIIDVLKGKIESSKKMKDMIEELRSIHHRVDLPTVHLLKQKVVDKIGSLAAARKKLIKRQKWIEDNNTFNAEPSKLFQSQQQMTQKPPSPPEVEEFWKSIYEQRAETRDTPAILRFQQMCDQNQQQNDELSEISTEDIRQALKNKRDFTAPGLDGIQNYWWKRFPATHQHLARLFSGMLTRREPIPSWLVEGRTVLIPKSGDLGQPKNYRPITCLNTLYKILTSVIQHQILRVIGPVWDSIYEQRGAKKGVQGCKDNLLIDKSVCLDARYYKRDLHTSWLDYAKAYDTSPHELIIRLLKMLKVHPNIVHAIENIIALWKTRFAIRTEGRTVYTGWVRYRRGVFQGDSLSPLLFCITLIPLTIELRESKIGYKAGPPGRRNHLISHLLYMDDLKLYAPSESALRQLLNIVSDYTSAMGMSFGLDKCAVFHLRRGKAEDAGEDIRLEDGLTIRHLEDGETYKFLGMKQRGVLETTQIKDALTASYKKKLTDIWKSQLSGKNKVSATNMLAIPILTYSFGVVNWTVNELLDLDRSTRKTMNMNRSLHPNSSIQRIYLPRSQGGRGLQCLEYQHYQQTLEMAIRILRSEDPLLKFVAQHEIANHGAFLFRAAQRALEKLSITGVSINPDLAGTPITQADQRSLARLIRKSQSDTLLEHHMSKTLHSIYFRSLKDQDLSEELSFAFLKSASLKSETEGFVMACQDGVLNTRWYKKNIMKMDTPTTCRACHRQQETIMHILSACCVHAPSGYVERHNAALRILYFHLRAAYGIDKEPVLPYVPLEIEAVVQNDRARICWNYPVSTTRQINAVKPDILLLDKELKELFVVEFSSPAENNVVMKEEQKRQKYKDLMFEFGTLYPGHKIRMVVLIIGCLGGMRANYVDELKIIPACRPLAEVLAHRMQKAVLLGSLHIIRSHEL

SEQ ID NO: 25867 - protein, 1302 aa, Coccinella septempunctata
MSERNQLSLGKQSLPGDRQGTSGVGAGRDSMRDTNGRTLRRRAPATQKATPLDEEDIDEERVQVVGRIGIQSSQEHPVVGTGSRNRTAQRGRHKWTPEQHSLLSALYRRSGPDRRGYMNRLHGLWCENCPDLNYMTQQNLRDQISHLKRRGILQRPREQGRLEQQAEEQVTDALSQHQQLTVDITQEQAVALLSDIAGRTRTGTRSNRPITEHVRDVPDIERAEEQVTDAPDQQHQAMTHRSEAVALEARPRTEQVREVPEIELAGEQVTDAPDRQQQRPRTVRDSSELTDNTKEAFEAAVGDPLIKPTRIKSRHKAEDLAVLNSIIQDHLNETCSLEEVEAAVRTAAYLLCPPKSTAANNNNKHRKRLNRLDIKIKSMRQQASWYQCVIDVMKGKTKPSKRMREMIEELRAIHGTVNLPTVHLLKQKAVDKIRSLAAARKKLIRRKRWIEDNNTFTAEPSKLFQPQQQEVQNPPSPQDVEEFWKSLYEQPAKTRDTPALPRFQQMSDHTLQQNDELSEISAEDIRQALKNKNDFTAPGPDGIQNYWWKSFPATHKHLARLFSGLLIRREPIPSWLVEGRTVLIPKSGDLGQPKNYRPITCLNTLYKILTSVIQDRILRVIGPVWDSIYEQRGAKKGVQGCKDNLLIDKSVCLDARHYKRDLHTSWLDYAKAFDTSPHDLIIRLLKMLKVHPNIIHAIESIIALWKTKFAIRAEGRTVYTGWVRYRRGVFQGDSLSPLLFCITLMPLSIELRASKIGYKAGPPGRRNHLISHLMYVDDLKLYAPSRTALQQLLNIVSEYTSAVGMSFGLDKCAVFHLRRGRVDDPGEDIQLEDGMTFRRLEDGETYKFLGMKQRGVLETTQIKDALSASYKKKLRDIWKSQLSGKNKVSATNMLAIPILTYSFGVVNWTVNELLDLDRSTRKTMNMNRSLHPNSSIQRIYLPRSQGGRGLQCLEYQHYQQTLETAVRVLRSEDPLLKFVAQHELANHGAFLFRAAQRALEKLGITGVSIDPERAGAPITQADQRRLARLIRKSQSNTLLEHHMSKSLHSIFFRSLKDQDLSEELSFAFLKSASLKSETEGFVMACQDGVINTRWYKKNIMKMDTPTTCRACHSQQETIMHILSACRVHAPSGYIERHNAALRVLYFHLRAAYEIDKEPVLPYVPLEIEAVVQNEKARIYWNYPVSTTRQINAIKPDILLLDKELKELFVVEFSSPAENNMVMKEEQKRQKYKDLVFELGTMYPGHKVRMVVLIIGCLGGMRANYVEELKIIPACRSWAEILAHRMQKAVLLGSLHIIRSHEL

SEQ ID NO: 25868 - protein, 1303 aa, Coccinella septempunctata
MSERNQLSLGKQSLPGDRQGTSGVGAGRDSMRDTNGRTLRRRAPATQKATPLDEEDIDEERVQVVGRIGIQSSQEHPVVGTGSRNRTAQRGRHKWTPEQHSLLSALYRRSGPDRRGYMNRLHGLWCENCPDLNYMTQQNLRDQISHLKRRGILQRSREQGRLEQQAEEQVTDALSQHQQLTVDITQEQAVALLSDIAGRTRTGTRPNRPITEHVRDVPDIERAEEQVTDAPDQQHQAMTHRSEAAALEARPRTEQVREVPEIELAGEQVTDAPDRQQQRPRTVRDSSELVDNTKEAFEAAVGDPLIKPTRIKSIHKAEDLAVLNSIIQDHLNETCSLEEVEAAVRAAAYLLCPPKSTAANNNNNKHRKRLNRLDIKIKSMRQQASWYQCVIDVMKGKTKPSKRMREMIEELRAIHGTVNLPTVHLLKQKAVDKIRSLAAARKKLIRRKRWIEDNNTFTAEPSKLFQPQQQEVQNPPSPQDVEEFWKCLYEQPEKTRDTPALPRFQQMCDQTLQQNDELSEISAEDIRQALKNKNDFTAPGPDGIQNYWWKSFPATHKHLARLFSGMLIRREPIPSWLVEGRTVLIPKSGDLGQPKNYRPITCLNTLYKILTSVIQDRILRVIGPVWDSIYEQRGAKKGVQGCKDNLLIDKSVCLDARHYKRDLHTSWLDYAKAFDTSPHDLIIRLLKMLKVHPNIIHAIESIIALWKTKFAIRAEGRTVYTGWVRYRRGVFQGDSLSPLLFCITLMPLSIELRASRIGYKAGPPGRRNHLISHLMYVDDLKLYAPSRTALQQLLNIVSEYTSAVGMSFGVDKCAVFHLRRGRVDDPGEDIQLEDGMTFRRLEDGETYKFLGMKQRGVLETTQIKDALSASYKKKLRDIWKSQLSGKNKVSATNMLAIPILTYSFGVVNWTVNELLDLDRSTRKTMNMNRSLHPNSSIQRIYLPRSQGGRGLQCLEYQHYQQTLETAVRVLRSEDPFLKFVAQHELANHGAFLFRAAQRALEKLGITGVSIDPERAGAPITQADQRRLARLIRKSQSNTLLEHHMNKSLHSIFFRSLKDQDLSEELSFAFLKSASLKSETEGFVMACQDGVINTRWYKKNIMKMDTPTTCRACHSQQETIMHILSACRVHAPSGYIERHNAALRVLYFHLRAAYEIDKEPVLPYVPLEIEAVVQNEKARIYWNYPVSTTRQINAIKPDILLLDKELKELFVVEFSSPAENNMVMKEEQKRQKYKDLVFELGTMYPGHKVRMVVLILGCLGGMRANYVEELKIIPACRSWAEILAHRMQKAVLLGSLHIIRSHEL

SEQ ID NO: 25869 - protein, 1293 aa, Coccinella septempunctata
MSERNQLSLGKQSLPWDRQGTSGVGAGRDSMRDTNGRTLRRRAPATQKATPLDEEDIDEERVQVVGRIGIQSSQEHPVVGTGSRNRTAQRGRHKWTPEQHSLLSALYRRSGPDRRGYMNRLHGLWCENCPDLNYMTQQNLRDQISHLKRRGILQRSREQVTDALSQHQQLTVDITQEQAVALLSDIAGRTRTGTRPNRPITEHVRDVPDIERAEEQVTDAPDQQHQAMTHRSEAAALEARPRTEQVREVPEIELAGEQVTDAPDRQQQRPRTVRDSSELVDNTKKAFEAAVGDPLIKPTRIKSRHKAEDLAVLNSIIQDHLNETCSLEEVEAAVRAAAYLLCPPKSTAANNNNNKHRKRLNRLDIKIKSMRQQASWYQCVIDVMKGKTKPSKRMREMIEELRAIHGTVNLPTVHLLKQKAVDKIRSLAAARKKLIRRKRWIEDNNTFTAEPSKLFQPQQQEVQNPPSPQDVEEFWKSLYEQPAKTRDTPALPRFQQMCDQTLQQNDELSEISAEDIRQALKNKNDFTAPGPDGIQNYWWKSFPATHKHLARLFSGMLIRREPIPSWLVEGRTVLIPKSGDLGQPKNYRPITCLNTLYKILTSVIQDRILRVIGPVWDSIYEQRGAKKGVQGCKDNLLIDKSVCLDARHYKRDLHTSWLDYAKAFDTSPHDLIIRLLKMLKVHPNIIHAIESIIALWKTKFAIRAEGRTVYTGWVRYRRGVFQGDSLSPLLFCITLMPLSIELRASRIGYKAGPPGRRNHLISHLMYVDDLKLYAPSRTALQQLLNVVSEYTSAVGMSFGLDKCAVFHLRRGRVDDPGEDIQLEDGMTFRRLEDGETYKFLGMKQRGVLETTQIKDALSASYKKKLRDIWKSQLSGKNKVSATNMLASPILTYSLGVVNWTVNELLDLDRSTRKTMNMNRSLHPNSSIQRIYLPRSQGGRGLQCLEYQHYQQTLETAVRVLRSEDPLLKFVAQHELANHGAFLFRAAQRALEKLGITGVSIDPERAGAPITQADQRRLARLIRKSQSNTLLEHHMSKSLHSIFFRSIKDQDLSEELSFAFLKSASLKSETEGFVMACQDGVINTRWYKKNIMKMDTPTTCRACHSQQETIMHILSACRVHAPSGYIERHNAALRVLYFHLRAAYEIDKEPVLPYVPLEIEAVVQNEKARIYWNYPVSTTRQINAIKPDILLLDKELKELFVVEFSSPAENNMVMKEEQKRQKYKDLVFELGTMYPGHKVRMVVLIIGCLGGMRANYVEELKIIPACRSWAEILAHRMQKAVLLGSLHIIRSHEI

SEQ ID NO: 25870 - protein, 1430 aa, Adalia bipunctata
MIIIIIIIPARGYYFVVYGCDNPADPGHSQPMSDTYTLSLGKQSLPGDRQGASGVGAGRDSMRDTNGRMLRRQAPAIQEAMPSDEEDIDEERVQVVGRIGIQRSKEQPVVGTGSRNRTAQRGRHKWTPEQHNLLSALYRRSRPERRGYMNRLHGLWCENYPDLDFMTQQNLRDQISHLKRRGIIWRSQEQERMEQQAEEQVTDASSQHQQLTIDTTEEQAAALVRNIAGRTGTGIRSNRPIREHVRDVLEIENGGEQVTDAPNQQHQAIALGTRPRTEQVRDVPEIEHGEEQVTDAPNQQHQEIALGTRPRAEHVRDASEIEHGKEQVTDAPNQQHRAITPGARPRAGQVRDVPEIEHGEEQVTDAPNQQHQGIALGARPRAEQVRDVPEIEHAEEQVTDAPDQQQQMPRTVKDVPKLIVNTREAFEAAVRNPLVKATRIKTRHKAEDLAVLDKIIQDHLNETCSLEDVVAAVRAASSLLCPPKSTATNNDKHRLRLSRLDIKIKSMRQQASWYQCIIDVLKGKIKSSKKMKDMIEELRSIHRTVDLPTIHLLKQKAVDRIRSLAAARKKLIKRQKWIEDNNTFTAEPSKLFQSPQQKAQNPPSPQEVEEFWKSLYEQQAEIRDTPALLRFQQMCDQNQQRNDEPSEISTEDIRQALKNKRDFTAPGLDGIQNYWWKQFPATHQHLARLFSGMLTRREPIPSWLVEGRTVLIPKSGDLGQPKNYRPITCLNTLYKILTSVIQDQILRVIGPVWNSIYEQRGAKKGVQGCKDNLLIDKSVCLDARHYKRDLHTSWLDYAKAYDTTPHELIVRLLKMLKVYPNIIHAIENIIALWKTKFAIRAEGRTVYTGWVRYRRGVFQGDSLSPLLFCITLIPLTIELRESKIGYKAGPPGRRNHLISHLLYMDDLKLYAPSESALRQLLNIVSDYTSAMGMSFGLDKCAVFHLLRGKAEDAGEDIRLEDGMTFRHLEDGETYKFLGMKQRGVLETTQIKDALTASYKKKLRDIWKSQLSGKNKVSATNMLAIPILTYSFGVVNWTVNELLDLDRSTRKTMNMNRSLHPNSSIQRIYLPRSQGGRGLQCLEYQHYQQTLEMAVRILRSEDPLLKFVAQHEIANHGAFLFRAAQRAVEKHSITGVSINPELAGTPITQAEQRSLARLIRKSQADKLLEHHMSKNLHSIYFRSLKDQDLSEELSFAFLKSASLKSETEGFVMACQDGVLNTRWYKKNIMKMDTPTTCRACHRQQETIMHILSACRVHAPSGYVERHNAALRILYFHLRAAYEIDKEPVLPYVPLEIEAVVQNERARICWNYPVSTTRQINAIKPDILLLDKELKELFVVEFSSPAENNVVMKEEQKRQKYKDLMFELGTLYPGHKVRMVVLIIGCLGGMRANYVDELKIIPACRSLAEVLAHRMQKAVLLGSLHIIRSHEL

SEQ ID NO: 25871 - protein, 1434 aa, Adalia bipunctata
MSDKYIRSLGEQSLPGDRQGASGVGAGRDSMRDTNGRMLRRQAPAIQEAMPLDEEDIDEERVQVVGRIGIQRSKEQPVVGTGSRNRTAQRGRHKWTPEQHDLLSALYRRSRPERRGYMNRLHGLWCENYPDLDYMTQQNLRDQISHLKRKGILWRSQEQERTEQQDGEQVTDVSNQHQLLTIDTAEEQAVAMVRNVAGQTGTGTRSNRPITEHVRDVPRKEQGGEHVTDAPKQQHQAKASGARPRTEQISRIIRRGILWRSQEQERTEQQAEEQVTDASNQHQQLTIDTAEEQAVALVRHIAGQTGSITRFNRPITEHVRDVPKIEHGEEQVTDAQNQQHQAIALGPRPRTEQVRDVPVIELAGEQVTDAPDQRHQAITLGPRPRTEQVRDVSVIGLAEEQVTDAPDQQQQKPGTVRDVPKLIVNTREAFEAAVRNPLVKIFRMKTRHEAEDLAVLDNIIQDHLNETCSLEDVVAAVRAAASLLCPPKSTATKEDKHKLRLRRLDTKIKSMRQQASWYQCIIDVLKGKIGSSKKMKDMIEELRSIHHRVDLPTVHLLKQKAVDKIRSLTAARKKLIRRQKWIEDNNTFNAEPSKLFQSQQQMTQKPPSPPEVEEFWKSIYEQRPETRDTPALLRFQQMCDQNQQQNDELSEISTEDIKQALKNKRDFTAPGLDGIQNYWWKRFPATHQHLARLFSGMLTRREPIPSWLVEGRTVLIPKSGDLGQPKNYRPITCLNTLYKILTSVIQHQILRVIGPVWDSIYEQRGAKKGVQGCKDNLLIDKSVCLDARFYKRDLHTSWLDYAKAYDTSPHELIIRLLKMLKVHPNIIHAIENIIALWKTKFAIRTEGRTVYTGWVRYRRGVFQGDSLSPLLFCITLIPLTIELRESKIGYKAGPPGRRNHLISHLLYMDDLKLYAPSESALRQLLNIVSDYTSAMGMSFGLDKCAVFHLRRGKAEDAGEDIRLEDGMIIRHLEDGETYKFLGMKQRGVLETTQIKDALTASYKKKLRDIWKSQLSGKNKVSATNMLAIPILTYSFGVVNWTVNELLDLDRSTRKTMNMNRSLHPNSSIQRIYLPRSQGGRGLQCLEYQHYQQTLEMAVRVLRSEDPLLKFVAQHEIANHGAFLFRAAQRALEKLNITGVSINPELAGAPITQADQRSLARLIRKSQSDTLLEHHMSKTLHSIYFRSLKDQDLSEELSFAFLKSASLKSETEGFVMACQDGVLNTRWYKKNIMKMDTPTTCRACHRQQETIMHILSACSVHAPSGYVERHNAALRILYFHLRAAYGIDKEPVLPYVPLEIEAVVQNERARICWNYPVSTTRQINAVKPDILLLDKELKELFVVEFSSPAENNVVMKEEQKRQKYKDLMFELGTLYPGHKVRMVVLIIGCLGGMRANYVDELKIIPACRSLAEVLAHRMQKAVLLGSLHIIRSHEL

SEQ ID NO: 25872 - protein, 1486 aa, Adalia bipunctata
MFFHWFIEEIPAQAETGRPMMKDNNNNNPARGYYCVVYGCDNPADPGHSQPMSDKFIRSLGEQSLPGDRQGASGVGAGRDSMRDTNGRMLRRQAPAIQEAMPLDEEDIDEERVQVVGRIGIQRSKEQPVVGTGSRNRTAQRGRHKWTHEQHDLLSALYRRSRPERRGYMNRLHGLWCENYPDLDYMTQQNLRDQISHLKRKGILWRSQEQERTEQQDGEQVTDASNQHQLLTIDTAEEQAVAMVRNVAGQTTGTGTRSNRPITEHVRDVPRTEQGGEHVTDAPKQQHQAKASGARPRTEQISRIIRRGILWRSQEQERTEQQAEEQVTDASNQHQQLTIDTAEEQAVALVRHIAGQTGSITRFNRPITDHVRDVPKIEHGEEQVTDAQNQQHQAIALGPRPRTEQVRDVPVIELAGEQVTDAPDQRHQAIALGPRPRTEQVRDVPVIGLAEEQVTDAPDQQQQKPGTVRDVPKLIVNTREAFEAAVRNPLVKIFRMKTRHEAEDLAVLDNIIQDHLNETCSLEDVVAAVRAAASLLCPPKSTATKEDKHKLRLRRLDTKIKSMRQQASWYQCIIDVLKGKIGSSKKMKDMIEELRSIHHRVDLPTVHLLKQKAVDKIRSLTAARKKLIKRQKWIEDNNTFNAEPSKLFQSQQQMTQKPPSPPEVEEFWKSIYEQRPETRDTPALLRFQQMCDQNQQQNDELSEISTEDIKQALKNKRDFTAPGLDGIQNYWWKRFPATHQHLARLFSGMLTRREPIPSWLVEGRTVLIPKSGDLGQPKNYRPITCLNTLYKILTSVIQHQILRVIGPVWDSIYEQRGAKKGVQGCKDNLLIDKSVCLDARFYKRDLHTSWLDYAKAYDTSPHELIIRLLKMLKVHHNIIHAIENIIALWKTKFAIRTEGRTVYTGWVRYRRGVFQGDSLSPLLFCITLIPLTIELRESKIGYKAGPPGRRNYLISHLLYMDDLKLYAPSESALRQLLNIVSDYTSAMGMSFGLDKCAVFHLRRGKAEDAGEDIRLEDGMIIRHLEDGETYKFLGMKQRGVLETTRIKDALTASYKKKLRDIWKSQLSGKNKVSATNMLAIPILTYSFGVVNWTVNELLDLDRSTRKTMNMNRSLHPNSSIQRIYLPRSQGGRGLQCLEYQHYQQTLEMAVRVLRSEDPLLKFVAQHEIANHGAFLFRAAQRALEKLSITGVSINPELAGAPITQADQRSLARLIRKSQSDTLLEHHMSKTLHSIYFRSLKDQDLSEELSFAFLKSASLKSETEGFVMACQDGVLNTRWYKKNIMKMDTPTTCRACHRQQETIMHILSACSVHAPSGYVERHNAALRILYFHLRAAYGIDKEPVLPYVPLEIEAVVQNERARICWNYPVSTTRQINAVKPDILLLDKELKELFVVEFSSPAENNVVMKEEQKRQKYKDLMFELGTLYPGHKVRMVVLIIGCLGGMRANYVDELKIIPACRSLAEVLAHRMQKAVLLGSLHIIRSHEL

SEQ ID NO: 25873 - protein, 1300 aa, Coccinella septempunctata
MSERNQLSLGKQSLPGDRQGTSGVGAGRDSMRDTNGRTLRRRAPAIQKATPLDEEDIDEERVQVVGRIGIQSSQEHPVVGTGSRNRTAQRGRHKWTPEQHSLLSALYRRSGPDRRGYMNRLHGLWCENCPDLNYMTQQNLRDQISHLKRRGILQRPREQGRLEQQAEEQVTDALSQHQQLTVDITQEQAVALLSDIAGRTRTGTRSNRPITEHVRDVPDIEHAEEQVTDAPDQQHQAMTHRSEAVALEARPRTEQVREVPEIELAEEQVTDAPDRQQQRPRRDSSELIDNTKEAFEAAVGDPLIKPTRIKSRHKAEDLAVLNSIIQDHLNETCSLEEVEAAVRAAAYLLCPPKSTAANNNNEHRKRLNRLDIKIKSMRQQASWYQCVIDVLKGKTKPSKRMREMIEELRAIHGTVNLPTVHLLKQKAVDKIRSLAAARKKLIRRKRWIEDNNTFTAEPSKLFQPQQQEVQNPPSPQDVEEFWKSLYEQPAKTRDTPALPRFQQMCDQTLQQNDELSEISAEDIRQALKNKNDFTAPGPDGIQNYWWKSFPATHKHLARLFSGMLIRREPIPSWLVEGRTVLIPKSGDLGQPKNYRPITCLNTLYKIFTSVIQDRILRVIGPVWDSIYEQRGAKKGVQGCKDNLLIDKSVCLDARHYKRDLHTSWLDYAKAFDTSPHDLIIRLLKMLKVHPNIIHAIESIIALWKTKFAIRAEGRTVYTGWVRYRRGVFQGDSLSPLLFCITLMPLSIELRASKIGYKAGPPGRRNHLISHLMYVDDLKLYAPSRTALQQLLNIVSDYTSAMGMSFGLDKCAVFHLRRGRVDDPGEDIQLEDGMTFRCLEEGETYKFLGMKQRGVLETTQIKDALSASYKKKLRDIWKSQLSGKNKVSATNMLAIPILTYSFGVVNWTVNELLDLDRSTRKTMNMNRSLHPNSSIQRIYLPRSQGGRGLQCLEYQHYQQTLETAVRVLRSEDPLLKFVAQHELANHGAFLFRAGQRALEKLGITGVSIDPERAGAPITQADQRRLARLIRKSQSNTLLEHHMSKSLHSIFFRSLKDQDLSKELSFAFLKSASLKSETEGFVMACQDGVINTRWYKKNIMKMDTPTTCRACHSQQETIMHILSACRVHAPSGYIERHNAALRVLYFHLRAAYEIDKDPVLPYVPLEIEAVVQNEKARIYWNYPVPTTRQINAIKPDILLLDKELKELFVVEFSSPAENNMVMKEEQKRQKYRDLVFELGTMYPGHKVKMVVVIIGCLGGMRANYVEELKVIPACRSWAEILAHIMQKAVLLGSLHIIRSHEL

SEQ ID NO: 25874 - protein, 1302 aa, Coccinella septempunctata
MSERNQLSLGKQSLPGDRQGTSGVGAGRDSMRDTNGRTLRRRAPATQKATPLDEEDIDEERVQVVGRIGIQSSQEHPVVGTGSRNRTAQRGRHKWTPEQHSLLSALYRRSGPDRRGYMNRLHGLWCENCPDLNYMTQQNLRDQISHLKRRGILQRSQEQGRLEQQAEEQVTDALSQHQQLTVDITQKQVVALLSDIAGRTRTGTRSNRPTTEHVRDVPDIERAEEQVTDAPGQQHQAMTHRGEAVALEARPRTEQVREVPEIELAGEQVTDAPDRQQQRPRTVRDSSELIDNTKEAFEAAVRDPLIKPTRIKSRYKAEDLAVLNSIIQDHLNETCSLEEVEAAVRAAAYLLCPPKSTAANNNNKHRKRLNQLDIKIKSMRQQASWYQCVIDVLKGKTKPSKRMKEMIEELRATHGTVNLPTVHLLKQKAVDKIRSLAAARKKLIRRKRWIEDNNTFTAEPSKLFQPQQQEVQNPPSPLDVEEFWKSLYEQPAKTRDTPALPRFQQMCDQTLQQNDELSEISAEDIRQALKNKNDFTAPGPDGIQNYWWKSFPATHKHLARLFSGMLIRREPIPSWLVEGRTVLIPKSGDLGQPKNYRPITCLNTLYKILTSVIQDRILRVIGPVWDSIYEQRGAKKGVQGCKDNLLIDKSVCLDARHYKRDLHTSWLDYAKAFDTSPHDLIIRLLKMLKVHPNIIHAIESIIALWKTKFAIRAEGRTVYTGWVRYRRGVFQGDSLSPLLFCITLMPLSIELRASKIGYKAGPPGRRNHLISHLMYVDDLKLYAPSRTALQQLLNIVSDYTSAMGMSFGLDKCAVFHLRRGRVDDPGEDIQLEDGMTFRCLEEGETYKFLGMKQRGVLETTQIKDALSASYKKKLRDIWKSQLSGKNKVSATNMLAIPILTYSFGVVNWTVNELLDLDRSTRKTMNMNRSLHPNSSIQRIYLPRSQGGRGLQCLEYQHYQQTLETAVRVLRSEDPLLKFVAQHELANHGAFLFRAGQRALEKLGITGVSIDPERAGAPITQADQRRLARLIRKSQSNTLLEHHMSKSLHSIFFRSLKDQDLSEELSFAFLKSASLKSETEGFVMACQDGVINTRWYKKNIMKMDTPTTCRACHSQQETIMHILSACRVHAPSGYIERHNAALRVLYFHLRAAYEIDKEPVLPYVPLEIEAVVQNEKARIYWNYPVSTTRQINAIKPDILLLDKELKELFVVEFSSPAENNIVMKEEQKRQKYKDLVFELGTMYPGHKVRMVVLIMGCLGGMRANYVEELKIIPACRSWAEILAHRMQKAVLLGSLHVIRSQEL

SEQ ID NO: 25875 - protein, 1374 aa, Adalia bipunctata
MKKNNNNKPARGYYFVVYGCDNPADPGHSQPMSDTYTLSLGKQSLPGDRQGASGVGAGRDSMRDTNGRMLRRQAPAIQEAMPSDEEDIDEERVQVVGRIGIQRSKEQPVVGTGSRNRTAQRGRHKWTPEQHNLLSALYRRSRPERRGYMNRLHGLWCENYPDLDFMTQQNLRDQISHLKRRGIIWRSQEQERMEQQAEEQVTDASSQHQQLTIDTTEEQAAALVRNIAGRTGTGIRSNRPIREHVRDVLEIENGGEQVTDAPNQQHQAIALGTRPRTEQVRDVPEIEHGEEQVTDAPNQQHQEIALGTRPRAEHVRDASEIEHGKEQVTDAPNQQHRAITPGARPRAGQVRDVPEIEHGEEQVTDAPNQQHQGIALGARPRAEQVRDVPEIEHAEEQVTDAPDQQQQMPRTVKDVPKLIVNTREAFEAAVRNPLVKATRIKTRHKAEDLAVLDKIIQDHLNETCSLEDVVAAVRAASSLLCPPKSTATNNDKHRLRLSRLDIKIKSMRQQASWYQCIIDVLKGKIKSSKKMKDMIEELRSIHRTVDLPTIHLLKQKAVDRIRSLAAARKKLIKRQKWIEDNNTFTAEPSKLFQSPQQKAQNPPSPQEVEEFWKSLYEQQAEIRDTPALLRFQQMCDQNQQRNDEPSEISTEDIRQALKNKRDFTAPGLDGIQNYWWKQFPATHQHLARLISGMLTRREPIPSWLVEGRTVLIPKSGDLGQPKNYRPITCLNTLYKILTSVIQDQILRVIGPVWNSIYEQRGAKKGVQGCKDNLLIDKSVCLDARHYKRDLHTSWLDYAKAYDTTPHELIVRLLKMLKVYPNIIHAIENIIALWKTKFAIRAEGRTVYTGWVRYRRGVFQGDSLSPLLFCITLIPLTIELRESKIGYKAGPPGRRNHLISHLLYMDDLKLYAPSESALRQLLNIVSDYTSAMGMSFGLDKCAVFHLRRGKAEDAGEDIRLEDGMTFRHLEDGETYKFLGMKQRGVLETTQIKDALTASYKKKLRDIWKSQLSGKNKVSATNMLAIPILTYSFGVVNWTVNELLDLDRSTRKTMNMNRSLHPNSSIQRIYLPRSQGGRGLQCLEYQHYQQTLEMAVRILRSEDPLLKFVAQHEIANHGAFLFRAAQRAVEKLSITGVSINPELAGTPITQAEQRSLARLIRKSQADKLLEHHMSKNLHSIYFRSLKDQDLSEELSFAFLKSASLKSETEGFVMACQDGVLNTRWYKKNIMKMDTPTTCRACHRQQETIMHILSACRVHAPSGYVERHNAALRILYFHLRAAYEIDKEPVLPYVPLEIEAVVQNERARICWNYPVSTTRQINAIKPDILLLDKELKELFVVEFSSPAENNVVMKEEQKRQKYKDLMFELGTLYVPRS

SEQ ID NO: 25876 - protein, 991 aa, Adalia bipunctata
MKTRHEAEDLAVLDNIIQDHLNETCSLEDVVAAVRAAASLLCPPKSTATKEDKHKLRLRRLDTKIKSMRQQASWYQCIIDVLKGKIGSSKKMKDMIEELRSIHHRVDLPTVHLLKQKAVDKIRSLTAARKKLIKRQKWIEDNNTFNAEPSKLFQSQQQMTQKPPSPPEVEEFWKSIYEQRPETRDTPALLRFQQMCDQNQQQNDELSEISTEDIKQALKNKRDFTAPGLDGIQNYWWKRFPATHQHLARLFSGMLTRREPIPSWLVEGRTVLIPKSGDLGQPKNYRPITCLNTLYKILTNVIQHQILRVIGPVWDSIYEQRGAKKGVQGCKDNLLIDKSVCLDARFYKRDLHTSWLDYSKAYDTSPHELIIRLLKMLKVHHNIIHAIENIIALWKTKFAIRTEGRTVYTGWVRYRRGVFQGDSLSPLLFCITLIPLTIELRESKIGYKAGPPGRRNYLISHLLYMDDLKLYAPSESALRQLLNIVSDYTSAMGMSFGLDKCAVFHLRRGKAEDAGEDIRLEDGMIIRHLEDGETYKFLGMKQRGVLETTRIKDALTASYKKKLRDIWKSQLSGKNKVSATNMLAIPILTYSFGVVNWTVNELLDLDRSTRKTMNMNRSLHPNSSIQRIYLPRSQGGRGLQCLEYQHYQQTLEMAVRVLRSEDPLLKFVAQHEIANHGAFLFRAAQRALEKLSITGVSINPELAGAPITQADQRSLARLIRKSQSDTLLEHHMSKTLHSIYFRSLKDQDLSEELSFAFLKSASLKSETEGFVMACQDGVLNTRWYKKNIMKMDTPTTCRACHRQQETIMHILSACSVHAPSGYVERHNAALRILYFHLRAAYGIDKEPVLPYVPLEIEAVVQNERARICWNYPVSTTRQINAVKPDILLLDKELKELFVVEFSSPAENNVVMKEEQKRQKYKDLMFELGTLYPGHKVRMVVLIIGCLGGMRANYMDELKIIPACRSLAEVLAHRMQKAVLLGSLHIIRSHEL

SEQ ID NO: 25877 - protein, 900 aa, Adalia bipunctata
MKDMIEELRSIHHRVDLPTVHLLKQKAVDKIRSLTAARKKLIKRQKWIEDNNTFNAEPSKLFQSQQQMTQKPPSPPEVEEFWKSIYEQRPETRDTPALLRFQQMCDQNQQQNDEVSEISTEDIKQALKNKRDFTAPGLDGIQNYWWKRFPATHQHLARLFSGMLTRREPIPSWLVEGRTVLIPKSGDLGQPKNYRPITCLNTLYKILTSVIQHQILRVIGPVWDSIYEQRGAKKGVQGCKDNLLIDKSVCLDARFYKRDLHTSWLDYAKAYDTSPHELIIRLLKMLKVHPNIIHAIENIIALWKTKFAIRTEGRTVYTGWVRYRRGVFQGDSLSPLLFCITLIPLTIELRESKIGYKAGPPGRRNHLISHLLYMDDLKLYAPSESALRQLLNIVSDYTSAMGMSFGLDKCAVFHLRRGKAEDAGEDIRLEDGMIIRHLEDGETYKFLGMKQRGVLETTRIKDALTASYKKKLRDIWKSQLSGKNKVSATNMLAIPILTYSFGVVNWTVNELLDLDRSTRKTMNMNRSLHPNSSIQRIYLPRSQGGRGLQCLEYQHYQQTLEMAVRVLRSEDPLLKFVAQHEIANHGAFLFRAAQRALEKLSITGVSINPELAGAPITQADQRSLARLIRKSQSDTLLEHHMSKTLHSIYFRSLKDQDLSEELSFAFLKSASLKSETEGFVMACQDGVLNTRWYKKNIMKMDTPTTCRACHRQQETIMHILSACSVHAPSGYVERHNAALRILYFHLRAAYGIDKEPVLPYVPLEIEAVVQNERARICWNYPVSTTRQINAVKPDILLLDKELTELFVVEFSSPAENNVVMKEEQKRQKYKDLMFELGTLYPGHKVRMVVLIIGCLGGMRANYVDELKIIPACRSLAEVLAHRMQKAVLLGSLHIIRSHEL

SEQ ID NO: 25878 - protein, 1318 aa, Adalia bipunctata
MNRLHGLWCENYPDLDYMTQQNLRDQISHLKRKGILWRFQEQERTEQQDGEQVTDASNQHQLLTIDTAEEQAVAMVRNVAGQTTGTGTRSNRPITEHVRDVPRKEQGGEHVTDAPKQQHQEKASGARPRAEQISRIIRRGILWRSQEQERTEQQAEEQVTDASNQHQQLSIDTAEEQAVALVRHIAGQTGSITGFNRPITEHVRDVPKIEHGEEQVTDAQNQQHQAIALGPRPRTEQVRDVPVIELAGEQVTDAPDQRHQAIALGPRPRTEQVRDVPVIGLAEEQVTDAPDQQQQKPGTVRDVPKLIVNTREAFEAAVRNPLVKIFRMKTRHEAEDLAVLDNIIQDHLNETCSLEDVVAAVRAAASLLCPPKITATKEDKHKLRLRRLDTKIKSMRQQASWYQCIIDVLKGKIGSSKKMKDMIEELRSIHHRVDLPTVHLLKQKAVDKIRSLTAARKKLIKRQKWIEDNNTFNAEPSKLFQSQQQMTQKPPSPPEVEEFWKSIYEQRPETRDTPALLRFQQMCDQNQQKNDELSEISTEDIKQALKNKRDFTAPGLDGIQNYWWKRFPATHQHLARLFSGMLTRREPIPSWLVEGRTVLIPKSGDLGQHKNYRPITCLNTLYKILTSVIQHQILRVIGPVWDSIYEQRGAKKGVQGCKDNLLIDKSVCLDARFYKRDLHTSWLDYAKAYDTSPHELIIRLLKMLKVHPNIIHAIENIIALWKTKFAIRTEGRTVYTGWVRYRRGVFQGDSLSPLLFCITLIPLTIELRESKIGYKAGPPGRRNYLISHLLYMDDLKLYAPSESALRQLLNIVSDYTSAMGMTFGLDKCAVFHLRRGKAEDAGEDIRLEDGMIIRHLEDGETYKFLGMEQRGVLETTRIKDALTASYKKKLRDIWKSQLSGKNKVSATNMLAIPILTYSFGVVNWTVNELLDLDRSTRKTMNMNRSLHPNSSIQRIYLPQSQGGRGLQCLEYQHYQQTLEMAVRVLRSEDPLLKFVAQHEIANHGAFLFRAAQRALEKLSITGVSINPELAGAPITQADQRSLARLIRKSQSDTLLEHHMSKTLHSIYFRSLKDKDLSEELSFAFLKSASLKSETEGFVMACQDGVLNTRWYKKNIMKMDTPTTCRACHRQQETIMHILSACSVHAPSGYVERHNAALRILYFHLRAAYGIDKEPVLPYVPLEIEAVVQNERARICWNYPVSTTRQINAVKPDILLLDKELKELFVVEFSSPAENNVVMKEEQKRQKYKDLMFELGTLYPGHKVRMVVLIIGCLGGMRANYVDELKIIPACRSLAEVLAHRMQKAVLLGSLHIIRSHEL

SEQ ID NO: 25879 - protein, 1490 aa, Adalia bipunctata
MSTLKIMYTNLNSYSPRKHLINNIIERHNNNNNPARGYYCVVYGCDNPADPGHSQPMSDKYIRSLGEQSLPGDRQGASGVGAGRDSMRDTNGRMLRRQAPAIQEAMSLDEEDIDEKRVQVVDRIGIQRSKEQPVVGTGSRNRTAQRGRHKWTPEQHDLLSALYKRSRPERRGYMNRLHGLWCENYPDLDYMTQQNLRDQISHLKRKGILWRSQEQERTKQQDEEQVTDASNQHQPLTIDTAEEQAVAMVRNIADQTGSSTRSNRPITEHVRDVPRKEQGEEHVTDAPKQQHQAKALGARPRTEQISRVIRRGILWRSQEQERTEQQAEEQVTDASNQHQQLTIDTAEEQAVALVGNIASQTRSGTRFNRPITEHVRDVPKIEHGEEQVTDAQNQQHQAIALGPRPRTEQVRDVPVIGLVEEQVTDAPEQQHQAIALGPRPRTEQVRDVPVIGLAEEQVTDAPDQQQQKPGTVRDVPKLIVNTREAFEAAVRNPLVKTSRIKTRHEAEDLAVLDNIIQDHLNETCSLEDVVAAVRAAAFLLCPPKSTATKEDKHKLRLRRLDTKIKSMRQQASWYQCIIDVLKGKIESSKKMKDMIEELRTIHHRVDLSTVHLLKQKAVDKIRSLAAARKKLIKRQEWIEDNNTFNAEPSKLFQSQQQMTQKPPSPPEVEEFWKSIYEQRAETRDTPALLRFQQMCDQNQQQNDELSEISTEDIRQALKNKRDFTAPGLDGIRNYWWKRFPATHQHLARLFSRMLTRREPIPSWLVEGRTVLIPKSGDLGQPKNYRPITCLNTLYKILTSVIQHQILRVIGPVWDSIYEQRGAKKGVQGCKDNLLIDKSVCLDARYYKRDLHTSWLDYAKAYDTSPYELIIRLLKMLKVHPNIVHAIENIIALWKTKFAIRTEGRTVYTGWVRYRRGVFQGDSLSPLLFCITLIPLTIELRESKIGYKAGPPGRRNHLISHLLYMDDLKLYAPSESALRQLLNIVSDYTSAMGMSFGLDKCAVFHLRRGKAEDAGEDIRLEDGLTIRHLEDGETYKFLGMKQRGVLETTQIKDALTASYKKKLRDIWKSQLSGKNKVSATNMLAIPILTYSFGVVNWTVNELLDLDRSTRKTMNMNRSLHPNSSIQRIYLPRSQGGRGLQCLEYQHYQQTLEMAIRILRSEDPLLKFVAQHEIANHGAFLFRAAQRALEKLSITGVSINPDLAGTPITQADQRSLARLIRKSQSDTLLEHHMSKTLHSIYFRSLKDQDLSEELSFAFLKSASLKSETEGFVMACQDGVLNTRWYKKNIMKMDTPTTCRACHRQQETIMHILSACSVHAPSGYVERHNAALRILYFHLRAAYGIDKEPVLPYVPLEIEAVVQNDRARICWNYPVSTTRQINAVKPDILLLDKELKELFVVEFSSPAENNVVMKEEQKRQKYKDLMFELGTLYPGHKIRMVVLIIGCLGGMRANYVDDLKIIPACRPLAEVLAHRMQKAVLLGSLHIIRSHEL

SEQ ID NO: 25880 - protein, 1300 aa, Coccinella septempunctata
MSERNQLSLGKQSLPGDRQGTSGVGAGRDSMRDTNGRTLRRRAPAIQKATPLDEEDIDEERVQVVGRIGIQSSQEHPVVGTGSRNRTAQRGRHKWTPEQHSLLSALYRRSGPDRRGYMNRLHGLWCENCPDLNYMTQQNLRDQISHLKRRGILQRPREQGRLEQQAEEQVTDALSQHQQLTVDITQEQAVALLSDIAGRTRTGTRSNRPITEHVRDVPDIERAEEQVTDAPDQQHQAMTHRSEAVALEARPRTEQVREVPEIELAEEQVTDAPDRQQQRPRRDSSELIDNTKEAFEAAVGDPLIKPTRIKSRHKAEDLAVLNSIIQDHLNETCSLEEVEAAVRAAAYLLCPPKSTAANNNNKHRKRLNRLDIKIKSMRQQASWYQCVIDVLKGKTKPSKRMREMIEELRAIHGTVNLPTVHLLKQKAVDKIRSLAAARKKLIRRKRWIEDNNTFTAEPSKLFQPQQQEVQNPPSPQDVEEFWKSLYEQPAKTRDTPALPRFQQMCDQTLQQNDELSEISPEDIRQALKNKNDFTAPGPDGIQNYWWKSFPATHKHLARLFSGMLIRREPIPSWLVEGRTVLIPKSGDLGQPKNYRPITCLNTLYKIFTSVIQDRILRVIGPVWDSIYEQRGAKKGVQGCKDNLLIDKSVCLDARHYKRDLHTSWLDYAKAFDTSPHDLIIRLLKMLKVHPNIIHAIESIIALWKTKFAIRAEGRTVCTGWVRYRRGVFQGDSLSPLLFCITLMPLSIELRASKIGYKAGPPGRRNHLISHLMYVDDLKLYAPSRTALQQLLNIVSDYTSAMGMSFGLDKCAVFHLRRGRVDDPGEDIQLEDGMTFRRLEEGETYKFLGMKQRGVLETTQIKDALSASYKKKLRDIWKSQQSGKNKVSATNMLAIPILTYSFGVVNWTVNELLDLDRSTRKTMNMNRSLHPNSSIQRIYLPRSQGGRGLQCLEYQHYQQTLETAVRVLRSEDPLLKFVAQHELANHGAFLFRAGQRALEKLGITGVSIDPERAGAPITQADQRRLARLIRKSQSNTLLEHHMSKSLHSIFFRSLKDQDLSEELSFAFLKSASLKSETEGFVMACQDGVINTRWYKKNIMKMDTPTTCRACHSQQETIMHILSACRVHAPSGYIERHNAALRVLYFHLRAAYEIDKEPVLPYVPLEIEAVVQNEKARIYWNYPVPTTRQINAIKPDILLLDKELKELFAVEFSSPAENNMVMKEEQKRQKYKDLVFELGTMYPGHKVKMVVLIIGCLGGMRANYVEELKIIPACRSWAEILAHRMQKAVLLGSLHIIRSHEL

SEQ ID NO: 25881 - protein, 1160 aa, Adalia bipunctata
MRKNNNNNNNNNNNAAEEQAVALVRHIAGQTGSITRFNRPITEHVRDVPKIEHGEEQVTDAQNQQHQAIALGPRPRTEQVRDVPVIELAGEQVTDAPDQRHQAIALEPRPRTEQVRDVPVIGLAEEQVTDAPDQQQQKPGTVRDVPKLIVNTREAFEAAVRNPLVKIFRMKTRHEAEDLAVLDNIIQDHLNETCSLEDVVAAVRAAASLLCPPKITATKEDKHKLRLRRLDTKIKSMRQQASWYQCIIDVLKGKIGSSKKMKDMIEELRSIHHRVDLPTVHLLKQKAVDKIRSLTAARKKLIKRQKWIEDNNTFNAEPSKLFQSQQQMTQKPPSPPEVEEFWKSIYEQRPETRDTPALLRFQQMCDQNQQQNDELSEISTEDIKQALKNKRDFTAPGLDGIQNYWWKRFPATHQHLARLFSGMLTRREPIPSWLVEGRTVLIPKSGDLGQPKNYRPITCLNTLYKILTSVIQHQILRVIGPVWDSIYEQRGAKKGVQGCKDNLLIDKSVCLDARFYKRDLHTSWLDYAKAYDTSPHELIIRLLKMLKVHPNIIHAIENIIALWKTKFAIRTEGRTVYTGWVRYRRGVFQGDSLSPLLFCITLIPLTIELRESKIGYKAGPPGRRNYLISHLLYMDDLKLYAPSESALRQLLNIVSDYTSAMGMSFGLDKCAVFHLRRGKAEDAGEDIRLEDGMIIRHLEDGETYKFLGMKQRGVLETTRIKDALTASYKKKLRDIWKSQLSGKNKVSATNMLAIPILTYSFGVVNWTVNELLDLDRSTRKTMNMNRSLHPNSSIQRIYLPRSQGGRGLQCLEYQHYQQTLEMAVRVLRSEDPLLKFVAQHEIANHGAFLFRAAQRALEKLSITGVSINPELAGAPITQADQRSLARLIRKSQSDTLLEHHMSKTLHSIYFRSLKDQDLSEELSFAFLKSASLKSETEGFVMACQDGVLNTRWYKKNIMKMDTPTTCRACHRQQETIMHILSACSVHAPSGYVERHNAALRILYFHLRAAYGIDKEPVLPYVPLEIEAVVQNERARICWNYPVSTTRQINAVKPDILLLDKELKELFVVEFSSPAENNVVMKEEQKRQKYKDLMFELGTLYPGHKVRMVVLIIGCLGGMRANYVDELKIIPACRSLAEVLAHRMQKAVLLGSLHIIRSHEL

SEQ ID NO: 25882 - protein, 924 aa, Adalia bipunctata
MRQQASWYQCIIDVLKGKIKSSKKMKDMIEELRSIHRTVDLPTIHLLKQKAVDRIRSLAAARKKMIKRQKWIEDNNTFTAEPSKLFQSPQQKAQNPPSPQEVEEFWKSLYEQQAEIRDTPALLRFQQMCDQNQQQNDEPSEISTEDIRQALKNKRDFTAPGLDGIQNYWWKQFPATHQHLARLFSGMLTRREPIPSWLVEGRTVLIPKSGDLGQPKNYRPITCLNTLYKILTSVIQDQILRVIGPVWNSIYEQRGAKKGVQGCKDNLLIDKSVCLDARHYKRDLHTSWLDYAKAYDTTPHELIVRLLKMLKVYPNIIHAIENIIALWKTKFAIRAEGRTVYTGWVRYRRGVFQGDSLSPLLFCITLIPLTIELRESKIGYKAGPPGRRNHLISHLLYMDDLKLYAPSESALRQLLNIVSDYTSAMGMSFGLDKCAVFHLRRGKAEDAGEDIRLEDGMTFRHLEDGETYKFLGMKQRGVLETTQIKDALTASYKKKLRDIWKSQLSGKNKVSATNMLAIPILTYSFGVVNWTVNELLDLDRSTRKTMNMNRSLHPNSSIQRIYLPRSQGGRGLQCLEYQHYQQTLEMVVRILRSEDPLLKFVAQHEIANHGAFLFRAAQRAVEKLSITGVSINPELAVTPITQAEQRSLARLIRKSQADKLLEHHMSKNLHSIYFRSLKDQDLSEELSFAFLKSASLKSETEGFVMACQDGVLNTRWYKKNIMKMDTPTTCRACHRQQETIMHILSACRVHAPSGYVERHNAALRILYFHLRAAYEIDKEPVLPYVPLEIEAVVQNERARICWNYPVSTTRQINAIKPDILLLDKELKELFVVEFSSPAENNVVMKEEQKRQKYKDLMFELGTLYPGHKVRMVVLIIGCLGGMRANYVDELKIIPACRSLAEVLAHRMQKAVLLGSLHIIRSHEL

SEQ ID NO: 25883 - protein, 1185 aa, Coccinella septempunctata
MNRMHGLWCENCPDLNYMTQQNLRDQISHLKRRGILQRSREQGRLEQQAEEQVTDALSQHQQLTVDITQEQAVALLSDIAGRTRTGTRPNRPITEHVRDVPDIERAEEQVTDAPDQQHQAMTHRSEAAALEARPRTEQVREVPEIELAGEQVTDAPDRQQQRPRTVRDSSELVDNTKEAFEAAVGDPLIKPTRIKSRHKAEDLAVLNSIIQDHLNETCSLEEVEAAVRAAAYLLCPPKNTAANNNNNKHRKRLNRLDIKIKSMRQHTSWYQCVIDVMKGKTKPSKRMREMIEELRAIHGTVNLPTVHLLKQKAVDKIRSLAAARKKLIRRKRWIEDNNTFTAEPSKLFQPQQQEVQNPPSPQDVEEFWKSLYEQPAKTRDTPALPRFQQMCDQTLQQNDELSEISAEDIRQALKNKNDFTAPGPDGIQNYWWKSFPATHKHLARLFSGMLIRREPIPSWLVEGRTVLIPKSGDLGQPKNYRPITCLNTLYKILTSVIQDRILRVIGPVWDSIYEQRGAKKGVQGCKDNLLIDKSVCLDARHYKRDLHTSWLDYAKAFDTSPHDLIIRLLKMLKVHPNIIHAIESIIALWKTKFAIRAEGRTVYTGWVRYRRGVFQGDSLSPLLFCITLMPLSIELRASRIGYKAGPPGRRNHLISHLMYVDDLKLYAPSRTALQQLLNIVSEYTSAVGMSFGLDKCAVFHLRRGRVDDPGEDIQLEDGMTFRRLEDGETYKFLGMKQRGVLETTQIKDALSARYKKKLRDIWKSQLSGKNKVSVTNMLAIPILTYSFGVVNWTVNEPLDLDRSTRKTMNMNRSLHPNSSIQRIYLPRSQGGRGLQCLEYQHYQQTLETAVRVLRSEDPLLKFVAQHELANHGAFLFRAAQRALEKLGITGVSIDPERAGAPITQADQRRLARLIRKSQSNTLLEHHMSKSLHSIFFRSLKDQDLSEELSFAFLKSASLKSETEGFVMACQDGVINTRWYKKNIMKMDTPTTCRACHSQQETIMHILSACRVHAPSGYIERHNAALRVLYFHLRAAYEIDKEPVLPYVPLEIEAVVQNEKARIYWNYPVSTTRQINAIKPDILLLDKELKELYVVEFSSPAENNMMKEEQKRQKYKDLVFELGTMYPGHKVRMVVLIIGCLGGMRANYVEELKIIPACRSWAEILAHRMQKAVLLGSLHIIRSHEL

SEQ ID NO: 25884 - protein, 1302 aa, Coccinella septempunctata
MSERNQLSLGKQSLPGDRQGTSGVGAGRDSMRDTNGRTLRRRAPATQKATPLDEEDIDEERVQVVGRIGIQSSQEHPVVGTGSRNRTAQRGRHKWTPEQHSLLSALYRRSGPDRRGYMNRLHGLWCENCPDLNYMTQQNLRDQISHLKRRGILQRSQEQGRLEQQAEEQVTDALSQHQQLTVDITQEQVVALLSDIAGRTRTGTRSNRPTTEHVRDVPDIERAEEQVTDAPGQQHQAMTHRGEAVALEARPRTEQVREVPEIELAGEQVTDAPDRQQQRPRTVRDSSELIDNTKEAFEAAVRDPLIKPTRIKSRYKAEDLAVLNSIIQDHLNETCSLEEVEAAVRAAAYLLCPPKSTAAKNNNKHRKRLNQLDIKIKSMRQQASWYQCVIDVLKGKTKPSKRMKEMIEELRATHGTVNLPTVHLLKQKAVDKIRSLAAARKKLIRRKRWIEDNNTFTAEPSKLFQPQQQEVQNPPSPLDVEEFWKSLYEQPAKTRDTPALPRFQQMCDQTLQQNDELSEISAEDIRQALKNKNDFTAPGPDGIQNYWWKSFPATHKHLARLFSGMLIRREPIPSWLVEGRTVLIPKSGDLGQPKNYRPITCLNTLYKILTSVIQDRILRVIGPVWDSIYEQRGAKKGVQGCKDNLLIDKSVCLDARHCKRDLHTSWLDYAKAFDTSPHDLIIRLLKMLKVHPNIIHAIESIIALWKTKFAIRAEGRTVYTGWVRYRRGVFQGDSLSPLLFCITLMPLSIELRASKIGYKAGPPGRRNHLISHLMYVDDLKLYAPSRTALQQLLNIVSDYTSAMGMSFGLDKCAVFHLRRGRVDDPGEDIQLEDGMTFRCLEEGETYKFLGMKQRGVLETTQIKDALSASYKKKLRDIWKSQLSGKNKVSATNMLAIPILTYSFGVVNWTVNELLDLDRSTRKTMNMNRSLHPNSSIQRIYLPRSQGGRGLQCLEYQHYQQTLETAVRVLRSEDPLLKFVAQHELANHGAFLFRAGQRALEKLGITGVSIDPERAGAPITQADQRRLARLIRKSQSNTLLEHHMSKSLHSIFFRSLKDQDLSEELSFAFLKSASLKSETEGFVMACQDGVINTRWYKKNIMKMDTPTTCRACHSQQETIMHILSACRVHAPSGYIERHNAALRVLYFHLRAAYEIDKEPVPPYVPLEIEAVVQNEKARIYWNYPVSTTRQINAIKPDILLLDKELKELFVVEFSSPAENNIVMKEEQKRQKYKDLVFELGTMYPGHKVRMVVLIMGCLGGMRANYVEELKIIPACRSWAEILAHRMQKAVLLGSLHVIRSQEL

SEQ ID NO: 25885 - protein, 1487 aa, Adalia bipunctata
MFFHWFIEVIPARAETGRPMMKNNNNNNNNPARGYYCVVYGCDNPADPGHSQPMSDKYIRSLGEQSLPGDRQGASGVGAGRDSMRDTNGRMLRRQAPAIQEAMPADEEDIDEERVQVVGRIGIQRSKEQPVVGTGSRNRTAQRGRHKWTPEQHDLLSALYRRSRPERRGYMNRLHGLWCENYPDLDYMTQQNLRDQISHLKRKGILWRSQEQERTEKQDGEQVADASNQHQLLTIDTAEEQAVAMVRNVAGQTGTGTRSNRPITEHVRDVPRKEQGGEHVTDAPKQQHQAKASGARPRTEQISRIIRRGILWRSQEQERSEQQAEEQVTDASNQHQQLTIDTAEERAVALVRHIAGQTGSITRFNRPITEHVRDVPKVEHGEEQVTDAQNQQHQAIALGPRPRTEQVRDVPVIELAGEQVTDAPDQRHQAIALGPRPGTEQVRDVPVIGLAEEQVTDAPDQQKQKPGTVRDVPKLIVNTREAFEAAVRNPLVKIFRMKTRHEAEDLAVLDNIIQDHLNETCSLEDVVAAVRAAASLLCPPKSTATKEDKHKLRLRRLDTKIKSMRQQASWYQCIIDVLKGKIGSSKKMKDMIEELRSIHHRVDLPTVHLLKQKAVDKIRSLTAARKKLIKRQKWIEDNNTFNAEPSKLFQSQQQMTQKPPSPPEVEEFWKSIYEQRPETRDTPALLRFQPMCDQNQQQNDELCEISTEDIRQALKNKRDFTAPGLDGIQNYWWKRFPATHQHLARLFSGMLTRREPIPSWLVEGRTVLIPKSGDLGQPKNYRPITCLNTLYKILTSVIQHQILRVIGPVWDSIYEQRGAKKGVQGCKDNLLIDKSVCLDARFYKRDLHTSWLDYAKAYDTSPHELIIRLLKMLKVHPNIIHAIENIIALWKTKFSIRAEGRTVYTGWVRYRRGVFQGDSLSPLLFCITLIPLTIELRESKIGYKAGPPGRRNHLISHLLYMDDLKLYAPSESALRQLLNIVSDYTSAMGMSFGLDKCAVFHLRRGKAEDAGEDIRLEDGMIIRHLEDGETYKFLGMKQRGVLETTQTKDALTASYKKKLRDIWKSQLSGKNKVSATNMLAIPILTYSFGVVNWTVNELLDLDRSTRKTMNMNRSLHPNSSIQRIYLPRSQGGRGLQCLEYQHYQQTLEMAVRVLRSEDPLLKFVAQHEIANHGAFLFRAAQRALEKLSITGVSINPELAGAPITQADQRSLARLIRKSQSDTLLEHHMSKTLHSIYFRSLKDQDLSEELSFAFLKSASLKSETEGFVMACQDGVLNTRWYKKNIMKMDTPTTCRACHRQQETIMHILSACSVHAPSGYVERHNAALRILYFHLRAAYGIDKEPVLPYVPLEIEAVVQNERARICWNYPVSTTRQINAVKPDILLLDKELKELFVVEFSSPAENNVVMKEEQKRQKYKDLMFELGTLYPGHKVRMVVLIIGCLGGMRANYVDELKIIPACRSLAEVLAHRMQKAVLLGSLHIIRSHEL

SEQ ID NO: 25886 - protein, 1317 aa, Adalia bipunctata
MNRLHGLWCENYPDLDYMTQQNLRDQISHLKRKGILWRSQELERTEQQDGEQVTDASNQHQLLTIDTAEEQAVAMVRNVAGQTGTGTRSNRPITEHVRDVPRKEQGGEHVTDAPKQQHQAKASGARPRTEQISRIIRRGILWRSQEQERTEQQAEEQVTDASNQHQQLTIDTAEEQAVALVRNIAGQTGSSTRFNRPITEHVRDVPRIEHGEEQVTDAQNQQHQAIALGPRPRTEQVRDVSVIELAGEQVTDAPDQQHQAIALGPRPRTEQVRDVPVIGLAEEQVTDAPDQQQQKPGTVRDVPKLIVNTREAFEAAVRNPLVKTFRIKTRHEAEDLAVLDNIIQDHLNETCSLEDVVAAVRAAASLLCRPKSTATKEDKHKLRLRRLDTKIKSMRQQASWYQCIIDVLKGKIESSKKMKDMIEELRSIHHRVDLPTVHLLKQKAVDRIRSLAAARKKLIQRQKWIEDNNTFTAEPSKLFQSPQQKAQNPPSPQEVEEFWKSIYEQRAETRDTPALLRFQQMCDQNQQQNDELCEISTEDIRQALKNKRDFTAPGLDGIQNYWWKRFPATHQHLARLFSGVLTRREPIPSWLVEGRTVLIPKSDDLGQPKNYRPITRLNTLYKILTSVIQHQILRVIGPVWDSIYEQRGAKKGVQGCKDNLLIDKSVCLDARYYKRDLHTSWLDYAKAYDTSPHELIIRLLKMLKVHPNIIHAIENIIALWKTKFAIRAEGRTVYTGWVRYRRGVFQGDSLSPLLFCITLIPLTIELRESKIGYKAGPPGRRNHLISHLLYMDDLKLYAPSESALRQLLNIVSDYTSAMGMSFGLDKCAVFHLRRGKAEDAGEDIRLEDGMTIRHLEEGETYKFLGMKQRGVLETTQIKDALTASYKKKLRDIWKSQLSGKNKVSATNMLAIPILTYSFGVVNWTVNELLDLDRSTRKTMNMNRSLHPNSSIQRIYLPRSQGGRGLQCLEYQHYQQTLEMAVRILRSEDPLLKFVAQHEIANHGAFLFRAAQRAVEKLSITGVSINPELAGTPITQAEQRSLARLIRKSQADKLLEHHMSKNLHSIYFRSLKDQDLSEELSFAFLKSASLKSETEGFVMACQDGVLNTRWYKKNIMKMDTPTTCRACHGQQETIMHILSACRVHAPSGYVERHNAALRILYFHLRAAYEIDKEPVLPYVPLEIEAVVQNERARICWNYPVSTTRPINAVKPDILLLDKELKELFVVEFSSPAENNVVMKEEQKRQKYKDLMFELGTLYPGHKVRMVVLIIGCLGGMRANYVDELKIIPACRSLAEVLAHRMQKAVLLGSLHIIRSHEV

SEQ ID NO: 25887 - protein, 1312 aa, Coccinella septempunctata
MSERNQLSLGKQSLPGDRQGTSGVGAGRDSMRDTNGRTLRRRVPATQKATPLDEEDIDEERVQVVGRIGIQSSQEHPVVGTGSRNRTAQRGRHKWTPEQHSLLSALYRRSGPDRRGYMNRLHGLWCENCPDLNYMTQQNLRDQISHLKRRGILQRSREQGRLEQQDEEQVTDALSQHQQLTVDITQEQAVALLSDIAGRTRTGTRSNRPITEHVRDVPDIERAEEQVTDAPGQQHQAMTHRGEAVALEARPRTEQVREVPEIELAGEQVTDAPDRQQQRPRTVRDSSELIDNTKEAFEAAVRDPLIKPTRIKSRHKAEDLAVLNSIIQDHLNETCSLEEVEAAVRAAAYLLCPPKSTAANNNNKHRKRLNRLDIKLKSMRQQASWYQCVIDVLKGKTKSSKRMKEMIEELRATHGTVNLPTVHLLKQKAVDKIRSLAAARKKLIRRKRWIEDNNTFTAEPSKLFQPQQQEVQNPPSPQDVEEFWKSLYEQPAKTRDTPALPRFQQMCDQTLQQNDELSEISAEDITQALKNKNDFTAPGPDGIQNYWWKSFPATHKHLARLFSGMLIRREPIPSWLVEGRTVLIPKSGDLGQPKNYRPITCLNTLYKILTSVIQNRILRVIGPVWDSIYEQRGAKKGVQGCKDNLLIDKSVCLDARHYKRDLHTSWLDYAKAFDTSPHDLIIRLLKMLKVHPNIIHAIEAIIALWKTKFAIRAEGRTVYTGWVRYRRGVFQGDSLSPLLFCITLMPLSIELRASKIGYKAGPPGRRNHLISHLMYVDDLKLYAPSRTALQQLLNIVSDYTSAMGMSFGLDKCAVFHLRRGRVDDPGEDIQLEDGMTFRCLEEGETYKFLGMKQRGVLETTQIKDALSASYKKKLRDIWKSQLSGKNKVSATNMLAIPILTYSFGVVNWTVNELLDLDRSTRKTMNMNRSLHPNSSIQRIYLPRSQGGRGLQCLEYQHYQQTLETAVRVLRSEDPLLKFVAQHELANHGAFLFRAGRRALEKLGITGVSIDPERAGAPITQADQRRLARLIRKSQSNTLLEHHMSKSLHSIFFRSLKDQDLSEELSFAFLKSASLKSETEGFVMACQDGVINTRWYKKNIMKMDTPTTCRACHSQQETIMHILSACRVHAPSEYIERHNAALRVLYFHLRAAYEIDKEPVLPYVPLEIEAVVQNEKARIYWNYPVSTTRQINAIKPDILLLDKELKELFVVEFSSPAENNIVMKEEQKRQKYKDLVFELETMYPGHKVRMVVLIIGCLGGMRANYVEELKIIPACRSWAETLAHRMQKAVLLGSLHVIRSHELKMPLAAHLFC

SEQ ID NO: 25888 - protein, 1317 aa, Adalia bipunctata
MNRLHGLWCENYPDLDYMTQQNLRDQISHLKRKGILWRSQEQERTEQQVGEQVTDASNRHQLLTIDTAEEQAVAMVRNVAGQTGTGTRSNRPITEHVRDVPRKEQGGEHVTDAPKQQHQAKASGARPRTEQISRIIRRGILWRSQEQERTEQQAEEQVTDASNQHQQLTIDTAEEQAVALVRHIAGQTGSITRFNRPITEHVRDVPKIEHGEEQVTDAQNQQHQAIALGPRPRTEQVRDVPVIELAGEQVTDAPDQRHQAIALGPRPRTEQVRDVPVIGLAEEQVTDAPDQQQQKPGTVRDVPKLIVNTREAFEVAVRNPLVKIFRMKTRHEAEDLAVLDNIIQDHLNETCSLEDVVAAVRAAASLLCPPKSTATKEDKHKLRLRRLDTKIKSMRQQASWYQCIIDVLKGKIGSSKKMKDMIEELRSIHHRVDLPTVHLLKQKAVDKIRSLTAARKKLIKRQKWIEDNNTFNAEPSKLFQSQQQMTQKPPSPPEVEEFWKSIYEQRPETRDTPALLRFQQMCDQNQQQNDELSEISTEDIKQALKNKRDFTAPGLDGIQNYWWKRFPATHQHLARLFSGMLTRREPIPSWLVEGRTVLIPKSGDLGQPKNYRPITCLNTLYKILTSVIQHQILRVIGPVWDSIYEQRGAKKGVQGCKDNLLIDKSVCLDARFYKRDLHTSWLDYAKAYDTSPHELIIRLLKMLKVHPNIIHAIENIIALWKTKFAIRTEGRTVYTGWVRYRREVFQGDSLSPLLFCITLIPLTIELRESKIGYKAGPPGIRNHLISHLLYMDDLKLYAPSESALRQLLNIVSDYTSAMGMSFGLDKCAVFHLRRGKAEDAGEDIRLEDGMIIRHLEDGETYKFLGMKQRGVLETTQIKDALTASYKKKLRDIWKSQLSGKNKVSATNMLAIPILTYSFGVVNWTVNELLDLDRSTRKTMNMNRSLHPNSSIQRIYLPRSQGGRGLQCLEYQHYQQTLEMAVRVLRSEDPLLKFVAQHEIAIHGAFLFRAAQRALEKLSITGVSINPEPAGAPITQADQRSLARLIRKSQSDTLLEHHMSKTLYSIYFRSLKDQDLSEELSFAFLKSACLKSETEGFVMACQDGVLNTRWYKKNIMKMDTPTTCRACHRQQETIMHILSACSVHAPSGYVERHNAALRILYFHLRAAYGIDKEPVLPYVPLEIGLVVQNERARICWNYPVSTTRQINAVKPDILLLDKELKELFVVEFSSPAENNVVMKEEQKRQKYKDLMFELGTLYPGHKVRMVVLIIGCLGGMRANYVDELKIIPACRSLAEVLAHRMQKAVLLGSLHIIRSHEL

SEQ ID NO: 25889 - protein, 1403 aa, Adalia bipunctata
MRDTNGRMLRRQAPAIQEAMPLDEEDIDEERVQVVGRIGIQRSKEQPVVGTGSRNRTAHRGRHKWTPEQHDLLSALYRRSRPERRGYMNRLHGLWCENYPDLEYMTQQNLRDQISHLKRKGILWRSQEQERREQQDEEQVTDASNQHQLLTIDTAEEQAVAMVRNIAGQTGTGTRSNRPITEHVRDVPRKEKGEEHVTDAPKQQHQAKALGARPRTEQISRVIRRGILWRSQEQERTEQQAEEQVTNASIQHQQLMIDTAEEQAVALVKNIAVKTGSSTRFNRPITEHVRDVPKIEHGEEQVTDAQNQQHQAIALGPRPRTEQVRDVPVIELAGEQVTDAPDQQHQAIALGPRPRTEQVRDVPVIGLAEEQVTDAADQQQKNPGTVRDVPKLIVNTREAFEAAVRNPLVKTSRIKTRHEAEDLAVLDNIIQDHLNETCSLEDVVAAVRAAASLLCPPKSTATKEDKHKLRLRRLDTKIKSMRQQASWYQCIIDVLKGKIESSKKMKDMIEELRSIHHRVELPPVHLLKQKAVDKIRSLAAARKKLIKRQKWIEDNNTFNAEPSKLFQSQQQMTQKPPSPPEVEEFWKSIYKQRAETRDTPALLRFQQMCDQNQQQNDELSEISTEDIRQALKNKRDFTAPGMDGIQNYWWKRFPATHQHLARLFNGMLTRREPIPSWLVESRTVLIFDCDLGQPKNYRPITCLNTLYKILTSVIQHQILRVIAPVWDSIYEQRGAKKGVQGCKDNLLIDKSVCLDARYYKRDLHTSWLDYAKAYDTSPHELIIRLLKMLKVHPNINHAIENIIALWKTKFAIRTEGRTVYTGWVRYRRGVFQGDSLSPLLFCITLIPLTIELRKSKIGYKAGPPGRRNHLISHLLYMDDLKLYAPSESALRQLLNIVSDYTSAMGMSFGLDKCAVFHLRRGKAEDAGEDIRLEDGMTIRHLEEGETYKFLGMKQRGVLETTQIKDALTASYKKKLRDIWKSQLSGKNKVSATNMLAIPILTYSFGVVNWTVNELLDLDRSTRKTMNMNRSLHPNSSIQRIYLPRSQGGRGLQCLEYQHYQQTLEMAVRILRSEDPLLKFVAQHEIANHGAFLFRAAQRAVEKLSITGVSINPELAGTPITQAEQRSLARLIRKSQADKLLEHHMSKSLHSIYFRSLKDQDLSEELSFAFLKSASLKSETEGFVMACQDGVLNTRWYKKNIMKMDTPTTCRACHRQQETIMHILSACRVHAPSGYVERHNAASRILYFHLRAAYEIDKEPVLPYVPLEIEAVVQNERARICWNYPVSTTRQINAVKPDILLLDKELKELFVVEFSSPAENNVVMKEEQKRQKYKDLMFELGTLYPGHKVRMVVLIIGCLDGMRANYVDELKIIPACRSLAEVLAHRMQKAVLLGSLHIIRSHEV

SEQ ID NO: 25890 - protein, 1486 aa, Adalia bipunctata
MKLHLEKKGFDIYNNNNNNNNNNNNNNNPARGYYCVVYGCDNPADPGHSQPMSDKFIRSLGEQSLPGDRQGASGVGAGRDSMRDTNGRMLRRQAPAIQEAMPLDEEDIDEERVQVVGRIGIQRSKEQPVVGTGSRNRTAQRGRHKWTPEQHDLLSALYRRSRPERRGYMNRLHGLWCENYPDLDYMTQQNLRDQISHLKRKGILWRSQEQERTEQQDGEQVTDASNQHQLLTIDTAEEQAVAMVRNVAGQTTGTGTRSNRPITEHVRDVPRTEQGGEHMTDAPKQQHQAKASGARPRTEQISRIIRRGILWRSQEQERTEQQAEEQVTDASNQHQQLTIDTAEEQAVALVRHIAGQTGSITRFNRPITEHVRDVPKIEHGEEQVTDAQNQQHQAIALGPRPRTEQVRDVPVIELAGEQVTDAPDQRHQAIALGPRPRTEQVRDVPVIGLAEEQVTDAPDQQQQKPGTVRDVPKLIVNTREAFEAAVRNPLVKIFRMKTRHEAEDLAVLDNIIQDHLNETCSLEDVVAAVRAAASLLCPPKSTATKEDKHKLRLRRLDTKIKSMRQQASWYQCIIDVLKGKIGSSKKMKDMIEELRSIHHRVDLPTVHLLKQKAVDKIRSLTAARKKLIKRQKWIEDNNTFNAEPSKLFQSQQQMTQKPPSPPEVEEFWKSIYEQRPETRDTPALLRFQQMCDQNQQQNDELSEISTEDIKQALKNKRDFTAPGLDGIQNYWWKRFPATHQHLARLFSGMLTRREPIPSWLVEGRTVLIPKSGDLGQPKNYRPITCLNTLYKILTSVIQHQILRVIGPVWDSIYEQRGAKKGVQGCKDNLLIDKSVCLDARFYKRDLHTSWLDYAKAYDTSPHELIIRLLKMLKVHHNIIHAIENIIALWKTKFAIRTEGRTVYTGWVRYRRGVFQGDSLSPLLFCITLIPLTIELRESKIGYKAGPPGRRNYLISHLLYMDDLKLYAPSESALRQLLNIVSDYTSAMGMSFGLDKCAVFHLRRGKAEDAGEDIRLEDGMIIRHLEDGETYKFLGMKQRGVLETTRIKDALTASYKKKLRDIWKSQLSGKNKVSATNMLAIPILTYSFGVVNWTVNELLDLDRSTRKTMNMNRSLHPNSSIQRIYLPRSQGGRGLQCLEYQHYQQTLEMAVRVLRSEDPLLKFVAQHEIANHGAFLFRAAQRALEKLSITGVSINPELAGAPITQADQRSLARLIRKSQSDTLLEHHMSKTLHSIYFRSLKDQDLSEELSFAFLKSASLKSETEGFVMACQDGVLNTRWYKKNIMKMDTPTTCRACHRQQETIMHILSACSVHAPSGYVERHNAALRILYFHLRAAYGIDKEPVLPYVPLEIEAVVQNERARICWNYPVSTTRQINAVKPDILLLDKELKELFVVEFSSPAENNVVMKEEQKRQKYKDLMFELGTLYPGHKVRMVVLIIGCLGGMRANYVDELKIIPACRSLAEVLAHRMQKAVLLGSLHIIRSHEL

SEQ ID NO: 25891 - protein, 1399 aa, Adalia bipunctata
MSDTYTLSLGKQSLPGDRQGASGVGAGRDSMRDTNGRMLRRQAPAIQEAMPSDEEDIDEERVQVVGRIGIQRSKEQPVVGTGSQNRTAQRGRHKWMPEQHSLLSALYRRSRPERRGYMNRLHGLWCENYPDLDFMTQQNLRDQISHLKRRGIIWRSQEQERTEQQAEEQVTDASSQHQQLTIDTTEEQAVALVRNIAGRTGTGIRSNRPIREHVRDVPEIENGGEQVTDAPNQQHQAIALRTRPRTEQVRDVPEIEHGEEQVTDAPNQQHQEIALGTRPRAEHVRDASEIEHGKEQVTDAPNQQHRAITPGARPRAGQVRDVPEIEHGEEQMTDAPNQQHQGIALGARPRAEQVRDVPEIEHAEEQVTDSPDQQQQMPRTVTDVPKLIVNTREAFEAAVRNPLVKATRIKTRHKAEDLAVLDKIIQDHLNETCSLEDVVTAVRAASSLLCPPKSTATNNDKHRLRLSRLDIKIKSMRQQASSYQCIIDVLKGKIKSSKKMKDMIEELRSIHRTVELPTVHLLKQKAVDRIRSLAAARKKLIKRQKWIEDNNTFTAEPSKLFQSPQQKAQNPPSPQEVEEFWKSLYEQQAEIRDTPALLRFQQMCDQNQQQNDEPSEISTEDIRQALKNKRDFTAPGLDGIQNYWWKKFPATHQHLARLFSGMLTRREPIPSWLVEGRTVLIPKSGDLGQPKNYRPITCLNTLYKILTSVIQDQILRVIGPVWNSIYEQRGAKKGVQGCKDNLLIDKSVCLDARHYKRDLHTSWLDYAKAYDTTPHELIVRLLKMLKVYPNIIHAIENIIALWKTKFAIRAEGRTVYTGWVRYRRGVFQGYSLSPLLFCITLIPLTTELRESKIGYKAGPPGRRNHLISHLLYMDDLKLYAPSESALRQLLNIVSDYTSAMGMSLGLDKCAVFHLRRGKAEDAGEDIRLEDGMTFRHLEDGETYKFLGMKQRGVLETTQIKDALTACYKKKLRDIWKSQLSGKNKVSATNMLAIPILIYSFGVVNWTVNELLDLDRSTRRTMNMNRSLHPNSSIQRIYLPRSQGGRGLQCLEYQHYQQTLEMTVRILRSEDPLLKFVAQHEIANHGAFLFRDAQRAVEKLSITGVSINPELAGTPITQAEQRSLARLIRKYQSDTLLEHHMSKTLHSIYFRSLKDQDLSEELSFAFLKSASLKSETEGFVMACQDGVLNTRWYKKNIMKMDTPTTCRACHRQQETIMHILSACRVHAPSGYVERHNAALRILYFHLRAAYEIDKEPVLPYVPLEIEAVVQNERARICWNYPVSTTRQINAVKPDILLLDKELKELFVVEFSSPAENNVVMKEEQKRHKYKDFMFELGTLYPGHKVRMVVLIIGCLGGMRANYVDELKIIPACRSLAEVLAHRMQKAVLLGSLHIIRSHEL

SEQ ID NO: 25892 - protein, 991 aa, Adalia bipunctata
MKTRHEAEDLAVLDNIIQDHLNETCSLEDVVAAVRAAASLLCPPKSTATKEDKHKLRLRRLDTKIKSMRQQASWYQCIIDVLKGKIGSSKKMKDMIEELRSIHHRVDLPTVHLLKQKAVDKIRSLTAARKKLIKRQKWIEDNNTFNAEPSKLFQSQQQMTQIPPSPPEVEEFWKSIYEQRPETRDTPALLRFQQMCDQNQQQNDELSEISTEDIKQALKNKRDFTAPGLDGIQNYWWKRFPATHQHLARLFSGMLTRREPIPSWLVEGRTVLIPKSGDLGQPKNYRPITCLNTLYKILTSVIQHQLLRVIGPVWDSIYEQRGAKKGVQGCKDNLLIDKSVCLDARFYKRDLHTSWLDYAKAYDTSPHELIIRLLKMLKVHPNIIHAIENIIALWKTKFAIRTEGRTVYTGWVRYRRGVFQGDSLSPLLFCITLIPLTIELRESKIGYKAGPPGRRNHLISHLLYMDDLKLYAPSESALRQLLNIVSDYTSAMGMSFGLDKCAVFHLRRGKAEDAGEDIRLEDGMIIRHLEDGETYKFLGMKQRGVLETTRIKDALTASYKKKLRDIWKSQLSGKNKVSATNMLAIPILTYSFGVVNWTVNELLDLDRSTRKTMNMNRSLHPNSSIQRIYLPRSQGGRGLQCLEYQHYQQTLEMAVRVLRSEDPLLKFVAQHEIANHGAFLFRAAQRALEKLSITGVSINPELAGAPITQADQRSLARLIRKSQSDTLLEHHMSKTLHSIYFRSLKDQDLSEELSFAFLKSASLKSETEGFVMACQDGVLNTRWYKKNIMKMDTPTTCRACHRQQETIMHILSACSVHAPSGYVERHNAALRILYFHLRAAYGIDKEPVLPYVPLEIEAVVQNERARICWNYPVSTTRQINAVKPDILLLDKELKELFVVEFSSPAENNVVMKEEQKRQKYKDLMFELGTLYPGHKVRMVVLIIGCLGGMRANYVDELKIIPACRSLAEVLAHRMQKAVLLGSLHIIRSHEL

SEQ ID NO: 25893 - protein, 1434 aa, Adalia bipunctata
MSDKYIRSLGEQSLPGDRQGASGVGAGRDSMRATNGRMLRRQAPAIQEAMPLDEEDIDEERVQVVGRIGIQRSKEQPVVGTGSRNRTTQRGRHKWTPEQHDLLSALYRRSRPEKRGYMNRLHGLWCENYPDLHYMTQQNLRDQISHLKRRGILWRSQEQERKEQQDEKQVTDASNQHQLLTIDTAEEHAVTMVRNIAGQTGTGTRSNRPITEHVRDVQRREQGGEHVTDAPKQQHQAEALGARPRTEQISRFIRRGILWRSQEQERTEQQAEEQVTDASNQHQQMTIDTAEEQAVSLVRNIAGQTGSSTRFNRPITEHVRDVPKIEHGEEQVTDAQNQQHQAIALGPRPRTEQVRDVPVIGLAEEQVTDAPDQQHQAIALGPRPRTEQVRDVPVIGLAEEQVTDAPDQQQRKPGTVREVPKLIVNTREAFEAAVRNPLVKTSRIKTRHEAEDLAVLDNIIQDHLNETCSLEDVVAAVRAAASLLCPPKSTATKEDKHKLRLRRIGTKIKSMRQQASWYQCIIDVLKGKIGSSKKMKDMIEELRSIHHRVDLPTVHLLKQKAVDKIRSLTAARKKLIKRQKWIEDNNTFNAEPSKLFQSQQQMTQKPPSPPEVEEFWKSIYEQRAETRDTPALLRFQQMCDQNQQQNDELSEISTEDIKQALKNKRDFTAPGLDGIQNYWWKRFPATHQHLARLFSGMLTRREPIPSWLVEGRTVLIPKSGDLGQPKNYRPITCLNTLYKILTSVIQHQILRVIGPVWDSIYEQRGAKKGVQGCKDNLLIDKSVCLDARFYKRDLHTSWLDYAKAYDTSPHELIIRLLKMLKVHPNTIHAIENIIALWKTKFAIRTEGRTVYTGWVRYRRGVFQGDSLSPLLFCITLVPLTIELRESKIGYKAGPPGRRNHLISHLLYMDDLKLYAPSESALRQLLNIVSDYTSAMGMSFGLDKCAVFHLRRGKAEDAGEDIRLEEGMIIRHLEDGETYKFLGMKQRGVLETTQIKDASTASYKKKLRDIWKSQLSGKNKVSATNMLAIPILTYSFGVVNWTVNELLDLDRSTRKTMNMNRSLHPNSSIQRIYLPRSQGGRGLQCLEYQHYQQTLEMAVRVLRSEDPLLKFVAQHEIANHGAFLFRAAQRALEKLSITGVSINPELAGAPITQADQRNLARLIRKSQSDTLLEHHMSKTLHSIYFRSLKDQDLSEEWSFAFLKSASLKSETEGFVMACQDGVLNTRWYKKNIMKMDTPTTCRACHRQQETIMHILSACSVHAPSGYVERHNAAFRILYFHLRATYGIDKEPVLPYVPLEIEAVVQNERARICWNYPVSTTRQINAVKPDILLLDKELKELFVVEFSSPAENNVVMKEEQKMQKYKDLMFELGTLYPGHKVRMVVLIIGCLGGMRANYVDELKIIPACRSLAEVLAHRMQKAVLLGSLHIIRSHEL

SEQ ID NO: 25894 - protein, 1314 aa, Coccinella septempunctata
MQRNTVCSDRKCGWSRNPTYSREARSDPDPTTTTSPKTGAGRDSMRDTNGRTLRRRAPAIQKATPLDEEDIDEERVQVVGRIGIQSSQEHPVVGTGSRNRTAQRGRHKWTPEQHSLLSALYRRSGPDRRGYMNRLHGLWCENCPDLNYMTQQNLRDQISHLKRRGILQRLREQGRSEQQAEEQVADALSQHQQLTVDITQEQAVALLSDIAGRTRTGTRSNRPITEHVRDVPDIERAEEQVTDAPDQQHQAMTHRSEAVALEARPRTEQVREVPEIELAEEQVTDAPDRQQQRPRRDSSELIDNTKEAFEAAVGDPLIKPTRIKSRHKAEDLAVLNSIIQDHLNETCSMEEVEAAVRAAAYLLCPPKSTAANNNNKHRKRLNRLDIKIKSMRQQASWYQCVIDVLKGKTKPSKRMREMIEELRAIHGTVNLPTVHLLKQKAVDKIRSLAAARKKLIRRKRWIEDNNTFTAEPSKLFQPQQQEVQNPPSPQDVEEFWKSLYEQPAKTRDTPALPRFQQMCDQTLQQNDELSEISPEDIRQALKNKNDFTAPGPDGIQNYWWKSFPATHKHLARLFSGMLIRREPIPSWLVEGRTVLIPKSGDLGQPKNYRPITCLNTLYKIFTSVIQDRILRVIGPVWDSIYEQRGAKKGVQGCKDNLLIDKSVCLDARHYKRDLHTSWLDYAKAFDTSPHDLIIRLLKMLKVHPNIIHAIESIIALWKTKFAIRAEGRTVCTGWVRYRRGVFQGNSLSPLLFCITLMPLSIELRASKIGYKAGPPGRRNHLISHLMYVDDLKLYAPSRTALQQLLNIVSDYTSAMGMSFGLDKCAVFHLRRGRVDDPGEDIQLEDGMTFRRLEEGETYKFLGMKQRGVLETTQIKDALSASYKKKLRDIWKSQLSGKNKVSATNMLAIPILTYSFGVVNWTVNELLDLDRSTRKTMNMNRSLHPNSSIQRIYLPRSQGGRGLQCLEYQHYQQTLETAVRVLRSEDPLLKFVAQHELANHGAFLFRAGQRALEKLGITGVSIDPERAGAPITQADQRRLARLIRKSQSNTLLEHHMSKSLHSIFFRSLKDQDLSEELSFAFLKSASLKSETEGFVMACQDGVINTRWYKKNIMKMDTPTTCRACHSQQETIMHILSACRVHAPSGYIERHNAALRVLYFHLRAAYEIDKEPVLPYVPLEIEAVVQNEKARIYWNYPVPTTRQINAIKPDILLLNKELKELFVVEFSSPAETNMVMKEEQKRQKYKDLVFELGTMYPGHKVKMVVLIIGCLGGMRANYVEELKIIPACRSWAEILAHRMQKAVLLVSLHIIRSHEL

SEQ ID NO: 25895 - protein, 927 aa, Adalia bipunctata
MDSHTTESADPLGAHKGFSPHTDVKKKKKKKKKKKKNNNHRADLPTVHLLKQKAVDKIRSLTAARKKLIKRQKWIEDNNTFNAEPSKLFQSQQQMTQKPPSPPEVEEFWKSIYEQRPETRDTPALLRFQQMCDQNQQQNDELSEISTEDIKQALKNKRDFTAPGLDGIQNYWWKRFPATHQHLARLFSGMLTRREPIPSWLVEGRTVLIPKSGDLGQPKNYRPITCLNTLYKILTSVIQHQILRVIGPVWDSIYEQRGAKKGVQGCKDNLLIDKSVCLDARFYKRDLHTSWLDYAKAYDTSPHELIIRLLKMLKVHPNIIHAIENIIALWKTKFAIRTEGRTVYTGWVRYRRGVFQGDSLSPLLFCITLIPLTIELRESKIGYKAGPPGRRNHLISHLLYMDDLKLYAPSESALRQLLNIVSDYTSAMGMSFGLDKCAVFHLRRGKAEDAGEDIRLEDGMIIRHLEDGETYKFLGMKQRGVLETTQIKDALTASYKKKLRDIWKSQLSGKNKVSATNMLAIPILTYSFGVVNWTVNELLDLDRSTRKTMNMNRSLHPNSSIQRIYLPRSQGGRGLQCLEYQHYQQTLEMAVRVLRSEDPLLKFVAQHEIANHGAFLFRAAQRALEKLSITGVSINPELAGAPITQADQRSLARLIRKSQSDTLLEHHMSKTLHSIYFRSLKDQDLSEELSFAFLKSASLKSETEGFVMACQDGVLNTRWYKKNIMKMDTPTTCRACHRQQETIMHILSACSVHAPSGYVERHNAALRILYFHLRAAYGIDKEPVLPYVPLEIEAVVQNERARICWNYPVSTTRQINAVKPDILLLDKELKELFVVEFSSPAENNVVMKEEQKRQKYKDLMFELGTLYPGHKVRMVVLIIGCLGGMRANYVDELKIIPACRSLAEVLAHRMQKAVLLGSLHIIRSHEL

SEQ ID NO: 25896 - protein, 924 aa, Adalia bipunctata
MRQQASWYQCIIDVLKGKIESSKKMKDMIEELRSIHHRVDLPTVHLLKQKAVDKIRSLAAARKKLIKRQKWIEDNNTFNAEPSKLFQSQQQMTQKPPSPPEVEEFWKSIYEQRAETRDTPALLRFQQMCDQNQQQNDELSEISTEDIRQALKNKRDFTAPGLDGIQNYWWKRFPATHQHLARLFSRMLTRREPIPSWLVEGRTVLIPKSGDLGQPKNYRPITCLNTLYQILTSVIQHQILRVIGPVWDSIYEQRGAKKGVQGCKDNLLIDKSVCLDARYYKRDLHTSWLDYAKAYDTSPHELIIRLLKMLKVHPNIVHAIENIIALWKTKFAIRTEGRTVYTGWVRYRRGVFQGDSLSPLLFCITLIPLTIELRESKIGYKAGPPGRRNHLISHLLYMDDLKLYAPSESALRQLLNIVSDYTSAMGMSFGLDKCAVFHLRRGKAEDAGEDIRLEDGLTIRHLEDGETYKFLGMKQRGVLETTQIKDALTASYKKKLRDIWKSQLSGKNKVSATNMLAIPILTYSFGVVNWTVNELLDLDRSTRKTMNMNRSLHPNSSIQRIYLPRSQGGRGLQCLEYQHYQQTLEMAIRILRSEDPLLKFVAQHEIANHGAFLFRAAQRALEKLSITGVSINPDLAGTPITQADQRSLARLIRKSQSDTLLEHHMSKTLHSIYFRSLKDQDLSEELSFAFLKSASLKSETEGFVMACQDGVLNTRWYKKNIMKMDTPTTCRACHRQQETIMHILSACSVHAPSGYVERHNAALRILYFHLRAAYGIDKEPVLPYVPLEIEAVVQNDRARICWNYPVSTTRQINAVKPDILLLDKELKELFVVEFSSPAENNVVMKEEQKRQKYKDLMFELGTLYPGHKIRMVVLIIGCLGGMRANYVDELKIIPACRPLAEVLAHRMQKAVLLGSLHIIRSHEL

SEQ ID NO: 25897 - protein, 1434 aa, Adalia bipunctata
MSDKYIRSLGEQSLPGDRQGASGVGAGRDNMRDTNGRMLRRQAPAIQEAMPLDEEDIDEERVQVVGRIGIQRSKEQPVVGTGSRNRTAQRGRHKWTPEQHDLLSALYRRSRPERRGYMNRLHGLWCENYPELDYMTQQNLRDQISHLKRKGILWRSQEQERTKQQDGEQVTDASNQHQLLTIDTAEEQAVAMVRNVAGQTGTGTRSNRPITEHVRDVPRKEQGGEHVTDAPKQQHQAKASGARPRTEQISRIIRRGILWRSQEQERTEQQAEEQVTDASNQHQQLTIDTAEEQAVALVRNIAGQTGSSTRFNRPITEHVRDVPRIEHGEEQVTDAQNQQHQAIALGPRPRTEQVRDVPVIELAGEQVTDAPDQQHQAIALGPRPRTEQVRDVPVIGLAEEQVTDAPDQQQQKPGTVRDVPKLIVNTREAFEAAVRNPLVKTFRIKTRHEAEDLAVLDNIIQDHLNETCSLEDVVAAVRAAASLLCPPKSTATKEDKHKLRLRRLDTKIKSMRQQASWYQCIIDVLKGKIESSKKMKDMIEELRSIHHRVDLPTVHLLKQKAVDRIRSLAAARKKLIKRQKWIEDNNTFTAEPSKLFQSPQQKAQNPPSPQEVEEFWKSIYEQRAETRDTPALLRFQQMCDQNQQQNDELCEISTEDIRQALKNKRDFTAPGLDGIQNYWWKRFPATHQHLARLFSGVLTRREPIPSWLVEGRTVLIPKSGDLGQPKNYRPITCLNTLYKILTSVIQHQILRVIGPVWDSIYEQRGAKKGVQGCKDNLLIDKSVCLDARYYKRDLHTSWLDYAKAYDTSPHELIIRLLKMLKVHPNIIHAIENIIALWKTKFAIRAEGQTVYTGWVRYRRGVFQGDSLSPLLFCITLIPLTIELRESKIGYKAGPPGRRNHLISHLLYMDDLKLYAFSESALRQLLNIVSDYTSAMGMSFGLDKCAVFHLRRGKAEDAGEDIRLEDGMTIRHLEEGETYKFLGMKQRGVLETTQIKDALTASYKKKLRDIWKSQLSGKNKVSATNMLAIPILTYSFGVVNWTVNELLDLDRSTRKTMNMNRSLHPNSSIQRIYLPRSQGGRGLQCLEYQHYQQTLEMAVRILRSEDPLLKFVAQHEIANHGAFLFRAAQRAVEKLSITGVSINPELAGTPITQAEQRSLARLIRKSQADKLLEHHMSKNLHSIYFRSLKDQDLSEELSFAFLKSASLKSETEGFVMACQDGVLNTRWYKKNIMKMDTPTTCRACHGQQETIMHILSACRVHAPSGYVERHNAALRILYFHLRAAYEIDKEPVLPYVPLEIEAVVQNERARICWNYPVSTTRQINAVKPDILLLDKELKELFVVEFSSPAENNVVMKEEQKRQKYKDLMFELGTLYPGHKVRMVVLIIGCLGGMRANYVDELKIIPACRSLAEVLAHRMQKAVLLGSLHIIRSHEV

SEQ ID NO: 25898 - protein, 924 aa, Coccinella septempunctata
MRQQASWYQCVIDVLTGKTKPSKRMREMIEELRAIHGTVNLPTVHLLKQKAVDKIRSLAAARKKLIRRKRWIEDNNTFTAEPSKLFQPQQQEVQNPPSPQDVEEFWKSLYEQPAKTRDTPALPRFQQMCDQTLQQNDELSEISPEDIRQALKNKNDFTAPGPDGIQNYWWKSFPATHKHLARLFSGMLIRREPIPSWLVEGRTVLIPKSGDLGQPKNYRPITCLNTLYKIFTSVIQDRILRVIGPVWDSIYEQRGAKKGVQGCKDNLLIDKSVCLDARHYKRDLHTSWLDYAKAFDTSPHDLIIRLLKMLKVHPNIIHAIESIIALWKTKFAIRAEGRTVCTGWVRYRRGVFQGDSLSPLLFCITLMPLSIELRASKIGYKAGPPGRRNHLISHLMYVDDLKLYAPSRTALQQLLNIVSDYTSAMGMSFGLDKCAVFHLRRGRVDDPGEDIQLEDGMTFRRLEEGETYKFLGMKQRGVLETTQIKDALSASYKKKLRDIWKSQLSGKNKVSATNMLAIPILTYSFGVVNWTVNELLDLDRSTRKTMNMNRSLHPNSSIQRIYLPRSQGGRGLQCLEYQHYQQTLETAVRVLRSEDPLLKFVAQHELANHGAFLFRAAQRALEKLGITGVSIDPERAGAPITQADQRRLARLIRKSQSNTLLEHHMSKSLHSIFFRSLKDQDLSEELSFAFLKSASLKSETEGFVMACQDGVINTRWYKKNIMKMDTPTTCRACHSQQETIMHILSACRVHAPSGYIERHNAALRVLYFHLRAAYEIDKEPVLPYVPLEIEAVVQNEKARIYWNYPVPTTRQINAIKPDILLLDKELKELFVVEFSSPAENNMVMKEEQKRQKYKDLVFELGTMYPGHKVKMVVLIIGCLGGMRANYVEELKIIPACRSRAEILAHRMQKAVLLGSLHIVRSHEL

SEQ ID NO: 25899 - protein, 1416 aa, Adalia bipunctata
MPLDEEDIDEERVQVVGRIGIQRSKEQPVVGTGSRNRTAQRGRHKWTPEQHDLLSALYKRSRPERRGYMNRLHGLWCENYPDLDYMTQQNLRDQISHLKRKGILWRSQEQERTKQQDEEQVTDASNQHQPLTIDTAEEQAVAMVRNIAGQTGTGTRSNRPITEHVRDVPKIEHGEEQVTDAQNQQHQAIALGPRPRTEQVRDVPVIGLVEEQVTDAPKQQHQAKALGARPRTEQISRVIRRGILWRSQEQERTEQQAEEQVTDASNQHQQLTIDTAEEQAVALVGNIASQTRSGTRFNRPITEHVRDVPKIEHGEEQVTDAQNQQHQAIALGPRPRTEQVRDVPVIGLVEEQVTDAPEQQHQAIALGPRPRTEQVRDVPVIGLAGEQVTDAPDQQQQKPGTVRDVPKLIVNTREAFEAAVRNPLVKTSRIKTRHEAEDLAVLDNIIQDHLNETCSLEDVVAAVRAAASLLCPPKSTATKEDKHKLRLRRLDTKIKSMRQQASWYQCIIDVLKGKIESSKKMKELRSIHHRVDLPTVHLLKQKAVDKIRSLAAARKKLIKRQKWIEDNNTFNAEPSKLFQSQQQMTQKPPSPPEVEEFWKSIYEQRAETRDTPALLRFQQMCDQNQQQNDELSEISTEDIRQALKNKRDFTAPGLDGIQNYWWKRFPATHQHLARLFSRMLTRREPIPSWLVEGRTVLIPKSGDLGQPKNYRPITCLNTLYKILTSVIQHQILRVIGPVWDSIYEQRGAKKGVQGCKDNLLIDKSVCLDARYYKRDLHTSWLDYAKAYDTSPHELIIRLLKMLKVHPNIVHAIENIIALWKTKFAIRTEGRTVYTGWVRYRRGVFQGDSLSPLLFCITLIPLTIELRESKIGYKAGPPGRRNHLISHLLYMDDLKLYAPSESALRQLLNIVSDYTSAMGMAFGLDKCAVFHLRRGKAEDAGEDIRLEDGMTFRHLEDGETYKFLGMKQRGVLEITQIKDALTASYKKKLRDIWKSQLSGKNKVSATNMLAIPILTYSFGVVNWTVNELLDLDRSTRKTMNMNRSLHPNSSIQRIYLPRSQGGRGLQCLEYQHYQQTLEMAVRILRSEDPLLKFVVQHEIANHGAFLFRAAQRAVEKLSITGVSINPELAGTPITQAEQRSLARLIRKSQADKLLEHHMSKNLHSIYFRSLKDQDLSEELSFAFLKSASLKSETEGFVMACQDGVLNTRWYKKNIMKMDTPTTCRACHRQQETIMHILSACRVHAPSGYVERHNAALRILYFHLRAAYEIDKEPVLPYVPLEIEAVVQNERARICWNYPVSTTRQINAIKPDILLLDKELKELFVVEFSSPAENNVVMKEEQKRQKYKDLMFELGTLYPGHKVRMVVLIIGCLGGMRANYVDELKIIPACRSLAEVLAHRMQKAVLLGSLHIIRSHEL

SEQ ID NO: 25900 - protein, 924 aa, Adalia bipunctata
MRQQASWYQCIIDVLKGKIGSSKKMKDMIEELRSIHHRVDLPTVHLLKQKAVDKIRSLTAARKKLIKRQKWIEDNHTFNAEPSKLFQSQQQMTQKPPSPPEVEEFWKSIYEQRPETRDTPALLRFQQMCDQNQQQNDELSEISTEDIKQALKNKRDFTAPGLDGIQNYWWKRFPATHQHLARLFSGMLTRREPIPSWLVEGRTVLIPKSGDLGQPKNYRPITCLNTLYKILTSVIQHQILRVIGPVWDSIYEQRGAKKGVQGCKDNLLIDKSVCLDARFYKRDLHTSWLDYAKAYDTSPHELIIRLLKMLKVHPNIIHAIENIIALWKTKFAIRTEGRTVYTGWVRYRRGVFQGDSLSPLLFCITLIPLTIELRESKIGYKAGPPGRRNHLISHLLYMDDLKLYAPSESALRQLLNIVSDYTSAMGMSFGLDKCAVFHLRRGKAEDAGEDIRLEDGMIIRHLEDGETYKFLGMKQRGVLETTQIKDALTASYKKKLRDIWKSQLSGKNKVSATNMLAIPILTYSFGVVNWTVNELLDLDRSTRKTMNMNRSLHPNSSIQRIYLPRSQGGRGLQCLEYQHYQQTLEMAVRVLRSEDPLLKFVAQHEIANHGAFLFRAAQRALEKLSITGVPINPELAGAPITQAEQRSLARLIRKSQADKLLEHHMSKTLHSIYFRSLKDQDLSEELSFAFLKSASLKSETEGFVMACQDGVLNTRWYKKNIMKMDTPTTCRACHRQQETIMHILSACSVHAPSGYVERHNAALRILYFHLRAAYGIDKEPVLPYVPLEVEAVVQNERARICWNYTVSTTRQINAVKPDILLLDKELKELFVVEFSSPAENNVVMKEEQKRQKYKDLMFELGTLYPGHKVRMVVLIIGCLGGMRANYVDELKIIPACRSLAEVLAHRMQKAVLLGSLHIIRSHEL

SEQ ID NO: 25901 - protein, 1369 aa, Adalia bipunctata
MRDTNGRMLRRQAPAIQEAMPSDEEDIDEERVQVVGRIGIQRSKEQPVVGNGSRNRTAQRGRHKWTPEQHNLLSALYRRSRPERRGYMNRLHGLWCENYPDLDFMTQQNLRDQISHLKRRGIIWRSQEQERMEQQAEEQVTDASSQHQQLTIDTTEEQAAALVRNIAGRTGTGIRSNRPIREHVRDVLEIENGGEQVTDAPNQQHQAIALGTRPRTEQVRDVPEIEHGEEQVTDAPNQQHQEIALGTRPRAEHVRDASEIEHGKEQVTDAPNQQHRAITPGARPRAGQVRDVPEIEHGEEQVTDAPNQQHQGIALGARPRAEQVRDVPEIEHAEEQVTDAPDQQQQMPRTVKDVPKLIVNTREAFEAAVRNPLVKATRIKTRHKAEDLAVLDKIIQDHLNETCSLEDVVAAVRAASSLLCPPKSTATNNDKHRLRLSRLDIKIKSMRQQASWYQCIIDVLKGKIKSSKKMKDMIEELRSIHRTVDLPTIHLLKQKAVDRIRSLAAARKKLIKRQKWIEDNNTFTAEPSKLFQSPQQKAQNPPSPQEVEEFWKSLYEQQAEIRDTPALLRFQQMCDQNQQRNDEPSEISTEDIRQALKNKRDFTAPGLDGIQNYWWKQFPATHQHLARLFSGMLTRREPIPSWLVEGRTVLIPKSGDLGQPKNYRPITCLNTLYKILTSVIQDQILRVIGPVWNSIYEQRGAKKGVQGCKDNLLIDKSVCLDARHYKRDLHTSWLDYAKAYDTTPHELIVRLLKMLKVYPNIIHAIENIIALWKTKFAIRAEGRTVYTGWVRYRRGVFQGDSLSPLLFCITLIPLTIELRESKIGYKAGPPGRRNHLISHLLYMDDLKLYAPSESALRQLLNIVSDYTSAMGMSFGLDKCAVFHLRRGKAEDAGEDIRLEDGMTFRHLEDGETYKFLGMKQRGVLETTQIKDALTASYKKKLRDIWKSQLSGKNKVSATNMLAIPILTYSFGVVNWTVNELLDLDRSTRKTMNMNRSLHPNSSIQRIYLPRSQGGRGLQCLEYQHYQQTLEMAVRILRSEDPLLKFVAQHEIANHGAFLYRAAQRAVEKLSITGVSINPELAGTPITQAEQRSLARLIRKSQADKLLEHHMSKNLHSIYFRSLKDQDLSEELSFAFLKSASLKSETEGFVMACQDGVLNTRWYKKNIMKMDTPTTCRACHRQQETIMHILSACRVHAPSGYVERHNAALRILYFHLRAAYEIDKEPVLPYVPLEIEAVVQNERARICWNYPVSTTRQINAIKPDILLLDKELKELFVVEFSSPAENNVVMKEEQKRQKYKDLMFELGTLYPGHKVRMVVLIIGCLGGMRANYVDELKIIPACRSLAELLAHRMQKAVLLGSLHIIRSHEL

SEQ ID NO: 25902 - protein, 1302 aa, Coccinella septempunctata
MSERNQLSLGKQSLPGDRQGTSGVGAGRDSMRDTNGRTLRRRAPATQKATPLDEEDIDEERVQVVGRIGIQSSQEHPVVGTGSRNRTAQRGRHKWTPEQHSLLSALYRRSGPDRRGYMIRLHGLWCENCPDLNYMTQQNLRDQISHLKRRGILQRSQEQGRLEQQAEEQVTDALSQHQQLTVDITQEQAVALLSDIAGRTRTGTRSNRPTTEHVRDVPDIERAEEQVTDAPGQQHQAMTHRGEAVALEARPRTEQVREVPEIELAGEQVTDAPDRQQQRPRTVRDSSELIDNTKEAFEAAVRDPLIKPTRIKSRHKAEDLAVLNSIIQDHLNETCSLEEVEAAVRAAAYLLCPPKSTAANNNNKHRKRLNQLDIKIKSMRQQASWYQCVIDVLKGETKPSKRMKEMIEELRATHDTVNLPTVHLLKQKAVDKIRSLAAARKKLIRRKRWIEDNNTFNAEPSKLFQPQQQEVQNPPSPQDVEEFWKSLYEQPAKTRDTPALPRFQQMCDQTLQQNDELSEISAEDIRQALKNKNDFTAPGPDGIQNYWWKSFPATHKHLARLFSGMLIRREPIPSWLVEGRTVLIPKSGDLGQPKNYRPITCLNTLYKILTSVIQDRILRVIGPVWDSIYEQRGAKKGVQGCKDNLLIDKSVCLDARHYKRDLHTSWLDYAKAFDTSKHDLIIRLLKMLKVHPNIIHAIESIIALWKTKFAIRAEGRTVYTGWVRYRRGVFQGDSLSPLLFCITLMPLSIELRASKIGYKAGPPGRRNHLISHLMYVDDMKLYAPSRTALQQLLNIVSDYTSAMGMSFGLDKCAVFHLRRGRVDDPAEDIQLEDGMTFRCLEEGETYKFLGMKQRGVLETTQIKDALSASYKKKLRDIWKSQLSGKNKVSATNMLAIPILTYSFGVVNWTVNELLDLDRSTRKTMNMNRSLHPNSSIQRIYLPRSQDGRGLQCLEYQHYQQTLETAVRVLRSEDPLLKFVAQHELANHGAFLFRAVQRALEKLGITGVSIDPERAGAPITQADQRRLARLIRKSQSNTLLEHHMSKSLHSIFFRSLKDQDLSEELSFAFLKSASLKSETEGFVMACQDGVINTRWYKKNIMKMDTPTTCRACHSQQETIMHILSACRVHAPSGYIERHNAALRVLYFHLRAAYEIDKEPVLPYVPLEIEAVVQNEKARIYWNYPVSTTRQINAIKPDILLLDKELKELFVVEFSSPAENNIVMKEEQKRQKYKDLVFELGTMYPGHKVRMVVLIIGCLGGMRANYVEELKIIPACRSWAEILAHRMQKAVLLGSLHVIRSHEL

SEQ ID NO: 25903 - protein, 1303 aa, Coccinella septempunctata
MSERNQLSLGKQSLPGDRQGTSGVGAGRDSMRDTNGRTLRRRAPATQKATPLDEEDIDEERVQVVGRIGIQSSQEHPVVGTGSRNRTAQRGRHKWTPEQHSLLSALYRRSGPDRRGYMNRLHGLWCENCPDLNYMTQQNLRDQISHLKRRGILQRSREQGRLEQQAEEQVTDALSQHQQLTVDITQEQAVALLSDIAGRTRTGTRPNRPITEHVRDVPDIERAEEQVTDAPDQQHQAMTHRSEAAALEARPRTEQVREVPEIELAGEQVTDAPDRQQQRPRTVRDSSELVDNTKEAFEAAVGDPLIKPTRIKSRHKAEDLAVLNSIIQDHLNETCSLEEVEAAVRAAAYLLCPPKSTAANNNNNKHRKRLNRLDIKIKSMRQQASWYQCVIDVMKGKTKPSKRMREMIEELRAIHGTVNLPTVHLLKQKAVDKIRSLAAARKKLIRRKRWIEDNNTFTAEPSKLFQPQQQEVQNPPSPQDVEEFWKSLYEQPAKTRDTPALPRFQQMCDQTLQQNDELSEISAEDIRQALKNKNDFTAPGPDGIQNYWWKSFRATHKHLARLFSGMLIRREPIPSWLVEGRTVLVPKSGDLGQPKNYRPITCLNTLYKILTSVIQDRILRVIGPVWDSIYEQRGAKKGVQGCKDNLLIDKSVCLDARHYKRDLHTSWLDYAKAFDTSPHDLIIRLLKMLKVHPNIIHVIESIIALWKTKFAIRAEGRTVYTGWVRYRRGVFQGDSLSPLLFCITLMPLSIELRASRIGYKAGPPGRRNHLISHLMYVDDLKLYAPSRTALQQLLNIVSEYTSAVGMSFGLDKCAVFHLRRGRVDDPGEDIQLEDGMTFRRLEDGETYKFLGMKQRGVLETTQIKDALSASYKKKLRDIWKSQLSGKNKVSATNMLAIPILTYSFGVVNWTVNELLDLDRSTRKTMNMNRSLHPNSSIQRIYLPRSQGGRGLQCLEYQHYQQTLETAVRVLRSEDPLLKFVAQHELANHGAFLFRAAQRALEKLGITGVSIDPERAGAPITQADQRRLARLIRKSQSNTLLEHHMSKSLHSIFFRSLKDQDLSEELSFAFLKSASLKSETEGFVMACQDGVINTRWYKKNIMKMDTPTTCRACHSQQETIMHILSACRVHAPSGYIERHNAALRVLYFHLRAAYEIDKEPVLPYVPLEIEAVVQNEKARIYWNYPVSTTRQINAIKPDILLLDKELKELFVVEFSSPAENNMVMKEEQKRQKYKDLVFELGTMYPGHKVRMVVLIIGCLGGMRANYVEELKIIPACRSWAEILAHRMQKAVLLGSLHIIRSHEL

SEQ ID NO: 25904 - protein, 1023 aa, Adalia bipunctata
MPRTVTDVPKLIVNTREAFEAAVRNPHVKATRIKTRQKAEDLAVLDKMIQDHLNETCSLEDVVAAVRAASSLLCPPKSTATNNDKHRLRLSRLDIKIKSMRQQASWYQCIIDVLKGKIKSSKKMKDMIEELRSIHRTVDLPTVHLLKQKAVDRIRSLAAARKKLIKRQKWIEDNNTFTAEPSKLFQSPQQKAQNPPSPQEVEEFWKSLYEQQAEIRDTPALLRFQQMCDQNQQQNDEPSEISTEDIRHALKNKRDFTAPGLDGIQNYWWKKFPATHQHLARLFSGMLTSREPIPSWLVEGRTVLIPKSGDLGQPKNYRPITCLNTLYKILTSVIQDQILRVIGPVWNSIYEQRGAKKGVQGCKDNLLIDKSVCLDARHYKRDLHTSWLDYAKAYDTTPHELIVRLLKMLKVYPNIIHAIENIIALWKTKFAIRAEGRTVYTGWVRYRRGVFQGDSLSPLLFCITLIPLTIELRESKIGYKAGPPGRRNHLISHLLYMDDLKLYAPSESTLRQLLNIVSDYTSAMGMSFGLDKCAVFHLRRGKAEDAGEDIRLEDGMTFRHLEDGETYKFLGMKQRGVLETTQIKDALTASYKKKLRDIWKSQLSGKNKVSATNMLAIPILTYSFGVVNWTVNELLDLDRSTRKTMNMNRSLHPNSSIQRIYLPRSQGGRGLQCLEYQHYQQTLEIAVRILRSEDPLLKFVAQHEIANHGAFLFRAAQRAVEKLSITGVSINPELAGTPITQAEQRSLARLIRKSQADKLLEHHMSKNLHSIYFRSLKDQDLSEELSFAFLKSASLKSETEGFVMACQDGVLNTRWYKKNIMKMDTTTTCRACHRQQETIMHILSACRVHAPSGYVERHNAALRILYFHLRAAYEIDKEPVLPYVPLEIEAVVQNERARICWNYPVSTTRQINAVKPDILLLDKELKELFVVEFSSPAENNVVMKEEQKRQKYKDLMFELGTLYPGHKVRMVVLIIGCLGGMRANYVDELKIIPACRSLAEVLAHRMQKAVLLGSLHIIRSHEL

SEQ ID NO: 25905 - protein, 1435 aa, Adalia bipunctata
MSDKFIRSLGEQSLPGDRQGASGVGAGRDSMRDTNGRMLRRQAPAIQEAMPLDEEDIDEERVQVVGRIGIQRSKEQPVVGTGSRNRTAQRGRHKWTPEQHDLLSALYRRSRPERRGYMNRLHGLWCENYPDLDYMTQQNLRDQISHLKRKGILWRSQEQERTEQQDGEQVTDASNQHQLLTIDTAEEQAVAMVRNVAGQTTGAGTRSNRPITEHVRDVPRTEQGGEHVTDAPKQQHQAKASGARPRTEQISRIIRRGILWRSQEQERTEQQAEEQVTDASNQHQQLTIDTAEEQAVALVRHIAGQTGSITRFNRPITEHVRDVPKIEHGEEQVTDAQNQQHQAIALGPRPRTEQVRDVPVIELAGEQVTDAPDQRHQAIALGPRPRTEQVRDVPVIGLAEEQVTDAPDQQQQKPGTVRDVPKLIVNTREAFEAAVRNPLVKIFRMKTRHEAEDLAVLDNIIQDHLNETCSLEDVVAAVRAAASLLCPPKSTATKEDKHKLRLRRLDTKIKSMRQQASWYQCIIDVLKGKIGSSKKMKDMIEELRSIHHRVDLPTVHLLKQKAVDKIRSLTAARKKLIKRQKWIEDNNTFNAEPSKLFQSQQQMTQKPPSPPEVEEFWKSIYEQRPETRDTPALLRFQQMCDQNQQQNDELSEISTEDIKQALKNKRDFTAPGLDGIQNYWWKRFPATHQHLARLFSGMLTRREPIPSWLVEGRTVLIPKSGDLGQPKNYRPITCLNTLYKILTSVIQHQILRVIGPVWDSIYEQRGAKKGVQGCKDNLLIDKSVCLDARFYKRDLHTSWLDYAKAYDTSPHELIIRLLKMLKVHHNIIHAIENIIALWKTKFAIRTEGRTVYTGWVRYRRGVFQGDSLSPLLFCITLIPLTIELRESKIGYKAGPPGRRNYLISHLLYMDDLKLYAPSESALRQLLNIVSDYTSAMGMTFGLDKCAVFHLRRGKSEDAGEDIRLEDGMIIRHLEDGETYKFLGMKQRGVLETTRIKDALTASYKKKLRDIWKSQLSGKNKVSATNMLAIPILTYSFGVVNWTVNELLDLDRSTRKTMNMNRSLHPNSSIQRIYLPRSQGGRGLQCLEYQHYQQTLEMAVRVLRSEDPLLKFVAQHEIANHGAFLFRAAQRALEKLSITGVSINPELAGAPITQADQRSLARLIRKSQSDTLLEHHMSKTLHSIYFRSLKDQDLSEELSFAFLKSASLKSETEGFVMACQDGVLNTRWYKKNIMKMDTPTTCRACHRQQETIMHILSACSVHAPSGYVERHNAALRILYFHLRAAYGIDKEPVLPYVPLEIEAVVQNERARICWNYPVSTTRQINAVKPDILLLDKELKELFVVEFSSPAENNVVMKEEQKRQKYKDLMFELGTLYPGHKVRMVVLIIGCLGGMRANYVDELKIIPACRSLAEVLAHRMQKAVLLGSLHIIRSHEL

SEQ ID NO: 25906 - protein, 1584 aa, Adalia bipunctata
MSKITSDPIAHSYNTRSKMNSLIVPRCDKTVGQRCCDYLAPKLFSQLSPEIKKINGISLFRKMLIIIIIIIIIIYLTARGHYCVVYGCDNPADPGHSQPMSDKYIRSLGEQSLPGDRQGASGVGAGRDSMRDTNGRMLRRQAPAIQEAMPLDEEDIDEERVQVVGRIGIQRSKEQPVVGTGSRNRTAQRGRHKWTPEQHDLLSALYRRSRPERRGYMNRLHGLWCENYPDLDYMTQQNLRDQISHLKRKGISWRSQEQERTEQQDGEQVTDASNQHQLLTIDTAEEQAVAMVRNVAGQIGTGTRSNRPITEHVRDVPRKEQGGEHVTDAPKQQHQAKASGARPRTEQISRIIRRGILWRSQEQERTEQQAEEQVTDASNQHQQLTIDTAEEQAVAMVRNVAGQIGTGTRSNRPITEHVRDVPRKEQGGEHVTDAPKQQHQAKASGARPRNIAGQTGSSTRFNRPMTEHVRDVPRIEHGEEQVTDAQNQQHQDIALGPRPITEQVRDVPVIELAGEQVTDAPDQQHQAIALGPRPRTEQVRDVPVIGLAEEQVTYAPDQQQQKPGTVRDVPKLIVNTREAFEAAVRNPLVKTFRIKTKHEAEDLAVLDNIIQDHLNETCSLEDVVAAVRAAASLLCPPKSTATKEDKHKLRLRRLDTKIKSMRQHASWYQCIIDVLKGKIESSKKMKDMIEELRSIHHRVDLPTVHLLKQKAVDRIRSLAAARKKLIKRQKWIEDNNTFTAEPSKLFQSPQQKAQNPPSPQEVEEFWKSIYEQRAETRDTPALLRFQQMCDQNQQQNDELCEISTEDIRQALKNKRDFTAPGLDGIQNYWWKRFPATHQHLARLFSGVLTRREPIPSWLVEGRTVLIPKSGDLGQPKNYRPITCLNTLYKILTSVIQHQILRVIGPVWDSIYEQRGAKKGVQGCKDNLLIDKSVCLDARYYKRDLHTSWLDYAKAYDTSPHELIIRLLKMLKVHPNIIHAIENIIALWKTKFAIRTEGRTVYTGWVRYRRGVFQGDSLSPLLFCITLIPLTIALRESKIGYKAGPPGRRNHLISHLLYMDDLKLYAPSESALRQLLNIVSDYTSAMGMSFGLDKCAVFHLRRGKAEDAGEDIRLEDGMTIRHLEEGETYKFLGMKQRGVLETTQIKDALTASYKKKLREIWKSQLSGKNKVSATNMLAIPILTYSFGVVNWTVNELLDLDRSTRKTMNMNRSLHPNSSIQRIYLPRSQGGRGLQCLEYQHYQQTLEMAVRILRSEDPLLKFVAQHEIANHGAFLFRAAQRAVEKLSITGVSISPELAGTPITQAEQRSLARLIRKSQADKLLEHHMSKNLHSIYFRSLKDQDLSEELSFAFLKSASLKSETEGFVMACQDGVLNTRWYKKNIMKMDTPTTCRACHGQQETIMHILSACRVHAPSGYVERHNAALRILYFHLRAAYEIDKEPVLPYVPLEIEAVVQNERARICWNYPVSTTRQINAVKPDILLLDKELKELFVVEFSSPAENNVVMKEEQKRQKYKDLMFELGTLYPGHKVRMVVLIIGCLGGMRANYVDELKIIPACRSLAEVLAHRMQKAVLLGSLHIIRSHEV

SEQ ID NO: 25907 - protein, 924 aa, Coccinella septempunctata
MRQQASWYQCVIDVMKGKTKPSKRMREMIEELRAIHGTVNLPTVHLLRQKAVDKIRSLAAARKKLIRRKRWIEDNNTFTAEPSKLFQPQQQEVQNPPSPQDVEEFWKSMYEQPAKTRDTPALPRFQQMCDQTLQQNDELSEISAEDIRQALKNKNDFTAPGPDGIQNYWWKSFPATHKHLARLFSGMLIRREPTPSWLVEGRTVLIPKSGDLGQPKNYRPITCLNTLYKILTSVIQDRILRVIGPVWDSIYEQRGAKKGVQGCKDNLLIDKSVCLDARHYKRDLHTSWLDYAKAFDTSPHDLIIRLLKMLKVHPNIIHAIESIIALWKTKFAIRAEGRTVYTGWVRYRRGVFQGDSLSPLLFCITLMPLSIELRASKIGYKAGPPGRRNRLISHLMYVDDLKLYAPSRTALQQLLNIVSEYTSAMGMSFGLDKCAVFHLRRGRVDDPGEDIQLEGGMTFRRLEDGETYKFLGMKQRGVLETTQIKDALSASYKKKLRDIWKSQLSGKNKITATNMLAIPTLTYSFGVVNWTVNELLDLDRSTRKTMNMNRSLHPNSSIQRIYLPRSQGGRGLQCLEYQHHQQTLETAVRVLRSEDPLLKFVAQHELANHGAFLFRAAQRALEKLSITGVSTDPERAGAPITQADQRRLARLIRKSQSNTLLEHHMSKSLHSIFFRSLKDQDLSEELSFAFLKSASLKSETEGFVMACQDGVINTRWYKKNIMKMDTPTTCRACHSQQETIMHILSACRVHAPSGYIERHNAALRVLYFHLRAAYEIDKEPVLPYVPLEIEAVVQNEKARIYWNYPVSTTRQINAIKPDILLLDKELKELFVVEFSSPAENNMVMKEEQKRQKYKDLVFELGTMYPGHKVRMVVLIIGCLGGMRANYVEELKIIPACRSWAEILAHRMQKAVLLGSLHIIRSHEL

SEQ ID NO: 25908 - protein, 1464 aa, Adalia bipunctata
MRNNNNNPARGYYCVVYGCDNPADPGHSQPMSDIFIRSLGEQSLPGDRQGASGVGAGRDSMRDTNGRMLRRQAPAIQEAMPLDEEDIDEERVQVVGRIGIQRSKEQPVVGTGSRNRTAQRGRHKWTPEQHDLLSALYRRSRPERRGYMNRLHGLWCENYPDLDYMTQQNLRDQISHLKRKGILWRSQEQERTEQQDGEQVTDASNQHQLLTIDTAEEQAVAMVRNVAGQTGTGTRSNRPITEHVRDVPRKEQGGEHVTDAPKQQHQAKASGARPRTEQISRIIRRGILWRSQEQERTEQQAEEQVTDASNQHQQLTIDTAEEQAVALVRHIAGQTGSITRFNRPITEHVRDVPKIEHGEEQVTDAQNQQHQAIALGPRPRTEQVRDVPVIELAGEQVTDAPDQRHQAIALGPRPRTEQVRDVPVIGLAEEQVTDAPDQQQQKPGTVRDVPKLIVNTREAFEAAVRNPLVKIFRMKTRHEAEDLAVLDNIIQDHLNENCSLEDVVAAVRAAASLLCPPKSTATKEDKHKLRLRRLDTKIKSMRQQASWYQCIIDVLKGKIGSSKKMKDMIEELRSIHHRVDLPTVHLLKQKAVDKIRSLTAARKKLIKRQKWIEDNNTFNAEPSKLFQSQQQMTQKPPSPPEVEEFWKSIYEQRPETRDTPALLRFQQMCDQNQQQNDEVSEISTEDIKQALKNKRDFTAPGLDGIQNYWWKRFPATHQHLARLFSGMLTRREPIPSWLVEGRTVLIPKSGDLGQPKNYRPITCLNTLYKILTSVIQHQILRVIGPVWDSIYEQRGAKKGVQGCKDNLLIDKSVCLDARFYKRDLHTSWLDYAKAYDTSPHELIIRLLKMLKVHPNIIHAIENIIALWKTKFAIRTEGRTVYTGWVRYRRGVFQGDSLSPLLFCITLIPLTIELRESKIGYKAGPPGRRNHLISHLLYMDDLKLYAPSESALRQLLNIVSDYTSAMGMSFGLDKCAVFHLRRGKAEDAGEDIRLEDGMIIRHLEDGETYKFLGMKQRGVLETTRIKDALTASYKKKLRDIWKSQLSGKNKVSATNMLAIPILTYSFGVVNWTVNELLDLDRSTRKTMNMNRSLHPNSSIQRIYLPRSQGGRGLQCLEYQHYQQTLEMAVRVLRSEDPLLKFVAQHEIANHGAFLFRAAQRALEKLSITGVSINPELAGAPITQADQRSLARLIRKSQSDTLLEHHMSKTLHSIYFRSLKDQDLSEELSFAFLKSASLKSETEGFVMACQDGVLNTRWYKKNIMKMDTPTTCRACHRQQETIMHILSACSVHAPSGYVERHNAALRILYFHLRAAYGIDKEPVLAYVPLEIEAVVQNERARICWNYPVSTTRQINAVKPDILLLDKELKELFVVEFSSPAENNVVMKEEQKRQKYKDLMFELGTLYPGHKVRMVVLIIGCLGGMRANYVDELKIIPACRSLAEVLAHRMQKAVLLGSLHIIRSHEL

SEQ ID NO: 25909 - protein, 1469 aa, Adalia bipunctata
MSDKYIRSLGEQSLPGDRQGASGVGAGRDSMRDTNGRMLRRQAPAIQEAMPLDEEDIDEERVQVVGRIGIQRSKEQPVVGTGSRNRTAQRGRHKWTPEQHDLLSALYRRSRPERRGYMNRLHGLWCENYPDLDYMTQQNLRDQISHLKRKGILWRSQEQERTEQQDGEQVTDASNQHQLLTIDTAEEQAVAMVRNIAGQTGTGTRSNRPITEHVRDVSRKEQGGEHVTDAPKQQHQAKALGARPRTEQISRVIRRGILWRSQEQERTEKQAEEQVTDASNQHQQLTIDTAEEQAVALVRNIAGQTGSSTRFNRPITEHVRDVPKIEHGGEQVTDAQNQQHQAIALGPRPRTEQVRDFPVIGLAEEQVTDAPDQQHQAKAQGPRLRTEQVGDVPVIGLAEEQVTDAPDQQHQAKAQGPRPRTEQVRDVPVIGLAEEQVTDAPDQQQQKPGTVRDIPKLIVNTREAFEAAVRNPLVKTSRIKTRHEAEDLAVLDNIIQDHLNETCSLEEVVAAVRAAASLLCPPKSTATKEDKHKLRLRRLDTKIKSMRQQASWYQCIIDVLKGKIESSKKMKDMIEELRSIHHRVDLPTVHLLKQKAVDRIRSLAAARKKLIKRQKWIEDNNTFNAEPSKLFQSQQQMTQKPPSPPEVEEFWKSIYEQRAETRDTPALLRFQQMCDQNQQQNDELSEISTEDIRQALKNKRDFTAPGLDGIQNYWWKRFPATHQHLARLFSGMLTRREPIPSWLVEGRTVLIPKSGDLGQPKNYRPITCLNTLYKILTSVIQHQILRVIGPVWDSIYEQRGAKKGVQGCKDNLLIDKSVCLDARYYKRDLHTSWLDYAKAYDTSPHELIIRLLKMLKVHPNIIQAIENIIALWKTKFAIRTEGRTVYTGWVRYRRGVFQGDSLSPLLFCITLIPLTIELRESKIGYKAGPPGRRNHLISHLLYMDDLKLYAPSESALRQLLNIVSDYTSAMGMSFGLDKCAVFHLRRGKAEDAGEDIRLEDGMTIRHLEDGEAYKFLGMKQRGVLETTQIKDPLTASYKKKLRDIWKSQLSGNNKVSATNMLAIPILTYSFGVVNWTVNELLDLDRSTRKTMNMNRSLHPNSSIQRIYLPRSQGGRGLQCLEYQHYQQTLEMAVRILRSEDPLLKFVAQHEIANHGAFLFRAAQRAVEKLSITGVSINPELAGTPITQAEQRSLARLIRKSQADKLLEHHMSKNLHSIYFRSLKDQDLSEELSFAFLKSASLKSETEGFVMACQDGVLNTRWYKKNIMKMDTPTTCRACHRQQETIMHILSACRVHAPSGYVERHNAALRILYFHLRAAYEIDKEPVLPYVPLEIEAVVQNERARICWNYPVSTTRQINAVKPDILLLDKELKELFVVEFSSPAENNVVMKEEQKRQKYKDLMFELGTLYPGHKVRMVVLIIGCLGGMRANYVDELKIIPACRPLAEVLAHRMQKAVLLGSLHIIRSHEV

SEQ ID NO: 25910 - protein, 1303 aa, Coccinella septempunctata
MSERNQLSLGKQSLPGDRQGTSGVGAGRDSMRDTNGRTLRRRAPATQKATPLDEEDIDEERVQVVGRIGIQSSQEHPVVGTGSRNRTAQRGRHKWTPEQHSLLSALYRRSGPDRRGYMNRLHGLWCENCPDLNYMTQQNLRDQISHLKRRGILQRSREQGRLEQQAEEQVTDALSQHQQLTVDITQEQAVALLSDIAGRTRTGTRPNRPITEHVRDVPDIERAEEQVTDAPDQQHQAMTHRSEAAALEARPRTEQVREVPEIELAGEQVTDAPDRQQQRPRTVRDSSELVDNTKEAFEAAVGDPLIKPTRIKSRHKAEDLAVLNSIIQDHLNETCSLEEVEAAVRAAAYLLCPPKSTAANNNNNKHRKRLNRLDIKIKSMRQQASWYQCVIDVMKGKTKPSKRMREMIEELRAIHGTVNLPTVHLLKQKAVDKIRSLAAARKKLIGRKRWIEDNNTFTAEPSKLFQPQQQEVQNPPSPQDVEEFWKSLYEQPAKTRDTPALPRFQQMCDQTLQQNDELSEISAEDIRQALKNKNDFTAPGPDGIQNYWWKSFPATHKHLARLFSGMLIRREPIPSWLVEGRTVLIPKSGDLGQPKNYRPITCLNTLYKILTSVIQDRILRVIGPVWDSIYEQRGAKKGVQGCKDNLLIDKSVCLDARHYKRDLHTSWLDYAKAFDTSPHDLIIRLLKMLKVHPNIIHAIESIIALWKTKFAIRAEGRTVYTGWVRYRRGVFQGDSLSPLLFCITLMPLSIELRASRIGYKAGPPGRRNHLISHLMYVDDLKLYAPSRTALQQLLNIVSEYTSAVGMSFGLDKCAVFHLRRGRVDDPGEDIQLEDGMTFRRLEDGETYKFLGMKQRGVLETTQIKDALSASYKKKLRDIWKSQLSGKNKVSATNMLAIPILTYSFGVVNWTVNELLDLDRSTRKTMNMNRSLHPNSSIQRIYLPRSQGGRGLQCLEYQHYQQTLETAVRVLRSEDPLLKFVAQHELANHGAFLFRAAQRALEKLGITGVSIDPERAGAPITQADQRRLARLIRKSQSNTLLEHHMSKSLHSIFFRSLKDQDLSEELSFAFLKSASLKSETEGFVMACQDGVINTRWYKKNIMKMDTPTTCRACHSQQETIMHILSACRVHAPSGYIERHNAALRVLYFHLRAAYEIDKEPVLPYVPLEIEAVVQNEKARIYWNYPVSTTRQINAIKPDILLLDKELKELFVVEFSSPAENNMVMKEEQKRQKYKDLVFELGTTYPGHKVRMVVLIIGCLGGMRANYVEELKIIPACRSWAEILAHRMQKAVLLGSLHIIRSHEL

SEQ ID NO: 25911 - protein, 1520 aa, Adalia bipunctata
MRKNNNKSARGYYCVVYRCDNPADPGHSQPMSDKYIRSHGEQSLPGDRQGASGVGAGRDSMRDTNGRMLRRQAPAIQEAMPLDEEDIDEERVQVVGRIGIQRSKEQPVVGTGSRNRTAQRGRHKWTPEQHDLLSALYRRSRPERRGYMNRLHGLWCENYPDLDYMTQQNLRDQISHLKRKGILWRSQEQERTEQQDGEQVTDASNQHQLLTIDTAEEQAVAMVRNIAGQTGTGTRSNRPITEHVRDVPRKEQGGEHVIDAPKQQHQAKALGARPRTEQISRVIRRGILWRSQEQERTEKQAEEQVTDASNQHQQLTIDTAEEQAVALVRNIAGQTGSSTRFNRPITEHVRDVPKIEHGGEQVTDAQNQQHQAIALGPRPRTEQVRDFPVIGLAEEQVTDAPDQQHQAKAQGPRPRTEQVGDVPVIGLAEEQVTDAPDQQHQAKAQGPRPRTEQVRDVPVIGLAEEQVTDAPDQQQQKPGTVRDIPKLIVNTRKAFESAVRNPLVKTSRIKTRHEAEDLAVLDNIIQDHLNETCSLEDVVAAVRAAASLLCAPKSTATKEDKHKLRLRRLDTKIKSMRQQASWYQCIIDVLKGKIESSKKMKDMIEELRSIHHRVDLPTVHLLKQKAVDRIRSLAAARKKLIKRQKWIEDNNTFNAEPSKLFQSQQQKTQKPPSPPEVEEFWKSIYEQRAETRDTPALLRFQQMCDQNQQQNDGLSEISTEDIRQALKNKRDFTAPGLDGIQNYWWKRFSATHQHLARLFSGMLTRREPIPSWLVEGRTVLIPKSGDLGQPKNYRPITCLNTLYKILTSVIQHQILRVIGPVWDSIYEQRGAKKGVQGCKDNLLIDKSVCLDARYYKRDLHTSWLDYAKAYDTSPHELIIRLLKMLKVHPNIIHAIENIIALWKTKFAIRTEGRTVYTGWVRYRRGVFQGDSLSPLFFCITLIPLTIELRESKIGYKAGPPGRRNHLISHLLYMDDLKLYAPSESALRQLLNIVSDYTSAMGMSFDLDKCAVFHLRRGKAEDAGEDIRLEDGMTIRHLEEGETYKFLGMKQRGVLETTQIKDALTASYKKKLRDIWKSQLSGKNKVSATNMLAIPILTYSFGVVNWTVNELLDLDRSTRKTMNINRSLHPNSSIQRIYLPRSQGGRGLQCLEYQHYQQTLEMAVRILRSEDSLLKFVAQHEIANHGAFLFRAAQRAVEKLSITGVSINPELAGTPITQAEQRSLARLIRKSQADKLLEHHMSKNLHSIYFRSLKDQDLSEELSFAFLKSASLKSETEGFVMACQDGVLNTRWYKKNIMKMDTPTTCRACHRQQETIMHILSACRVHVPSGYVERHNAALRILYFHLRAAYEIDKEPGLPYVPLEIEAVVQNERARICWNYPVSTTRQINAVKPDILLLDKELKELFVVEFFSPAENNVVMKEEQKRQKYKDLMFELGTLYPGHKVRMVVLIIGCLGGMRANYVDELKIIPACRSLAEVLVHRMQKAVLLGSLHIIRCYRFEIVFRSINLAKAIFWYLTRKT

SEQ ID NO: 25912 - protein, 1399 aa, Adalia bipunctata
MSDTYTLSLGKQSLPGDRQGASGVGAGRDSMRDTNGRMLRRQAPAIQEAMPSDEEDIDEERVQVVGRIGIQRSKEQPVVGTGSRNRTAQRGRHKWTPEQHNLLSALYRRSRPERRGYMNRLHGLWCESYPDLDFMTQQNLRDQISHLKRRGIIWRSQEQERTEQQAEEQVTDASSQHQQLTIDTTEEQAVALVRNIAGRTGTGIRSNRPIREHVRDVPEMENGGEQVTDAPNQQHQAIALGTRPRTEHVRDVPEIEHGEEQVTDAPNQQHQEIALGTRPRAEHVRDASEIEHGKEQVTDAPNHQHRAITPGARPRAGQVRDVPEIEHGEEQVTDAPNQQHQGIALGARPRAEQVRDVPEIEHAEEQVTDAPDQQQQMPRTVKDVPKLIVNTREAFEAAVRNPLVKATRIKTRHKAEDLAVLDKIIQDHLNETCSLEDVVAAVRAASSLLCPPKSTATNNDKHRLRISRLDIKIKSMRQQASWYQCIIDVLKGKIKSSKKMKDMIEELRSIHRTVDLPTIHLLKQKAVDRIRSLAAARKKLIKRQKWIEDNNTFTAEPSKLFQSPQQKAQNPPSPQEVEEFWKSLYEQQAEIRDTPALLRFQQMCDQNQQQNDEPSEISTEDIRQALKNKRDFTAPGLDGIQNYWWKQFPATHQHLARLFSGMLTRREPIPSWLVEGRTVLIPKSGDLGQPKNYRPITCLNTLYKILTSVIQDQILRVIGPVWNSIYEQRGAKKGVQGCKDNLLIDKSVCLDARHYKRDLHTSWLDYAKAYDTTPHELIVRLLKMLKVYPNIIHAIENIIALWKTKFAIRAEGRTVYTGWVRYRRGVFQGDSLSPLLFCITLIPLTIELRESKIGYKAGPPGRRNHLISHLLYMDDLKLYAPSESALRQLLNIVSDYTSAMGMSFGLDKCAVFHLRRGKAEDAGEDIRLEDGMTFRHLEDGETYKFLGMKQRGVLETTQIKDALTASYKKKLRDIWKSQLSGKNKVSATNMLAIPILTYSFGVVNWTVNELLDLDRSTRKTMNMNRSLHPNSSIQRIYLPRSQGGRGLQCLEYQHYQQTLEMAVRILRSEDPLLKFVAQHEIANHGAFLFRAAQRAVEKLSITGVSINPELAGTPITQAEQRSLARLIRKSQADKLLEHHMSKNLHSIYFRSLKDQDLSEELSFAFLKSASLKSETEGFVMACQDGVLNTRWYKKNIMKMDTPTTCRACHRQQETIMHILSACRVHAPSGYVERHNAALRILYFHLRAAYEIDKEPVLPYVPLEIEAVVQNERARICWNYPVSTTRQINAIKPDILLLDKELKELFVVEFSSPAENNVVMKEEQKRQKYKDLMFELGTLYPGHKVRMVVLIIGCLGGMRANYVDELKIIPACRSLAEVLAHRMQKAVLLGSLHIIRSHEL

SEQ ID NO: 25913 - protein, 1429 aa, Adalia bipunctata
MSDKYIRSLGEQSLPGDRQGASGVGAGRDSMRDTNGRMLRRQAPAIQEAMPLDEEDIDEERVQVVGRIGIQRSKEQPVVGTGSRNRTAQRGRHKWTPEQHDLLSALYKRSRPERRGYMNRLHGLWCENYPDLGYMTQQNLRDQISHLKRKGILWCSQEQERTKQQDEEQVTDASNQHQLLTIDTAEEQAVAMVRKIAGQTGTVTRSNRPITEHVRDVPRKEHVTDAPKQQHQAKALGARPRTEQISRVIRRGILWRSQEQERTEQQAEEQVTDASNQHQQLTIDTVEEQAVACGNIASQTRSGTRFNRPIIEHVRDVPKIEQGEEQVTDAQNQQHQAIALGPRPRTEQVRDVPVIGLVEEQVTDAPEQQHQAIALGPRPRTEQVRDVPAIGLAEEQVTDAPDQQQQKPGTVRDVPKLIVNTREAFEAAVRNPLIKTSRIKTRHEAEDLAVLDNIIQDHLNETCSLEDVVAAVRAAASLLCPPKSTATKEDKHKLRLRRLDTKIKSMRQQASWYQCIIDVLKGKIESSKKMKDMIEELRSIHHRVDLPTVHLLKQKAVDKIRSLAAARKKLIKRQKWIEDNNTFNAEPSKLFQSQQQMTQKPPSPPEVEEFWKSIYEQRAETRDTPALLRFQQMCDQNQQQNDELSQISTEDIRQALKNKRDFTAPGLDGIQNYWWKRFPATPQHLARLFSGMLTRREPIPPWLVEGRTVLIPKSGDLGQPKNYRPITCLNTLYKILTSVIQHQILRVIGPVWDSIYEQRGAKKGVQGCKDNLLIDKSVCLDPRYYKRDLHTSWLDYAKAYDTSPHELIIRLLKMLKVHPNIIHAIENIIALWKTKFFIRTEGRTVYTGWVRYRRGVFQGDSLSPLLFCITLIPLTIELRESKIGYKAGSPGRRNHLISHLLYMDDLKLYAPSESALRQLLNIVSDYTSAMGMSFGLDKCAVFHLRRGKAEDAGEDIRLEDGLTIRHLEDGETYKFLGMKQRGVLETTQIKDALTASYKKKLRDIWKSQLSGKNKVSATNMLAIPILTYSFGVVNWTVNELLDLDRSTRKTMNMNRSLHPNSSIQRIYLPRSQGGRGLQCLEYQHYQQTLEMAIRILRSEDPLLKFVAQHEIANHGAFLFRAAQRALEKLSITGVSINPDLAGTPITRADQRSLARLIRKSQSDTLLEHHMSKTLHSIYFRSLKDQDLSEELSFAFLKSASLKSETEGFVMACQDGVLNTRWYKKNIMKMDTPTTCRACHRQQETIMHILSACSVHAPSGYVERHNAALRILYFHLRAAYGIDEEPVLPYVPLEIEAVVQNDRARICWNYPVSTTRQINAVKPDILLLDKELKELFVVEFSSPAENNVVMKEEQKRQKYKDLMFELGTLYPGHKIRMVVLIIGCLGGMRANYVDELKIIPACRPLAEVLAHRMQKAVLLGSLHIIRSHEL

SEQ ID NO: 25914 - protein, 1282 aa, Adalia bipunctata
MNRLHGLWCENYPDLDFMTQQNLRDQISHLKRRGIIWRSQEQERMEQQAEEQVTDASSQHQQLTIDTTEEQAAALVRNIAGRTGTGIRSNRPIREHVRDVLEIENGGEQVTDAPNQQHQAIALGTRPRTEQVRDVPEIEHGEEQVTDAPNQQHQEIALGTRPRAEHVRDASEIEHGKEQVTDAPNQQHRAITPGARPRAGQVRDVPEIEHGEEQVTDAPNQQHQGIALGARPRAEQVRDVPEIEHAEEQVTDAPDQQQQMPRTVKDVPKLIVNTREAFEAAVRNPLVKATRIKTRHKAEDLAVLDKIIQDHLNETCSLEDVVAAVRAASSLLCPPKSTATNNDKHRLRLSRLDIKIKSMRQQASWYQCIIDVLKGKIKSSKKMKDMIEELRSIHRTVDLPTIHLLKQKAVDRIRSLAAARKKLIKRQKWIEDNNTFTAEPSKLFQSPQQKAQNPPSPQEVEEFWKSLYEQQAEIRDTPALLRFQQMCDQNQQRNDEPSEISTEDIRQALKNKRDFTAPGLDGIQNYWWKQFPATHQHLARLFSGMLTRREPIPSWLVEGRTVLIPKSGDLGQPKNYRPITCLNTLYKILTSVIQDQILRVIGPVWNSIYEQRGAKKGVQGCKDNLLIDKSVCLDARHYKRDLHTSWLDYAKAYDTTPHELIVRLLKMLKVYPNIIHAIENIIALWKTKFAIRAEGRTVYTGWVRYRRGVFQGDSLSPLLFCITLIPLTIELRESKIGYKAGPPGRRNHLISHLLYMDDLKLYAPSESALRQLLNIVSDYTSAMGMSFGLDKCAVFHLRRGKAEDAGEDIRLEDGMTFRHLEDGETYKFLGMKQRGVLETTQIKDALTASYKKKLRDIWKSQLSGKNKVSATNMLAIPILTYSFGVVNWTVNELLDLDRSTRKTMNMNRSLHPNSSIQRIYLPRSQGGRGLQCLEYQHYQQTLEMAVRILRSEDPLLKFVAQHEIANHGAFLFRAAQRAVEKLSITGVSINPELAGTPITQAEQRSLARLIRKSQADKLLEHHMSKNLHSIYFRSLKDQDLSEELSFAFLKSASLKSETEGFVMACQDGVLNTRWYKKNIMKMDTPTTCRACHRQQETIMHILSACRVHAPSGYVERHNAALRILYFHLRAAYEIDKEPVLPYVPLEIEAVVQNERARICWNYPVSTTRQINAIKPDILLLDKELKELFVVEFSSPAENNVVMKEEQKRQKYKDLMFELGTLYPGHKVRMVVLIIGCLGGMRANYVDELKIIPACRSLAEVLAHRMQKAVLLGSLHIIRSHEL

SEQ ID NO: 25915 - protein, 924 aa, Adalia bipunctata
MRQQASWYQCIIDVLKGKIESSKKMKDMIEELRSIHHRVDLPTVHLLKQKAVDKIRSLAAARKKLIKRQKWIEDNNTFNAEPSKLFQSQQQMTQKPPSPPEVEEFWKSIYEQRAETRDTPALLRFQQMCDQNQQQNDELSEISTEDIRQALKNKRDFTAPGMDGIQNYWWKRFPATHQHLARLFNGMLTRREPIPSWLVEGRTVLIPKSGDLGQPKNYRPITCLNTLYKILTSVIQHQILRVIGPVWDSIYEQRGAKKGVQGCKDNLLIDKSVCLDARYYKRDLHTSWLDYAKAYDTSPHELIIRLLKMLKVHPNIIHAIENIIALWKTKFAIGTEGRTVYTGWVRYRRGVFQGDSLSPLLFCITLIPLTIELRESKIGYKAGPPGRRNHLISHLLYMDDLKLYAPSESALRQLLNIVSDYTSAMGMSFGLDKCAVFHLRRGKAEDAGEDIQLEDGMTIRHLEEGETYKFLGMKQRGVLETTQIKDALTSSYKKKLRDIWKSQLSGKNKVSATNMLAIPILTYSFGVVNWTVNELLDLDRSTRKTMNMNRSLHPNSSIQRIYLPRSQGGRGLQCLEYQHYQQTLDMAVRILRSEDPLLKFVAQHEIANHGAFLFRAAQRAVEKLSITGVSINPELAGTPITQAEQRSLARLIRKSQADKLLEHHMSKSLHSIYFRSLKDQDLSEELSFAFLKSASLKSETEGFVMACQDGVLNTRWYKKNIMKMDTPTTCRACHRQQETIMHILSACRVHAPSGYVERHNAALRILYFHLRAAYEIDKEPVLPYVPLEIEAVIQNERARICWNYPVSTTRQINAVKPDILLLDKELKELFVVEFSSPAENNVVMKEEQKRQKYKDLMFELGTLYPGHKVRMVVLIIGCLGGMRANYVDELKIIPACRSLAEVLAHRMQKAVLLGSLHIIRSHEV

SEQ ID NO: 25916 - protein, 1429 aa, Adalia bipunctata
MSDKYIRSLGEQSLPGDRQGASGVGAGRDSMRDTNGRMLRRQAPAIQEAMPLDEEDIDEERVQVVGRIGIQRSKEQPVVGTGSRNRTAQRGRHKWTPEQHDLLSALYKRSRPERRGYMNRLHGLWGENYPDLGYMTQQNLRDQISHLKRKGILWCSQEQERTKQQDEEQVTDASNQHQLLTIDTAEEQAVAMVRKIAGQTGTVTRSNRPITEHVRDVPRKEHVTDAPKQQHQAKALGARPRTEQISRVIRRGILWRSQEQERTEQQAEEQVTDASNKHQQLTIDTAEEQAVACGNIASQTRSGTRFNRPIIEHVRDVPKIEQGEEQVTDAQNQQHQAIALGPRPRTEEVRDVPVIGLVEEQVTDAPEQQHQAIALGPRPRTEQVRDVPVIGLAEEQVTDAPDQQQQKPGTVRDVPKLIVNTREAFEAAVRNPLIKTSRIKTRHEAEDLAVLDNIIQDHLNETCSLEDVVAAVRAAASLLCPPKSTATKEDKHKLRLRRLDTKIKSMRQQASWYQCIIDVLKGKIESSKKMKDMIEELRSIHHRVDLPTVHLLKQKAVDKIRSLAAARKKLIKRQKWIEDNNTFNAEPSKLFQSQQQMTQKPPSPPEVEEFWKSIYEQRAETRDTPALLRFQQMCDQNQQQNDELSQISTEDIRQALKNKRDFTAPGLDGIQNYWWKRFPATHQHLARLFSGMLTRREPIPPWLVEGRTVLIPKSGDLGQPKNYRPITCLNTLYKILTSVIQHQILRVIGPVWDSIYEQRGAKKGVQGCKDNLLIDKSVCLDARYYKRDLHTSWLDYAKAYDTSPHELIIRLLKMLKVHPNIIHAIENIIALWKTKFSIRTEGRTVYTGWVRYRRGVFQGDSLSPLLFCITLIPLTIELRESKIGYKAGPPGRRNHLISHLLYMDDLKLYAPSESALRQLLNIVSDYTSAMGMSFGLDKCAVFHLRRGKAEDAGEDIRLEDGLTIRHLEDGETYKFLGMKQRGVLETTQIKDALTASYKKKLRDIWKSQLSGKNKVSATNMLAIPILTYSFGVVNWTVNELLDLDRSTRKTMNMNRSLHPNSSIQRIYLPRSQGGRGLQCLEYQHYQQTLEMAIRILRSEDPLLKFVAQHEIANHGAFLFRAAQRALEKLSITGVSINPDLAGTPITRADQRSLARLIRKSQSDTLLEHHMSKTLHSIYFRSLKDQDLSEELSFAFLKSASLKSETEGFVMACQDGVLNTRWYKKNIMKMDTPTTCRACHRQQETIMHILSACSVHAPSGYVERHNAALRILYFHLRAAYGIDKEPVLPYVPLEIEAVVQNDRARICWNYPVSTTRQINAVKPDILLLDKELKELFVVEFSSPAENNVVMKEEQKRQKYKDLMFELGTLYPGHKIRMVVLIIGCLGGMRANYVDELKIIPACRPLAEVLAHRMQKAVLLGSLHIIRSHEL

SEQ ID NO: 25917 - protein, 1287 aa, Coccinella septempunctata
MSERNQLSLGKQSLPGDRQGTSGVGAGRDSMRDTNGRTLRRRAPAMQKATPLDEEDIDEERVQVVGRIGIQSSQEHPVVGTGSRNRTAQRGRHKWTPEQHSLLSALYRRSGPDRRGYMNRLHGLWCENCPDLNYMTQQNLRDQISHLKRRGILQRPREQGRLEQQAEEQVTDALSQHQQLTVDITQEQAVALLSDIAGRTRTGTRSNRPITEHVRDAPDQQHQAMTHRSEAVALEARPRTEQVREVPEIELAEEQVTDAPDRQQQRPRRDSSELIDNTKEAFEAAVGDPLIKPTRIKSRHKAEDLAVLNSIIQDHLNETCSLEEVEAAVRAAAYLLCPPKSTAANDNNKHRKRLNRLDIKIKSMRQQASWYQCVIDVLKGKTKPSKRMREMIEELRAIHGTVNLPTVHLLKQKAVDKIRSLAAARKKLIRRKRWIEDNNTFTAEPSKLFQPQQQEVQNPPSPQDVEEFWKSLYEQPAKTRDTPALPRFQQMCDQTLQQNDELSEISPEDIRQALKNKNDFTAPGPDGIQNYWWKSFPATHKHLARLFSGMLIRREPIPSWLVEGRTVLIPKSGDLGQPKNYRPITCLNTLYKIFTSVIQDRILRVIGPVWDSIYEQRGAKKGVQGCKDNLLIDKSVCLDARHYKRDLHTSWLDYAKAFDTSPHDLIIRLLKMLKVHPNIIHAIESIIALWKTKFAIRAEGRTVYTGWVRYRRGVFQGDSLSPLLFCITLMPLSIELRASKIGYKAGPPGRRNHLISHLMYVDDLKLYAPSRAALQQLLNIVSEYTSAMGMSFGLDKCAVFHLRRGRVDDPGEDIQLEDGMTFRRLEEGETYKFLGMKQRGVLETTQIKDALSASYKKKLRDIWKSQLSGKNKVSATNMLAIPILTYSFGVVNWTVNELLDLDRSTRKTMNMNRSLHPNSSIQRIYLPRSQGGRGLQCLEYQHYQQTLETAVRVLRSEDPLLKFVAQHELANHGAFLFRAGQRALEKLGITGVSIDPERAGAPITQADQRRLARLIRKSQSNTLLEHHMSKSLHSIFFRSLKDQDLSEELSFAFLKSASLKSETEGFVMACQDGVINTRWYKKNIMKMDTPTTCRACHSQQETIMHILSACRVHAPSGYIERHNAALRVLYFHLRAAYEIDKEPVLPYVPLEIEAVVQNEKARIYWNYPVPTTRQINAIKPDILLLDKELKELFVVEFSSPAENNMVMKEEQKRQKYKDLVFELGTMYPGHKVKMVVLIIGCLGGMRANYVEELKIIPACRSWAEILAHRMQKAVLLGSLHIIRSHEL

SEQ ID NO: 25918 - protein, 1303 aa, Coccinella septempunctata
MSERNQLSLGKQSLPGDRQGTSGVGAGRDSMRDTNGRTLRRRAPATQKATPLDEEVIDEERVQVVGRIGIQSSQEHPVVGTGSRNRTAQRERHKWTPEQHSLLSALYRRSGPDRRGYMNRLHGLWCENCPDLNYMTQQNLRDQISHLKRRGILQRSREQGRLEQQAEEQVTDALSQHQQLTVDITQEQAVALLSDIAGRTRTGTRPNRPITEHVRDVPDIERAEEQVTDAPDQQHQAMTHRSEAAALEARPRTEQVREVPEIELAGEQVTDAPDRQQQRPRTVRDSSELVDNTKEAFEAAVGDPLIKPTRIKSRHKAEDLAVLNSIIQDHLNETCSLEEVEAAVRAAAYLLCPPKSTAANNNNNKHRKRLNRLDIKIKSMRQQTSWYQCVIDVMKGKTKPSKRMREMIEELRAIHGTVNLPTVHLLKQKAVDKIRSLAAARKKLIRRKRWIEDNNTFTAEPSKLFQPQQQEVQNPPSPQDVEEFWKSLYEQPAKTRDTPALIRFQQMCDQTLQQNDELSEISAEDIRQALKNKNDFTAPGPDGIQNYWWKSFPATHKHLARLFSGILIRREPIPSWLVEGRTVLIPKSGDLGQPKNYRPITCLNTLYKILTSVIQDRILRVIGPVWDSIYEQRGAKKGVQGCKDNLLIDKSVCLDARHYKRDLHTSWLDYAKAFDTSPHDLIIRLLKMLKVHPNIIHAIESIIALWKTKFAIRAEGRTVYTGWVRYRRGVFQGDSLSPLLFCITLMPLSIELRASRIGYKAGPPGRRNHLISHLMYVDDLKLYAPSRTALQQLLNIVSEYTSAVGMSFGLDKCAVFHLRRGRVDDPGEDIQLEDGMTFRRLEDGETYKFLGMKQRGVLETTQIKDALSASYKKKLRDIWKSQLSGKNKVSATNMLAIPILTYSFGVVNWTVNELLDLDRSTRKTMNMNRSLHPNSSIQRIYLPRSQGGRGLQCLEYQHYQQTLETAVRVLRSEDPLLKFVAQHELANHGAFLFRAAQRALEKLGITGVSIDPERAGAPITQADQRRLARLIRKSQSNTLLEHHMSKSLHSIFFRSLKDQDLSEELSFAFLKSASLKSETEGFVMACQDGVINTRWYKKNIMKMDTPTTCRACHSQQETIMHILSACRVHAPSGYIERHNAALRVLYFHLRAAYEIDKEPVLPYVPLEIEAVVQNEKARIYWNYPVSTTRQINAIKPDILLLDKELKELFVVEFSSPAENNMVMKEEQKRQKYKDLVFELGTMYPGHKVRMVVLIIGCLGGMRANYVEELKIIPACRSWAEILAHRMQKAVLLGSLHIIRSHEL

SEQ ID NO: 25919 - protein, 1300 aa, Coccinella septempunctata
MSERNQLSLGKQSLPGDRQGTSGVGAGRDSMRDTNGRTLRRRAPAIQKATPLDEEDIDEERVQVVGRIGIQSSQEHPVVGTGSRNRTAQRGRHKWTPEQHSLLSALYRRSGPDRRGYMNRLHGLWCENCPDLNYMTQQNLRDQISHLKRRGILQRPREQGRSEQQAEEQVADALSQHQQLTVDITQEQAVALLSDIAGRTRNGTRSNRPITEHVRDVPDIERAEEQVTDAPDQQHQAMTHRSEAVALEARPRTEQVREVPEIELAEEQVTDAPDRQQQRPRRDSSELIDNTKEAFEAAVGDPLIKPNRIKSRHKAEDLAVLNSIIQDHLNETCSLEEVEAAVRAAAYLLCPPKSTAANNNNKHRKRLNRLDIKIKSMRQQASWYQCVIDVLKGKTKPSKRMREMIEELRAIHGTVNLPTVHLLKQKAVDKIRSLAAARKKLIRRERWIEDNNTFTAEPSKLFQPQQQEVQNPPSPQDVEEFWKSLYEQPAKTRDTPALPRFQQMCDQTLQQNDELSEISPEDIREALKNKNDFTAPGPDGIQNYWWKSFPATHKHLARLFSGMLIRREPIPSWLVEGRTVLIPKSGDLGQPKNYRPITCLNTLYKIFTSVIQDRILRVIGPVWDSIYEQRGAKKGVQGCKDNLLIDKSVCLDARHYKRDLHTSWLDYAKAFDTSPHDLIIRLLKMLKVHPNIIHAIESIIALWKTKFAIRAEGRTVCTGWVRYRRGVFQGDSLSPLLFCITLMPLSIELRASKIGYKAGPPGRRNHLISHLMYVDDLKLYAPSRTALQQLLNIVSDYTSAMGMSFGLDKCAVFHLRRGRVDDPGGDIQLEDGMTFRRLEEGETYKFLGMKQRGVLETTQIKDALSASYKKKLRDIWKSQLSGKNKVSATNMLAIPILTYSFGVVNWTVNELLDLDRSTRKTMNMNRSLHPNSSIQRIYLPRSQGGRGLQCLEYQHYQQTLETAVRVLRSEDPLLKFVAQHELANHGAFLFRAGQRALEKLGITGVSIDPERAGAPITQADQRRLARLIRKSQSNTLLEHHMSKSLHSIFFRSLKDQDLSEELSFAFLKSASLKSETEGFVMACQDGVINTRWYKKNIMKMDTPTTCRACHSQQETIMHILSACRVHAPSGYIERHNAALRVLYFHLRAAYEIDKEPVLPYVPLEIEAVVQNEKARIYWNYPVPTTRQINAIKPDILLLDKELKELFVVEFSSPAENNMVMKEEQKRQKYKDLVFELGTMYPGHKVKMVVLIIGCLGGMRANYVEELKIIPACRSWAEILAHRMQKAVLLGSLHIIRSHEL

SEQ ID NO: 25920 - protein, 1434 aa, Adalia bipunctata
MSERYIRSLGEQSLPGDRQGASGVGAGRDSMRDTNGRMLRRQAPAIQEAMPLDEEDIDEERVQVVGRIGIQRSKEQPVVGTGSRNRTAHRGRHKWTPEQHDLLSALYRRSRPERRGYMNRLHGLWCENYPDLDYMTQQNLRDQISHLKRKGILWRSQEQERREQQDEEQVTDASNQHQLLTIDTAEEQAVAMVRNIAGQTGTGTRSNRPITEHVRDVPRKEKGEEHVTDAPKQQHQAKALGARPRKEQISRVIRRGILWRSQEQERTEQQAEEQVTDASIQHQQLTIDTAEEQAVALVRNIAVKTGSSTRFNRPITEHVRDVPKIEHGEEQVTDAQNQQHQAIALGPRPRTEQVRDVSVIELAGEQVTDAPDQQHQAIALGSRPRTEQVRDVPVIGLAEEQVTDAADQQQKNPGTVRDVPKLIVNTREAFEAAVRNPLVKTSRIKTRHEAEDLAVLDNIIQDHLNETCSLEDVVAAVRAAASLLCPPKSTATKEDEHKLRLRRLDTKIKSMRQQASWYQCIIDVLKGKIESSKKMKDMIEELRSIHHRVDLPTVHLLKQKAVDKIRSLAAARKKLIKRQKWIEDNNTFNAEPSKLFQSQQQMTQKPPSPPEVEEFWKSIYEQRAETRDTPALLRFQQMCDQNQQQNDELSEISTEDIRQALKNKRDFTAPGMDGIQNYWWKRFPATHQHLARLFNGMLTRREPIPSWLVEGRTVLIPKSGDLGQPKNYRPITCLNTLYKILTSVIQHQILRVIGPVWDSIYEQRGAKKGVQGCKDNLLIDKSVCLDARYYKRDLHTSWLDYAKAYDTSPHELIIRILKMLKVHPNIIHAIENIIALWKTRFAIRTEGRTVYTGWVRYRRGVFQGDSLSPLLFCITLIPLTIELRESKIGYKAGPPGRRNHLISHLLYMDDLKLYAPSESALRQLLNIVSDYTSAMGMSFGLDKCAVFHLRRGKAEDAGEDIQLEDGMTIRHLEEGETYKFLGMKQRGVLETTQIKDALTASYKKKLRDIWKSQLSGKNKVSATNMLAIPILTYSFGVVNWTVNELLDLDRSTRKTMNMNRSLHPNSSIQRIYLPRSQGGRGLQCLEYQHYQQTLEMAVRILRSEDPLLKFVAQHEIANHGAFLFRAAQRAVEKLSITGVSINPELAGTPITQAEQRSLARLIRKSQADKLLEHHMSKSLHSIYFRSLKDQDLSEELSFAFLKSASLKSETEGFVMACQDGVLNTRWYKKNIMKMDTPTTCRACHRQQETIMHILSACRVHAPSGYVERHNAALRILYFHLRAAYEIDKEPVLPYVPLEIEAVIQNERARICWNYPVSTTRQINAVKPDILLLDKELKELFVVEFSSPAENNVVMKEEQKRQKYKDLMFELGTLYPGHKVRMVVLIIGCLGGMRANYVDELKIIPACRSLAEVLAHRMQKAVLLGSLHIIRSHEV

SEQ ID NO: 25921 - protein, 1469 aa, Adalia bipunctata
MSDKYIRSLGEQSLPGDRQGASGVGAGRDSMRDTNGRMLRRQAPAIQEAMPSDEEDIDEERVQVVGRIGIQRSKEQPVVGTGSRNRTAQRGRHKWTPEQHDLLSALYRRSRPERRGYMNRLHGLWCENYPDLDYMTQQNLRDQISHLKRKGILWRSQEQERTEQQDGEQVTDASNQHQLLTIDTAEEQAVAMVRNIAGQTGTGTRSNRPITEHVRDVSRKEQGGEHVTDAPKQQHQAKALGARPRTEQISRVIRRGILWRSQEQERTEKQAEEQVTDASNQHQQLTIDTAEEQAVALVRNIAGQTGSSTRFNRPITEHVRDVPKIEHGGEQVTDAQNQQHQAIALGPRPRTEQVRDFPVIGLAEEQVTDAQNQQHQAIALGPRPRTEQVRDVPVIGLVEEQVTDAPEQQHQAIALGPRPRTEQVRDVPAIGLAEEQVTDAPDQQQQKPGTVRDIPKLIVNTREAFEAAVRNPLVKTSRIKTRHEAEDLAVLDNIIQDHLNETCSLEEVVAAVRAAASLLCPPKSTATKEDKHKLRLRRLDTKIKSMRQQASWYQCIIDVLKGKIESSKKMKDMIEELRSIHHRVDLPTVHLLKQKAVDRIRSLAAARKKLIKRQKWIEDNNTFNAEPSKLFQSQQQMTQKPPSPPEVEEFWKSIYEQRAETRDTPALLRFQQMCDQNQQQNDELSEISTEDIRQALKNKRDFTAPGLDGIQNYWWKRFPATHQHLARLFSGMLTRREPIPSWLVEGRTVLIPKSGDLGQPKNYRPITCLNTLYKILTSVIQHQILRVIGPVWDSIYEQRGAKKGVQGCKDNLLIDKSVCLDARYYKRDLHTSWLDYAKAYDTSPHELIIRLLKMLKVHPNIIQAIENIIALWKTKFAIRTEGRTVYTGWVRYRRGVFQGDSLSPLLFCITLIPLTIELRESKIGYKAGPPGRRNHLISHLLYMDDLKLYAPSESALRQLLNIVSDYTSAMGMSFGLDKCAVFHLRRGKAEDAGEDIRLEDGMTIRHLEDGEAYKFLGMKQRGVLETTQIKDPLTASYKKKLRDIWKSQLSGNNKVSATNMLAIPILTYSFGVVNWTVNELLDLDRSTRKTMNMNRSLHPNSSIQRIYLPRSQGGRGLQCLEYQHYQQTLEMAVRILRSEDPLLKFVAQHEIANHGAFLFRAAQRAVEKLSITGVSINPELAGTPITQAEQRSLARLIRKSQADKLLEHHMSKNLHSIYFRSLKDQDLSEELSFAFLKSASLKSETEGFVMACQDGVLNTRWYKKNIMKMDTPTTCRACHRQQETIMHILSACRVHAPSGYVERHNAALRILYFHLRAAYEIDKEPVLPYVPLEIEAVVQNERARICWNYPVSTTRQINAVKPDILLLDKELKELFVVEFSSPAENNVVMKEEQKRQKYKDLMFELGTLYPGHKVRMVVLIIGCLGGMRANYVDELKIIPACRPLAEVLAHRMQKAVLLGSLHIIRSHEV

SEQ ID NO: 25922 - protein, 977 aa, Adalia bipunctata
MRYFWQGNETCSLEDVVAAVRAAASLLCPPKSTATKEDKHKLRLRRLDTKIKSMRQQASWYQCIIDVLKGKIKSSKKMKDMIEELRSIHHRVDLPTVHSLKQKAVDRIISLAAARKKLIKRQKWIEDNNTFNAEPSKLFQTQQQMTQKPPSPPEVEEFWKSIYEQRAETRDTPALLRFQQMCDQNQQQNDGLSEISTEDIRQALKNKRDFTAPGLDGIQNYWWKRFPATHQHLARLFSGMLTRREPIPSWLVEGRTVLIPKSGDLGQPKNYRPITCLNTLYKILTSVIQHQILRVIGPVWDSIYEQRGANKGVQGCKDNLLIDKSVCLDARCYKRDLHTSWLDYAKAYDTSPHELIIRLLKMLKVHPNIIHAIENIIALWKTKFAIRTEGRTVYTGWVRYRRGVFQGDSLSPLLFCITLIPLTIELRESKIGYKAGPPGRRNHLISHLLYMDDLKLYAPSESALRQLLNIVSDYTSAMGMSFGLDKCDGFHLRREKSEDAGEDIRLEDGMTIRHLEEGETYKFLGMKQRGVLETTQIKDALTASYKKKLRDIWKSQLSGKNNVSATNMLAIPILTHSFGVVNWTVNELLDLDRSTRKTMNMNRSLHPNSSIQRIYLPRSQGGRGLQCLEYQHYQQTLEMAVRILRSEDPLLKFVAQHEIANHGAFLFRAAQRAVEKFSITGVSINLELARTPITQAEQRSLARLIRKSQADKLLEHHMSKNLHSIYFRSLKDQDLSEELSFAFLKSASLKSETEGFVMACQDGVLNTRWYKKNIMKMDTPTTCRACHRQQETIMHILSACRVHASSGYVERHNAALRILYFHLRAAYEIDKEPVLPYVPLEIEALVHNERARICWNYPVSTTRQINAVKPDILLLDKELKELFVVEFSSPAENNVVMKEEQKRQKYKDLMFELGTLYPGHKVRMVVLIIGCLGGMRANYVDERKIIPACRSLAEVLAHRMQKAVLLGSLHIIRSHEV

SEQ ID NO: 25923 - protein, 1399 aa, Adalia bipunctata
MSDTYTLSLGKQSLPGDRQGASGVGAGRDSMRDTNGRMLRRQAPAIQEAMPSDEEDIDEERVQVVGRIGIQRSKEQPVVGTGSRNRTAQRGRHKWTPEQHSLLSSLYRRSRPERRGYMNRLHGLWCENYPDLDFMTQQNLRDQISHLKRRGIIWRSQEQERTEQQAEEQVTDASSQHQQLTIDTTEEQAVALVRNIAGRTGSGIRSNRPIREHVRDVPEIENGGEQVTDAPNQQHQAIALGTRPRTEQVRDVPEIEHGEEQVTDAPNQQHQEKALGTRPRAEHVRDASEIEHGKEQVTDAPNQQHRAITPGARPRAGQVRDVPEKEHGEEQVTDALNQQHQGIDLGARPRAEQVRDVPEIEHAEEQVTDAPDQQQQMPRTVTDVPKLIVNTREAFEAAVRNPLVKATRIKTRHKAEDLAVLDKIIQDHLNETCSLEDVVAAVRAASSLLCPPKSTATNNDKHKLRLRRLDIKIKSMRQQASWYQCIIDVLKGKIKSSKKMKDMIEELRSIHRTVDLPTVHLLKQKAVDRIRSLAAARKKLIKRQKWIEDNNTFTAEPSKLFQSPQQKAQNPPSPQEVEEFWKSLYEQQAEIRDTPALLRFQQMCDQNQQENDEPSEITTEDIRQALKNKRDFTAPGLDGIQNYWWKKFPATHRHLARLFSGMLTRREPIPSWLVEGRTVLIPKSGDLGQPKNYRPITCLNTLYKILTSVIQDQILRVMGPVWNSIYEQRGAKKGVQGCKDNLLIDKSVCLDARHYKRDLHTSWLDYAKAYDTTPHELIVRLLKMLKVYPNIIHAIENIIALWKTKFAIRAEGRTVYTGWVRYRRGVFQGDSLSPLLFCITLIPLTIELRESKIGYKAGPPGRRNHLISHLLYMDDLKLYAPSESALRQLLNIVSDYTSAMGMSFGLDKCAVFHLRRGKAEDAGEDIRLEDGMTFRHLEDGETYKFLGMKQRGVLETTQIKDALTASYKKKLRDIWKSQLSGKNKVSATNMLAIPILTYSFGVVNWTVNELLDLDRSTRKTMNMNRSLHPNSSIQRIYLPRSQGGRGLQCLEYQHYQQTLEMAVRILRSEDPLLKFVAQHEIANHGAFLFRAAQRAVEKLSITGVSINPELAGTPITQAEQRSLARLIRKSQADKLLEHHMSKNLHSIYFRSLKDQDLSEDLSFAFLKSASLKSETEGFVMACQDGVLNTRWYKKNIMKMDTPTTCRACHRQQETIMHILSACRVHAPSGYVERHNAALRILYFHLRAAYEIDKEPVLPYVPLEIEAVVQNERARICWNYPVSTTRQINAVKPDILLLDKELKELFVVEFSSPAENNVVMKEEQKRQKYKELMFELGTLYPGHKVRMVVLIIGCLGGMRANYVDELKIIPACRSLAEVLAHRMQKAVLLGSLHIIRSHEL

SEQ ID NO: 25924 - protein, 898 aa, Adalia bipunctata
MRKNNNNSIHHRVDLPTVHLLKQKAVDKIRSLAAARKKLIKRQKWIEDNNTFNAEPSKLFQSQQQMTQKPPSPPEVEEFWKSIYEQRAETRDTPALLRFQQMCDQNQQQNDELSEISTEDIRQALKNKRDFTAPGLDGIQNYWWKRFPATHQHLARLFSRMLTRREPIPSWLVEGRTVLIPKSGDLGQPKNYRPITCLNTLYKILTSVIQHQILRVIGPVWDSIYEQRGAKKGVQGCKDNLLIDKSVCLDARYYKRDLHTSWLDYAKAYDTSPHELIIRLLKMLKVHPNIVHAIENIIALWKTKFAIRTEGRTVYTGWVRYRRGVFQGDSLSPLLFCITLIPLTIELRESKIGYKAGPPGRRNHLISHLLYMDDLKLYAPSESALRQLLNIVSDYTSAMGMSFGLDKCAVFHLRRGKAEDAGEDIRLEDGLTIRHLEDGETYKFLGMKQRGVLETTQIKDALTASYKKKLRDIWKSQLSGKNKVSATNMLAIPILTYSFGVVNWTVNELLDLDRSTRKTMNMNRSLHPNSSIQRIYLPRSQGGRGLQCLEYQHYQQTLEMAIRILRSEDPLLKFVAQHEIANHGAFLFRAAQRALEKLSITGVSINPDLAGTPITQADQRSLARLIRKSQSDTLLEHHMSKTLHSIYFRSLKDQDLSEELSFAFLKSASLKSETEGFVMACQDGVLNTRWYKKNIMKMDTPTTCRACHRQQETIMHILSACSVHAPSGYVERHNAALRILYFHLRAAYGIDKEPVLPYVPLEIEAVVQNDRARICWNYPVSTTRQINAVKPDILLLDKERKELFVVEFSSPAENNVVMKEEQKRQKYKDLMFELGTLYPGHKIRMVVLIIGCLGGMRANYVDELKIIPACRPLAEVLAHRMQKAVLLGSLHIIRSHEL

SEQ ID NO: 25925 - protein, 1464 aa, Adalia bipunctata
MMKNNNKTARGYYCVVYGCDNPADPGHSQPMSDKYIRSLGEQSLPGDRQGASGVGAGRDSMRDTNGRMLRRQAPAIQEAMPLDEEDIDEERVQVVGRIGIQRSKEQPVVGTGSRNRTAQRGRHKWTPEQHDLLSALYRRSRPERRGYMNRLHGLWCENYPDLDYMTQQNLRDQISHLKRKGILWRSQEQERTEQQDGEQVTDASNQHQLLTIGTAEEQAVAMVRNVAGQTGTGTRSNRPITEHVRDVPRKEQGGEHVTDAPKQQHQAKASGARPRTEQISRIIRRGILWRSQEQERTEQQAEEQVTDASNQHQQLTIDTAEEQAVALVRHIASQTGSITRFNRPITEHVRDVPKIEHGEEQVTDAQNQQHQAIALGPRPRTEQVRDVPVIELAGEQVTDAPDQRHQAIALGPRPRTEQVRDVPVIGLAEEQVTDAPDQQQQKPGTVRDVPKLIVNTREAFEAAVRNPLVKIFRMKTRHEAEDLAVLDNIIQDHLNETCSLEDVVAAVRAAASLLCPPKSTATKEDKHKLRLRRLDTKIKSMRQQASWYQCIIDVLKGKIGSSKKMKDMIEELRSIHHRVDLPTVHLLKQKAVDKIRSLTAARKKLIKRQKWIEDNNTFNAEPSKLFQSQQQMTQKPPSPPEVEEFWKSIYEQRPETRDTPALLRFQQMCDQNQQQNDELSEISTEDIKQALKNKRDFTAPGLDGIQNYWWKRFPATHQHLARLFSGMLTRREPIPSWLVEGRTVLIPKSGDLGQPKNYRPITCLNTLYKILTSVIQHQILRVIGPVWDSIYEQRGAKKGVQGCKDNLLIDKSVCLDARFYKRDLHTSWLDYAKAYDTSPHELIIRLLKMLKVHPNIIHAIENIIALWKTKFAIRTEGRTVYTGWVRYRRGVFQGDSLSPLLFCITLIPLTIELRESKIGYKAGPPGRRNHLISHLLYMDDLKLYAPSESALRQLLNIVSDYTSAMGMSFGLDKCAVFHLRRGKAEDAGEDIRLEDGMIIRHLEDGETYKFLGMKQRGVLETTQIKDALTASYKKKLRDIWKSQLSGKNKVSATNMLAIPILTYSFGVVNWTVNELLDLDRSTRKTMKMNRSLHPNSSIQRIYLPRSQGGRGLQCLEYQHYQQTLEMAVRVLRSEDPLLKFVAQHEIANHGAFLFRAAQRALEKLSITGVSINPELAGAPITQAEQRSLARLIRKSQADKLLEHHMSKTLHSIYFRSLKDQDLSEELSFAFLKSACLKSETEGFVMACQDGVLNTRWYKKNIMKMDTPTTCRACHRQQETIMHILSACSVHAPSGYVERHNAALRILYFHLRAAYGIDKEPVLPYVPLEIEAVVQNERARICWNYPVSTTRQINAVKPDILLLDKELKELFVVEFSSPAENNVVMKEEQKRQKYKDLMFELGTLYPGHKVRMVVLIIGCLGGMRANYVDELKIIPACRSLAEVLAHRMQKAVLLGSLHIIRSHEL

SEQ ID NO: 25926 - protein, 900 aa, Coccinella septempunctata
MKEIIEELRATHGTVNLPTVHLLKQKAVDKIRSLAAARKKLIRRKRWIEDNNTFTAEPSRLFQPQQQKVQNPPSPQDVEEFWKSLYEQPAKTRDTPALPRFQQMCDQTLQQNDELSEISAEDIRQALKNKNDFTAPGPDGIQNYLWKSFPATHKHLARLFSGMLIRREPIPSWLVEGRTVLIPKSGDLGQPKNYRPITCLNTLYKILTSVIQDRILSVIGPVWDSIYEQRGAKKGVQGCKDNLLIDKSVCLDARHYKRDLHTSWLDYAKAFDTSPHDLIIRLLKMLKVHPNIIHAIESIIALWKTKFAIRAEGRTVYTGWVRYRRGVFQGDSLSPLLFCITLMPLSIELRASKIGYKAGPPGRRNHLISHLMYVDDLKLYAPSRTALQQLLNIVSDYTSAMGMSFGLDKCAVFHLRGERVDDPGEDIQLEDGMTFRCLEEGETYKFLGMKQRGVLETTQIKDALSASYKKKLRDIWKSQLSGKNKVSATNMLAIPILTYSFGVVNWTVNELLDLDRSTRKTMNMNRSLHPNSSIQRIYLPRSQGGRGLQCLEYQHYQQTLETAVRVLRSEDPLLKFVAQHELANHGAFLFRAGQRALEKLGITGVSIYPERAGAPITQADQRRLARLIRKSQSNTLLEHHMSKSLHSIFFRSLKDQDLSEVLSFAFLKSASLKSETEGFVMACQDGVINTRWYKKNIMKMDTPTTCRACHSQQETIMHILSACRVHAPSGYIERHNAALRVLYFHLRAAYEIDKEPVLPYVPLEIEAVVQNEKARIYWNYPVSTTRQINAIKPDILLLDKELKELFVVEFSSPAENNIVMKEEQKRQKYKDLVFELGTMYPGHKVRMVVLIIGCLGGMRANYVEELKIISACRSWAEILAHRMQKAVLLGSLHVIRSHEL

SEQ ID NO: 25927 - protein, 991 aa, Adalia bipunctata
MKTRHEAEDLAVLDNIIQDHLNETCSLEDVVAAVRAAASLLCPPKSTSTKEDKHKLRLRRLDTKIKSMRQQASWYQCIIDVLKGKIGSSKKMKDMIEELRSIHHRVDLPTVHLLKQKAVDKIRSLTAARKKLIKRQKWIEDNNTFNAEPSKLFQSQQQMTQKPPSPPEVEEFWKSIYEQRPETRDTPALLRFQQMCDQNQQQNDELSEISTEDIKQALKNKRDFTAPGLDGIQNYWWKRFPAAHQHLARLFSGMLTRREPIPSWLVEGRTVLIPKSGDLGQPKNYRPITCLNTLYKILTSVIQHQILRVIGPVWDSIYEQRGAKKVVQGCKDNLLIDKSVCLDARFYKRDLHTSWLDYAKAYDTSPHELIIRLLKMLKVHPNIIHAIENIIALWKTKFAIRTEGRTVYTGWVRYRRGVFQGDSLSPLLFCITLIPLTIELRESKIGYKAGPPGRRNHLISHLLYMDDLKLYAPSESALRQLLNIVSDYTSAMGMSFGLDKCAVFHLRRGKAEDAGEDIRLEDGMIIRHLEDGETYKFLGMKQRGVLETTQIKDALTASYKKKLRDIWKSQLSGKNKVSATNMLAIPILTYSFGVVNWTVNELLDLDRSTRKTMNMNRSLHPNSSIQRIYLPRSQGGRGLQCLEYQHYQQTLEMAVRVLRSEDPLLKFVAQHEIANHGAFLFRAAQRALEKLSIPGVSINPELAGAPITQADQRSLARLIRKAQSDTLLEHHMSKTLHSIYFRSLKDQDLSEELSFAFLKSASLKSETEGFVMACQDGVLNTRWYKKNIMKMDTPTTCRACHRQQETIMHILSACSVHAPSGYVERHNAALRILYFHLRAAYGIDKEPVLPYVPLEIEAVVQNERARICWNYPVSTTRQINAVKPDILLLDKELKELFVVEFSSPAENNVVMKEEQKRQKYKDLMFELGTLYPGHKVRMVVLIIGCLGGMRANYVDELKIIPACRSLAEVLAHRMQKAVLLGSLHIIRSHEL

SEQ ID NO: 25928 - protein, 844 aa, Coccinella septempunctata
MRQQASWYQCVIDVMKGKTKPSKRMREMIEELRAIHGTVNLPTVHLLKQKAVDKIRSLAAARKKLIRRKRWIEDNNTFTAEPSKLFQPQQQEVQNPPSSQDVEEFWKSLYEQPAKTRDTPALPRFQQMCDQTLQQNDELSEIPAEDIRQALKNKNDFTAPGPDGIQNYWWKSFPATHKHLARLFSGMLIRREPIPSWLVEGRTVLIPKSGDLGQPKNYRPITCLNTLYKILTSVIQDRILRVIGPVWDSIYEQRGAKKGVQGCKDNLLIDKSVCLDARHYKRDLHTSWLDYAKAFDTSPHDLIIRLLKMLKVHPNIIHAIESIIALWKTKFAIRAEGRTAYTGWVRYRRGVFQGDSLSPLLFCITLMPLSIELRASKIGYKAGPPGRRNHLISHLMYVDDLKLYAPSRTALQQLLNIVSEYTSAMGMSFGLDKCAVFHLRRGRVDDPGEDIQLEDGMTFRRLEDGETYKFLGMKQRGVLETTQIKDALSASYKKKLRDIWKSQLSGKNKVSATNMLAIPILTYSFGVVNWTVNELLDLDRSTRKTMNMNRSLHPNSSIQRIYLPRSQGGRGLQCLEYQHYQQTLETAVRVLRSEDPLLKFVAQHELANHGAFLFRAAQRALEKLGITGVSIDPERAGAPITQADQRKLARLIRKSQSNTLLEHHMSKSLHSIFFRSLKDQDLSEELSFAFLKSASLKSETERFVMACQDGVINTRWYKKNIMKMDTPTTCRACHSQQETIMHILSTCRVHAPSGYIERHNAALRVLYFHLRAAYEIDKEPGLPYVPLQIEAVVQNEKARIYWNYPVSTTRHINAIKPDILLLDKELKELFMVEFSSPAENKPRY

SEQ ID NO: 25929 - protein, 1317 aa, Adalia bipunctata
MNRLHGLWCENYPDLYYMTQQNLRDQISHLKRKGILWRSQEQERTEQQDGEQVTDASNQHQLLTIDTAEEQAVAMVRNVAGQTGTGTRSNRPITEHVRDVPRKEQGGEHVTDAPKQQHQAKASGARPRTEQISRIIRRGILWRSQEQERTEQQAEEQVTDASNQHQQLTIDTAEEQAVALVRHIASQTGSITRFNRPITEHVRDVPKIEHGEEQVTDAQNQQHQAIALGPRPRTEQVRDVPVIELAGEQVTDAPDQRHQAIALGPRPRTEQVRDVPVIGLAEEQVTDAPDQQQQKPGTVRDVPKLIVNTREAFEAAVRNPLVKIFRMKTRHEAEDLAVLDNIIQDHLNETCSLEDVVAAVRAAASLLCPPKSTATKEDKHKLRLRRLDTKIKSMRQQASWYQCIIDVLKGKIRSSKKMKDMIEELRSIHHRVDLPTVHLLKQKAVDKMRSLTAARKKLIKRQKWIEDNNTFNAEPSKLFQSQQQMTQKPPSPPEVEEFWKSIYEQRPETRDTPALLRFQQMCDQNQQQNDELSEISTEDIKQALKNKRDFTAPGLDGIQNYWWKRFPATHQHLARLFSGMLTRREPIPSWLVEGRTVLIPKSGDLGQPKNYRPITCLNTLYKILTSVIQHQILRVIGPVWDSIYEQRGAKKGVQGCKDNLLIDKSVCLDARFYKRDLHTSWLDYAKAYDTSPHELIIRLLKMLKVHPNIIHAIENIIALWKTKFAIRTEGRTVYTGWVRYRRGVFQGDSLSPLLFCITLIPLTIELRESKIGYKAGPPGRRNHLISHLLYMDDLKLYAPSESALRQLLNIVSDYTSAMGMSFGLDKCAVFHLRRGKAEDAGEDIRLEDGMIIRHLEDGETYKFLGMKQRGVLETTQIKDALTASYKKKLRDIWKSQLSGKNKVSATNMLAIPILTYSFGVVNWTVNELLDLDRSTRKTMNMNRSLHPNSSIQRIYLPRSQGGRGLQCLEYQHYQQTLEMAVRVLRSEDPLLKFVAQHEIANHGAFLFRAAQRALEKLSITDVSINPELAGAPITQAEQRSLARLIRKSQADKLLEHHMSKTLHSIYFRSLKDQDLSEELSFAFLKSASLKSETEGFVMACQDGVLNTRWYKKNIMKMDTPTTCRACHRQQETIMHILSACSVHAPSGYVERHNAALRILYFHLRAAYGIDKEPVLPYVPLEIEAVVQNERARICWNYPVSTTRQINAVKPDILLLDKELKELFVVEFSSPAENNVVMKEEQKRQKYKDLMFELGTLYPGHKVRMVVLIIGCLGGMRANYVEELKIIPACRSLAEVLAHRMQKAVLLGSLHIIRSHEL

SEQ ID NO: 25930 - protein, 1476 aa, Adalia bipunctata
MRPIQNLNNNNNNNNNNIPARGYYCVVYGCDNPADPGHSQPMSDKFIRSLGEQSLPGDRQGASGVGAGRDSMRDTNGRMLRRQAPAIQEAMPLDEEDIDEERVQVVGRIGIQRSKEQPVVGTGSRNRTAQRGRHKWTPEQHDLLSALYRRSRPERRGYMNRLHGLWCENYPDLDYMTQQNLRDQISHLKRKGILWRSQEQERTEQQDGEQVTDASNQHQLLTIDTAEEQAVAMVRNVAGQTTGTGTRSNRPITEHVRDVPRTEQGGEHVTDAPKQQHQAKASGARPRTEQISRIIRRGILWRSQEQERTEQQAEEQVTDASNQHQQLTIDTAEEQAVALVRHIAGQTGSITRFNRPITEHVRDVPKIEHGEEQVTDAQNQQHQAIALGPRPRTEQVRDVPVIELAGEQVTDAPDQRHQAIALGPRPRTEQVRDVPVIGLAEEQVTDAPDQQQQKPGTVRDVPKLIVNTREAFEAAVRNPLVKIFRMKTRHEAEDLAVLDNIIQDHLNETCSLEDVVAAVRAAASLLCPPKSTATKEDKHKLRLRRLDTKIKSMRQQASWYQCIIDVLKGKIGSSKKMKDMIEELRSIHHRVDLPTVHLLKQKAVDKIRSLTAARKKLIKRQKWIEDNNTFNAEPSKLFQSQQQMTQKPPSPPEVEEFWKSIYEQRPETRDTPALLRFQQMCDQNQQQNDELSEISTEDIKQALKNKRDFTAPGLDGIQNYWWKRFPATHQHLARLFSGMLTRREPIPSWLVEGRTVLIPKSGDLGQPKNYRPITCLNTLYKILTSVIQHQILRVIGPVWDSIYEQRGAKKGVQGCKDNLLIDKSVCLDARFYKRDLHTSWLDYAKAYDTSPHELIIRLLKMLKVHHNIIHAIENIIALWKTKFAIRTEGRTVYTGWVRYRRGVFQGDSLSPLLFCITLIPLTIELRESKIGYKAGPPGRRNYLISHLLYMDDLKLYAPSESALRQLLNIVSDYTSAMGMSFGLDKCAVFHLRRGKAEDAGEDIRLEDGMIIRHLEDGETYKFLGMKQRGVLETTRIKDALTASYKKKLRDIWKSQLSGKNKVSATNMLAIPILTYSFGVVNWTVNELLDLDRSTRKTMNMNRSLHPNSSIQRIYLPRSQGGRGLQCLEYQHYQQTLEMAVRVLRSEDPLLKFVAQHEIANHGAFLFRAAQRALEKLSITGVSINPELAGAPITQADQRSLARLIRKSQSDTLLEHHMSKTLHSIYFRSLKDQDLSEELSFAFLKSASLKSETEGFVMACQDGVLNTRWYKKNIMKMDTPTTCRACHRQQETIMHILSACSVHAPSGYVERHNAALRILYFHLRAAYGIDKEPVLPYVPLEIEAVVQNERARICWNYPVSTTRQINAVKPDILLLDKELKELFVVEFSSPAENNVVMKEEQKRQKYKDLMFELGTLYPGHKVRMVVLIIGCLGGMRANYVDELKIIPACRSLAEVLAHRMQKAVLLGSLHIIRSHEL

SEQ ID NO: 25931 - protein, 900 aa, Coccinella septempunctata
MKEMIEELRATHGTVNLPTVHLLKQKAVDKIRSLAAARKKLIRRKRWIEDNNTFTAEPSKLFQPQQQEVQNPSSPQDVEEFWKSLYEQPAKTRDTPALPRFQQMCDQTLQQNDELSEISAEDIRQALKNKNDFTALGPDGIQNYWWKSFPATHKHLARLFSGMLIRREPIPSWLVEGRTVLIPKSGDLGQPKNYRPITCLNTLYKILTSVIQDRILRVIGPVWDSIYEQRGAKKGVQGCKDNLLIDKSVCLDARHYKRDLHTSWLDYAKAFETSPHDLIIRLLKMLKVHPNIIHAIESIIALWKTKFTIRAEGRTVYTGWVRYRRGVFQGDSLSPLLFCITLMPLSIELRASKIGYKAGPPGRRNHLISHLMYVDDLKLYAPSRTALQQLLNIVSDYTSAMGMSFGLDKCAVFHLRRGRVDDPGEDIQLEDGMTFRCLEEGETYKFLGMKQRGVLETTQIKDALSASYKKKLRDIWKSQLSGKNKVSATNMLAIPILTYSFGVVNWTVNELLDLDRSTRKTMNMNRSLHPNSSIQRIYLPRSQGGRGLQCLEYQHYQQTLETAVRVLRSEDPLLKFVAQHELANHGAFLFRAGQRALEKLGITGVSIDPERAGAPITQADQRRLARLIRKSQSNTLLEHHMSKSLHSIFFRSLKDQDLSEELSFAFLKSASLKSETEGFVMACQDGVINTRWYKKNIMKIDTPTTCRACHSQQETIMHILSACRVHAPSGYIERHNAALRVLYFHLRAAYEIDKEPVLPYVPLEIEAVVQNEKARIYWNYPVSTTRQINAIKPDILLLDKELKELFVVEFSSPAENNIVMKEEQKRQKYKDLVFELGTMYPGHKVRMVVLIIGCLGGMRANYVEELKIIPACRSWAETLARRMQKAVLLGSLHVIRSHEL

SEQ ID NO: 25932 - protein, 1172 aa, Coccinella septempunctata
MSERNQLSLGKQSLPGDRQGTSGVGAGRDSMRDTNGRTLRRRAPATQKATPLDGTDIDEERVQVVGRIGIQSSQEHPVVGTGSRNRTAQRGRHKWTPEQHVLLSALYRRSGPDRRGYMNRLHGLWCENCPDLNYMTRQNLRDQISHLKGRGILQRSREQGRLEQQAEEQVTDASSQHQQLTVDITQEKAVALLSDIAGRTRTGTRSNRPITEHVRDVPDIERAEEQVTDAPDRQHQAMTHRSEAVALEARPRTEQVRGVPEIELAGEQVTDAPDRQQQRPRTVRDSSELIDNTKEAFEAAVGDPLIKPTRIKSRHKAEDLAVLNSIIQDHRNETCSLEEVEAAVRAAAYLLCPPKSTAANNNNKHRKRLNRLDIKIKSMRQQASWYQCVIDVLKGKTKPSKRMREMIEELRAIHGTVNLPTVHLLKQKAVDKIRSLAAARKKLIMRKRWIEDNNTFTAEPSKLFQPQQQEVQNPPSPQDVEEFWKSLYEQPTKTRDTPALPRFQQMCDQTLQHNDELSEISAEDIRQALKNKNDFTAPGPDGIQNYWWKSFPATHKHLARLFSGMLIRREPIPSWLVEGRTVLVPKSGDLGQPKNYRPITCLNTLYKILTSVIQDRILRVIGPVWDSIYEQRGAKKGVQGCKDNLLIDKSVCLDARHYKRDLHTSWLDYAKAFDTSPHDLIIRLLKMLKVHPNIIHAIGNIIALWKTKFAIRAEGRTVYTGWVRYRRGVFQGDSLSPLLFCITLMPLSIELRASKIGYKAGPPGRRNHLISHLMYVDDLKLYAPSRTALQQLLNIVSDYTSAMGMSFGLDKCAVFHLRRGRVDDPGEDIQLEDEMTFRRLEEGETYKFLGMKQRGVLETTQIKDALSASYKKKLRDIWKSQLSGKNKVSATNMLAIPILTYSFGVVNWTVNELLDLDRSTRKTMNMNRSLHPNSSIQRIYLPRSQGGRGLQCLEYQHYQQTLETAVRVLRSEDPLLKFVAQHELANHGAFLFRAGQRALEKLGITGVSIDRAGAPITQADQRRLARLIRKSQSNTLLEHHMSKSLHSIFSRSLKDQDLSEELSFAFLKSASLKSETEGFVMACQDGVINTRWYKKNIMKMDTPTTCRACHSQQETIMHILTACRVHAPSGYVERHNAALRVLYFHLRVAYEIDKEPVLPYVPLEIEAVVQNE

SEQ ID NO: 25933 - protein, 1243 aa, Adalia bipunctata
MVRNVAGQTGTGTRSNRPITEHVRDVPRKEQGGEHVTDAPKQQHQAKASGARPRTEQISRIIRRGILWRSQEQERTEQQAEEQVTDASNQHQQLTIDTAEERAVALVRHIAGQTGSITRFNRPITEHVRDVPKIEHGEEQVTDAQNQQHQAIALGPRPRTEQVRDVPVIELAGEQVTDAPDQRHQAIALGPRPRTEQVRDVPVIGLAEEQVTDAPDQQKQKPGTVRDVPKLIVNTREAFEAAVRNPLVKIFRMKTRHEAEDLAVLDNIIQDHLNETCSLEDVVAAVRAAASLLCPPKSTATKEDKHKLRLRRLDTKIKSMRQQASWYQCIIDVLKGKIGSSKKMKDMIEELRSIHHRVDLPTVHLLKQKAVDKIRSLTAARKKLIKRQKWIEDNNTFNAEPSKLFQSQQQMTQKPPSPPEVEEFWKSIYEQRPETRDTPALLRFQQMCDQNQQQNDELSEISTEDIKQALKNKRDFTAPGLDGIQNYWWKRFPATHQHLARLFSGMLTRREPIPSWLVEGRTVLIPKSGDLGQPKNYRPITCLNTLYKILTSVIQHQILRVIGPVWDSIYEQRGAKKGVQGCKDNLLIDKSVCLDARFYKRDLHTSWLDYAKAYDTSPHELIIRLLKMLKVHPNIIHAIENIIALWKTKFAIRTEGRTVYTGWVRYRRGVFQGDSLSPLLFCITLIPLTIELRESKIGYKAGPPGRRNHLISHLLYMDDLKLYAPSESALRQLLNIVSDYTSAMGMSFGLDKCAVFHLRRGKAEDAGEDIRLEDGMIIRHLEDGETYKFLGMKQRGVLETTQIKDALTASYKKKLRDIWKSQLSGKNKVSATNMLAIPILTYSFGVVNWTVNELLDLDRSTRKTMNMNRSLHPNSSIQRIYLPRSQGGRGLQCLEYQHYQQTLEMAVRVLRSEDPLLKFVAQHEIANHGAFLFRAAQRALEKLSITGVSINPELAGAPITQADQRSLARLIRKSQSDTLLEHYMSKTLHSIYFRSLKDQDLSEELSFAFLKSASLKSETEGFVMACQDGVLNTRWYKKNIMKMDTPTTCRACHRQQETIMHILSACSVHAPSGYVERHNAALRILYFHLRAAYGIDKEPVLPYVPLEIEAVVQNERARICWNYPVSTTRQINAVKPDILLLDKELKELFVVEFSSPAENNVVMKEEQKRQKYKDLMFELGTLYPGHKVRMVVLIIGCLGGMRANYVDELKIIPACRSLAEVLAHRMQKAVLLGSLHIIRSHEL

SEQ ID NO: 25934 - protein, 1434 aa, Adalia bipunctata
MSDIFIRSLGEQSLPGDRQGASGVGAGRDSMRDTNGRMLRRQAPAIQEAMPLDEEDIDEERVQVVGRIGIQRSKEQPVVGTGSRNRTAQRGRHKWTPEQHDLLSALYRRSRPERRGYMNRLHGLWCENYPDLDYMTQQNLRDQISHLKRKGILWRSQEQERTEQQDGEQVTDASNQHQLLTIDTAEEQAVAMVRNVAGQTGTGTRSNRPITEHVRDVPRKEQGGEHVTDAPKQQHQAKASGARPRTEQISRIIRRGILWRSQEQERTEQQAEEQVTDASNQHQQLTIDTAEEQAVALVRHIAGQTGSITRFNRPITEHVRDVPKIEHGEEQVTDAQNQQHQAIALGPRPRTEQVRDVPVIELAGEQVTDAPDQRHQAIALGPRPRTEQVRDVPVIGLAEEQVTDAPDQQQQKPGTVRDVPKLIVNTREAFEAAVRNPLVKIFRMKTRHEAEDLAVLDNIIQDHLNENCSLEDVVAAVRAAASLLCPPKSTATKEDKHKLRLRRLDTKIKSMRQQASWYQCIIDVLKGKIESSKKMKDMIEELRSIHHRVDLPTVHLLKQKAVDKIRSLTAARKKLIKRQKWIEDNNTFNAEPSKLFQSQQQMTQKPPSPPEVEEFWKSIYEQRPETRDTPALLRFQQMCDQNQQQNDEVSEISTEDIKQALKNKRDFTAPGLDGIQNYWWKRFPATHQHLARLFSGMLTRREPIPSWLVEGRTVLIPKSGDLGQPKNYRPITCLNTLYKILTSVIQHQILRVIGPVWDSIYEQRGAKKGVQGCKDNLLIDKSVCLDARFYKRDLHTSWLDYAKAYDTSPHELIIRLLKMLKVHPNIIHAIENIIALWKTKFAIRTEGRTVYTGWVRYRRGVFQGDSLSPLLFCITLIPLTIELRESKIGYKAGPPGRRNHLISHLLYMDDLKLYAPSESALRQLLNIVSDYTSAMGMSFGLDKCAVFHLRRGKAEDAGEDIRLEDGMIIRHLEDGETYKFLGMKQRGVLETTRIKDALTASYKKKLRDIWKSQLSGKNKVSATNMLAIPILTYSFGVVNWTVNELLDLDRSTRKTMNMNRSLHPNSSIQRIYLPRSQGGRGLQCLEYQHYQQTLEMAVRVLRSEDPLLKFVAQHEIANHGAFLFRAAQRALEKLSITGVSINPELAGAPITQADQRSLARLIRKSQSDTLLEHHMSKTLHSIYFRSLKDQDLSEELSFAFLKSASLKSETEGFVMACQDGVLNTRWYKKNIMKMDTPTTCRACHRQQETIMHILSACSVHAPSGYVERHNAALRILYFHLRAAYGIDKEPVLPYVPLEIEAVVQNERARICWNYPVSTTRQINAVKPDILLLDKELKELFVVEFSSPAENNVVMKEEQKRQKYKDLMFELGTIYPGHKVRMVVLIIGCLGGMRANYVDELKIIPACRSLAEVLAHRMQKAVLLGSLHIIRSHEL

SEQ ID NO: 25935 - protein, 924 aa, Adalia bipunctata
MRQQASWYQCIIDVLKGKIESSKKMKDMIEELRSIHHRVDLPTVHLLKQKAVDKIRSLAAARKKLIKRQKWIEDNNTFNAEPSKLFQSQQQMTQKPPSPPEVEEFWKSIYEQRAETRDTPALLRFQQMCDQNQQQNDELSQISTEDIRQALKNKRDFTAPGLDGIQNYWWKRFPATHQHLARLFSGMLTRREPIPPWLVEGRTVLIPKSGDLGQPKNYRPITCLNTLYKILTSVIQHQILRVIGPVWDSIYEQRGAKKGVQGCKDNLLIDKSVCLDARYYKRDLHTSWLDYAKAYDTSPHELIIRLLKMLKVHPNIIHAIENIIALWKTKFSIRTEGRTVYTGWVKYRRGVFQGDSLSPLLFCITLIPLTIELRESKIGYKAGPPGRRNHLISHLLYMDDLKLYAPSESALRQLLNIVSDYTSAMGMSFGLDKCAVFHLRRGKAEDAGEDIGLEDGLTIRHLEDGETYKFLGMKQRGVLETTQIKDALTASYKKKLRDIWKSQLSGKNKVSATNMLAIPILTYSFGVVNWTVNELLDLDRSTRKTMNMNRSLHPNSSIQRIYLPRSQGGRGLQCLEYQHYQQTLEMAIRILRSEDPLLKFVAQHEIANHGAFLFRAAQRALEKLSITGVSINPDLAGTPITRADQRSLARLIRKSQSDTLLEHHMSKTLHSIYFRSLKDQDLSEELSFAFLKSASLKSETEGFVMACQDGVLNTRWYKKNIMKMDTPTTCRACHRQQETIMHILSACSVHAPSGYVERHNAALRILYFHLRAAYGIDKEPVLPYVPLEIEAVVQNDRARICWNYPVSTTRQINAVKPDILLLDKELKELFVVEFSSPAENNVVMKEEQKRQKYKDLMFELGTLYPGHKIRMVVLIIGCLGGMRANYVDELKIIPACRPLAEVLAHRMQKAVLLGSLHIIRSHEL

SEQ ID NO: 25936 - protein, 1311 aa, Adalia bipunctata
MSDKYIRSLGEQSLPGDRQGASGVGAGRDSMRDTNGRMLRRQAPAIQEAMPLDEEDIDEERVQVVGRIGIQRSKEQPVVGTGSRNRTAQRGRHKWTPEQHDLLSALYRRSRPERRGYMNRLHGLWCENYPDLDYMTQQNLRDQISHLKRKGILWRSQEQERTEQQDGEQVTDASNQHQLLTIDTAEEQAVAMVRNVAGHTGTGTRSNRPITEHVRDVPRKEQGGEHVTDAPKQQHQAKASGARPRTEQISRIIRRGILWRSQEQERTEQQAEEQVTDASNQHQQLWIDTAEEQAVALVRNIAGQTGSSTRFNRPITEHVRDVPRIEHGEEQVTDAQNQQHQAIALGPRPRTEQVRDVPVIELAGEQVTDAPDQQHQAIALGPRPRTEQVRDAPVIGLAEEQVTDAPDQQQQKPGTVRDVPKLIVNTREAFEAAVRNPLVKTFRIKTRHEAEDLAVLDNIIQDHLNETCSLEDVVTAVRAAASLLCPPKSTATKEDKHKLRLRRLDTKIKSMRQQASWYQCIIDVLKGNIESSKKMKDMIEELRSIHHRVNLPTVHLLKQKAVDRIRSLAAARKKLIKRQKWIEDNNTFTAEPSKLFQSPQQKAQNPPSPQEVEEFWKNIYEQRAETRDTPALLRFQQMCDQNQQQNDELCEISTEDIRQALKNKRDFTAPGLDGIQNYWWKRFPATHQHLARLFSGVLTRREPIPSWLVEGRTVLIPKSGDLGQPKNYRPITCLNTLYKILTSVIQHQILRVIGPVWDSIYEQRGAKKGVQGCKDNFLIDKSVCLDARYYKRDLHTSWLDYAKAYDTSPHELIIRLLKMLKVHPNIIHAIENIIALWKTKFAIRTEGRTVYTGWVRYRRGVFQGDSLSPLLFCITLIPLTIELRESKIGYKAGPPGRRNHLISHLLYMDDLKLYAPSESALRQLLNIVSDYTSAMGMSFGLDKCAVFHLRRGKAEDAGEDIRLEDGMTIRHLEEGETYKFLGMKQRGVLETTQIKDALTASYKKKLRDIWKSQLSGKNKVSATNMLAIPILTYSFGVVNWTVNELLDLDRSTRKTMNMNRSLHPNSSIQRIYLPRSQGGRGLQCLEYQHYQQTLEMAVRILRSEDPLLKFVAQHEIANHGAFLFRAAQRAVEKLSITAVSINPELAGTPITQAEQRSLARLIRKSQADKLLEHHMSKNLHSIYFRSLKDQDLSEELSFAFLKSASLKSETEGFVMACQDGVLNTRWYKKNIMKMDTPTTCRACHGQQETIMHILSACRVHAPSGYVERHNAALRILYFHLRAAYEIDKEPVLPYVPLEIEAVVQNERARIC

SEQ ID NO: 25937 - protein, 1486 aa, Adalia bipunctata
MFFHWFIEVIPARAETGRPMMKNNNNNFPARGYYCVVYGCDNPADPGHSQPMSDKFIRSLGEQSLPGDRQGASGVGAGRDSMRDTNGRMLRRQAPAIQEAMPLDEEDIDEERVQVVGRIGIQRSKEQPVVGTGSRNRTAQRGRHKWTPEQHDLLSALYRRSRPERRGYMNRLHGLWCENYPDLDYMTQQNLRDQISHLKRKGILWRSQEQERTEQQDGEQVTDASNQHQLLTIDTAEEQAVAMVRNVAGQTTGTGTRSDRPITEHVRDVPRKEQGGEHVTDAPKQQHQAKASGARPRTEQISRIIRRGILWRSQEQERIEQQAEEQVTDASNQHQQLTIDTAEEQAVALVRHIVGQTGSITRFNRPITEHVRDVPKIEHGEEQVTDAQNQQHQAIALGPRPRTEQVRDVPVIELAGEQVTDAPDQRHQAIALGPRPRTEQVRDVPVIGLAEEQVTDAPDQQQQKPGTVRDVPKLIVNTREAFEAAVRNPLVKIYRMKTRHEAEDLAVLDNIIQDHLNETCSLEDVVAAVRAAASLLCPPKITATKEDKHKLRLRRLDTKIKSMRQQASWYQCIIDVLKGKIGSSKKMKDMIEELRSIHHRVDLPTVHLLKQKAVDKIRSLTAARKKLIKRQKWIEDNNTFNAEPSKLFQSQQQMTQKPPSPPEVEEFWKSIYEQRPETRDTPALLRFQQMCDQNQQQNDELSEISTEDIKQALKNKRDFTAPGLDGIQNYWWKRFPATHQHLARLFSGMLTRREPIPSWLVEGRTVLIPKSGDLGQPKNYRPITCLNTLYKILTSVIQHQILRVIGPVWDSIYEQRGAKKGVQGCKDNLLIDKSVCLDARFYKRDLHTSWLDYAKAYDTSPHELIIRLLKMLKVHPNIIHAIENIIALWKTKFAIRTEGRTVYTGWVRYRRGVFQGDSLSPLLFCITLIPLTIELRESKIGYKAGPPGRRNYLISHLLYMDDLKLYAPSESALRQLLNIVSDYTSAMGMSFGLDKCAVFHLRRGKAEDAGEDIRLEDGMIIRHLEDGETYKFLGMKQRGVLETTRIKDALTASYKKKLRDIWKSQLSGKNKVSATNMLAIPILTYSFGVVNWTVNELLDLDRSTRKTMNMNRSLHPNSSIQRIYLPRSQGGRGLQCLEYQHYQQTLEMAVRVLRSEDPLLKFVAQHEIANHGAFLFRAAQRALEKLSITGVSINPELAGAPITQADQRSLARLIRKSQSDTLLEHHMSKTLHSIYFRSLKDQDLSEELSFAFLKSASLKSETEGFVMACQDGVLNTRWYKKNIMKMDTPTTCRACHRQQETIMHILSACSVHAPSGYVERHNAALRILYFHLRAAYGIDKEPVLPYVPLEIEAVVQNERARICWNYPVSTTRQINAVKPDILLLDKELKELFVVEFSSPAENNVVMKEEQKRQKYKDLMFELGTLYPGHKVRMVVLIIGCLGGMRANYVDELKIIPACRSLAEVLAHRMQKAVLLGSLHIIRSHEL

SEQ ID NO: 25938 - protein, 1301 aa, Coccinella septempunctata
MSERNQLSLGKQSLPGDRQGTSGVGAGRDSMRDTNGRTLRRRAPATQKATPLDEEDIDEERVQVVGRIGIQSSQEHPVVGTGSRNRTAQRGRHKWTPEQHSLLSALYRRSGPDRRGYMNRLHGLWCENCPDLNYMTQQNLRDQISHLKRRGILQRSQEQGRLEQQAEEQVTDALSQHQQLTVDITQEQAVALLSDIAGRTRTGTRSNRPTTEHVRDVPDIERAEEQVTDAPGQQHQAMTHRGEAVALEARPRTEQVREVPEIELAGEQVTDAPDRQQQRPRTVRDSSELIDNTKEAFEAAGRDPLIKPTRIKSRHKAEDLAVLNSIIQDHLNETCSLEEVEAAVRAAAYLLCPPKSTAANNNNNKHRKRLNQLDIKIKSMRQQASWYQCVIDVLKGKTKPSKRMKEMIEELRATHGTVNLPTVHLLKQKAVDKIRSLAAARKKLIRRKRWIEDNNTFTAEPSKLFQPQQQEVQNPPSPQDVEEFWKSLYEQPAKTRDTPALPRFQQMCDQTLQHNDELSEISAEDIRQALKNKNDFTAPGPDGSQNYWWKSFPATHKHLARLFSGMLIRREPIPSWLVEGRTVLIPKSGDLGQPKNYRPITCLNTLYKILTSVIQDRILRVIGPVWDSIYEQRGAKKGVQGCKDNLLIDKSVCLDARHYKRDLHTSWLDYAKAFDTSPHDLIIRLLKMLKVHPNIIHAIESIIALWKTKFAIRAEGRTVYTGWVRYRRGVFQGDSLSPLLFCITLMPLSIELRASKIGYKAGPPGRRNHLISHLMYVDDLKLYAPSRTALQQLLNIVSDYTSAMGMSFGLDKCAVFHLRRGRADDPGEDIQLEDGMTFRCLEEGETYKFLGMKQRGVLETTQIKDALSASYKKKLRDIWKLQLSGKNKVSATNMLAIPILTYSFGVVNWTVNELLDLDRSTRKTMNMNRSLHPNSSIQRIYLPRSQGGRGLQCLEYQHYQQTLETAVRVLRSEDPLLKFVAQHELANHGAFLFRAGQRALEKLGITGVSIDPERAGAPITQADQRRLAKLIRKSQSNTLLEHHMSLHSIFFRSLKDQDLSEELSFAFLKSASLKSETEGFVMACQDGIINTRWYKKNIMKMDTPTTCRACHSQQETIMHILSACRVHAPSGYIERHNAALRVLYFHLRAAYEIDKEPVLPYVPLEIEAVVQNEKARIYWNYPVSTTRQINAIKPDILLLDKGLKELFVVEFSSPAENNIVMKEEQKRQKYKDLVFELGTMYPGHKVRMVVLIIGCLGGMRANYVEELKIILACRSWAEILAHRMQKAVLLGSLHVIRSHEL

SEQ ID NO: 25939 - protein, 1242 aa, Adalia bipunctata
MVRNVAGQTGTGYRSNRPITEHVRDVPRKEQGGEHVTDAPKQQHQAKASGARPRTEQISRIIRRGILWRSQEQERTEQQAEEQVTDASNQHQQLTIDTAEERAVALVRHIAGQTGSITRFNRPITEHVRDVPKIEHGEEQVTDAQNQQHQAIALGPRPRTEQVRDVPVIELAGEQVTDAPDQRHQAIALGPRPRTEQVRDVPVIGLAEEQVTDAPDQQKQKPGTVRDVPKLIVNTRKSFEAAVRNPLVKIFRMKTRHEAEDLAVLDNIIQDHLNETCSLEDVVAAVRAAASLLCPPKGTATKEDKHKLRLRRLDTKIKSMRQQASWYQCIIDVLKGKIGSSKKMKDMIEELRSIHHRVDLPTVHLLKQKAVDKIRSLTAARKKLIKRQKWIEDNNTFNAEPSKLFQSQQQMTQKPPSPPEVEEFWKSIYEQRPETRDTPALLRFQQMCDPNQQQNDELSEISTEDIKQALKNKRDFTAPGLDGIQNYWWKRFPATHQHLARLFSGMLTRREPIPSWLVEGRTVLIPKSGDLGQPKNYRPITCLNTLYKILTSVIQHQILRVIGPVWDSIYEQRGAKKGVQGCKDNLLIDKSVCLDARFYKRDLHTSWLDYAKAYDTSPHELIIRLLKMLKVHPNIIHAIENIIALWKTKFAIRTEGRTVYTGWVRYRRGVFQGDSLSPLLFCITLIPLTIELRESKIGYKAGPGRRNHLISHLLYMDDLKLYAASESALRQLLNIVSDYTSAMGMSFGLDKCAVFHLRRGKAEDAGEDIRLEDGMIIRHLEDGETYKFLGMKQRGVLETTQIKDALTASYKKKLRDIWKSQLSGKNKVSATNMLAIPILTYSFGVVNWTVNELLDLDRSTRKTMNMNRSLHPNSSIQRIYLPRGQGGRGLQCLEYQHYQQTLEMAVRVLRSEDPLLKFVAQHEIANHGAFLFRAAQRALEKLSITGVSINPELAGAPITQADQRSLARLIRKSQSDTLLEHHMSKTLHSIYFRSLKDQDLSEELSFAFLKSASLKSETEGFVMACQDGVLNTRWYKKNIMKMDTPTTCRACHRQQETIMHILSACSVHAPSGYVERHNAALRILYFHLRAAYGIDKEPVLPYVPLEIEAVVQNERARICWNYPVSTTRQINAVKPDILLLDKELKELFVVEFSSPAENNVVMKEEQKRQKYKDLMFELGTLYPGHKVRMVVLIIGCLGGMRANYVDELKIIPACRSLAEVLAHRMQKAVLLGSLHIIRSHEL

SEQ ID NO: 25940 - protein, 922 aa, Coccinella septempunctata
MRQQASWYQCVIDVLKGKTKPSKRMREMIVELRAIHGTVNLPTVHLLQQKAVDKIRSLAAARKKLIRRKRCIEDNNTFTAEPSKLFQPQQQEVENPPSPQDVEEFWKSLYEQPAKFRDTPALPRFQQMCDQTLQQNDELSEISAEDIRQALKNKNDFTAPGPDGIQNYWWKSFPATHKHMARLFSGMLIRREPIPSWLVEGRTVLIPKSGDLGQPKNYRPITCLNTLYKILTSVIQDRILRVIGPVWDSIYEQRGVKKGVQGCKDNLLIDKSVCLDARHYKRDLHTSWLDYAKAFDTSPHDLIIRLLKMLKVHPNIIHAIESIIALWKTKFAIRAEGRTVYTGWVRYRRGVFQGDSLSPLLFCITLMLLSIELRASKIGYKAGPPGRRKDLISHLMYVDDLKLYAPSRTALQQLLNIVSDYTSAMGMSFSLDKCAVFHLRRGRVDDPGEDIQLEDGMTFRRLEEGETYKFLGMKQRGVLETTQIKDALSASYKKKLRDIWKSQLSGKNKVSATNMLAIPILTYSFGVVNWTVNELLDLDRSTRKTMNMNRSLHPNSSIQRIYLPRSQGGRGLQCLEYRHYQQTLETAVRVLRSEDPLLKFVAQHELANHGAFLFRTGQRALEKLGITGVSIDPERAGARITQADRRRLARRKSQSNTLLEHHMSKSLHFIFFRSLKDQDLSEELSFAFLKSASLKSETEGFVMACQDGVINTRWYKKNIMKMDTPTTCRACHSQQETIMHILSACRVHAPSGYIERHNAALRVLYFHLRAAYEIDKEPVLPYVPLEIEAVVQNEKARICWNYPVSTTRQINAIKPDILLLDKELKELFVVEFSSPAENNMVMKEEQKRQKYKDLVFELGTMYPGHKVRMVVLIIGCLGGMRANYVEELKIIPACRSWAEIIAHRMQKALLLGSLNIIRSHEL

SEQ ID NO: 25941 - protein, 1349 aa, Adalia bipunctata
MNRLHGLWCENYPDLDYMTQQNLRDQISHLKRKGILWRSQEQERTEQQDGEQVTDASNQHQLLTIDTAEEQAVAMVRNVAGQTGTGTRSNRPITEHVRDVPRKEQGGEHVTDAPKQQHQAKASGARPRTEQISRIIRRGILWRSQEQERTEQQAEEQVTDASNQHQQLTIDTAEEQAVALVRHIASQTGSITRFNRPITEHVRDVPKIEHGEEQVTDAQNQQHQAIALGPRPRTEQVRDVPVIELAGEQVTDAPDQRHQAIALGPRPRTEQVRDVPVIELAGEQVTDAPDQRHQAIALGPRPRTEQVRDVPVIGLAEEQVTDAPDQQQQKPGTVRDVPKLIVNTREAFEAAVRNPLVKIFRMKTRHEAEDLAVLDNIIQDHLNETCSLEDVVAAVRAAASLLCPPKSTATKEDKHKLRLRRLDTKIKSMRQQASWYQCIIDVLKGKIGSSKKMKDMIEELRSIHHRVDLPTVHLLKQKAVDKIRSLTAARKKLIKRQKWIEDNNTFNAEPSKLFQSQQQMTQKPPSPPEVEEFWKSIYEQRPETRDTPALLRFQQMCDQNQQQNDELSEISTEDIKQALKNKRDFTAPGLDGIQNYWWKRFPATHQHLARLFSGMLTRREPIPSWLVEGRTVLIPKSGDLGQPKNYRPITCLNTLYKILTSVIQHQILRVIGPVWDSIYEQRGAKKGVQGCKDNLLIDKSVCLDARFYKRDLHTSWLDYAKAYDTSPHELIIRLLKMLKVHPNIIHAIENIIALWKTKFAIRTEGRTVYTGWVRYRRGVFQGDSLSPLLFCITLIPLTIELRESKIGYKAGPPGRRNHLISHLLYMDDLKLYAPSESALRQLLNIVSDYTSAMGMSFGLDKCAVFHLRRGKAEDAGEDIRLEDGMIIRHLEDGETYKFLGMKQRGVLETTQIKEALTASYKKKLRDIWKSQLSGKNKVSATNMLAIPILTYSFGVVNWTVNELLDLDRSTRKTMNMNRSLHPNSSIQRIYLPRSQGGRGLQCLEYQQILEMAVRVLRSEDPLLKFVAQHEIANHGAFLFRAAQRALEKLSITGVSINPELAGAPITQAEQRSLARLIRKSQADKLLEHHMSKTLHSIYFRRLKDQDLSEELSFAFLKSASLKSETEGFVMACQDGVLNTRWYKKNIMKMDTPTTCRACHRQQETIMHILSACSVHAPSGYVERHNAALRILYFHLRAAYGIDKEPVLPYVPLEIEAVVQNERARICWNYPVSTTRQINAVKPDILLLDKELKELFVVEFSSPAENNVVMKEEQKRQKYKDLMFELGTLYPGHKVRMVVLIIGCLGGMRANYVDELKIIPACRSLAEVLAHRMQKAVLLGSLHIIRSHEL

SEQ ID NO: 25942 - protein, 1026 aa, Adalia bipunctata
MPRTVTDVPKLIVNIREAFEAAVRNPLVKVTRIKTRQKAEDLAVLDKIIQDHLNETCSLEDVVAAVRAASSLLCPPKSTATNNDKHRLRLSRLDIKIKSMRQQASWYQCIIDVLKGKIKSSKKMKDMIEELRSIHRTVDLPTVHLLKQKAVDRIRSLAAARKKLIKGQKWIEDNNTFTAEPSKLFQSPQQKAQNPPSPQEVEEFWKSLYEQQAEIRDTPALLRFQQMCDRNQQQNDEPSEISTEDIRQALKNKRDFTAPGLDGIQNYWWKKFPATHQHLARLFSGMLTRREPIPSWLVEGRTVLIPKSGDVGQPKNYRPITCLNTLYKILTSVSQDQILRVIGPVWNSIYEQRGAKKGVQGCKDNLLIDKSVCLDARHYKRDLHTSWLDYAKAYDTTPHELIVRLLKMLKVYPNIIHAIENIIALWKTKFAIRAEGRTVYTGWVRYRRGIFQGDSLSPLLFCITLIPLTIELRESKIGYKAGPPGRRNHLISHLLYMDDLKLYAPSESTLRQLLNIVSDYTSAMGMSFGLDKCAVFHLRRGKAEDAGEDIRLEDGMTFRHLEDGETYKFLGMKQRGVLETTQIKDALTASYKKKLRDIWKSQLSGKNKVSATNMLAIPILTYSFGVVNWTVNELLDLDRSTRKTMNMNRSLHPNSSIQRIYLPRSQGGRGLQCLEYQHYQQTLEMAVRILRSEDPLLKFVAQHEIANHGAFLFRAAQRAVEKLIITGVSINPELAGTPITQAEQRSLARLIRKSQADKLLEHHMSKKKNLHSIYFRSLKDQDLSEELSFAFLKSASLKSETEGFVMACQDGVLNTRWYKKNIMKMDTPTTCRACHRQQETIMHILSACRVHAPSGYVERHNAALRILYFHLRAAYEIDKEPVLPYVPLEIEAVVQNERARICWNYPVSTTRQINAVKPDILLLDKELKELFVVEFSSPAENNVVMKEEQKRQKYKDLMFELGTLYPSGHKVRMVVLIIGCLGGMRANYVDELKIIPACRSLAEVLAHRMQKAVLLGSLHIIKSHEL

SEQ ID NO: 25943 - protein, 1356 aa, Adalia bipunctata
MLRRQAPAIQEAMPSDEEDIDEERVQVVGRIGIQRSKEQPVVGTGSRNRTAQRGRHKWTPEQHNLLSALYRRSRPERRGYMNRLHGLWCENYPDLDFMTQQNLRDQISHLKRRGIIWRSQEQERTEQQAEEQVTDASSQHQQLTIDTTEEQAVVLVRNIAGRTGTGIRSNRPIREHVRDVPEIKNGGEQVTDAPNQQHQATALGTRPRTEQVRDVPEIEHGEEQVTDAPNQQHQEIALGTRPRAEHVRDASEIEHGKEQVTDAPNQQHRAITPGARPRAGQVRDVPEIEHGEEQVTDAPNQQHQEIALGARPRAEQVRDVPEIEHAEEQVTDAPDQQQQMPRTVTDVPKLIVNTREAFEAAVRNPLVNATRIKTRHKAEDLAVLDKIIQDHLNETCSLEDVVAAVRAASSLLCPPKSKATNNDMHRLRLSRLDIKIKSMRQQASWYQCIIDVLKGKIKSSKKIKDMIEELRSIHRTVDLPTVHLLKQKAVDRIRSLAAARKKLIKRQKWIEDNNTFTAEPSKLFQSPQQKAQNPPSPQEVEEFWKSLYEQQAEIRDTPALLRFQQMCDQNIQQNDEPSEISTEDIRQALKNKRDFTAPGLDGIQNYWWKKFPATHQHLARLFSGMLTRREPIPSWLVEGRTVLIPKSGDLGQPKNYRPITCLNTLYKILTSVIQDQILRVIGPVWNSIYEQRGAKKGVQGCKDNLLIDKSVCLDARHYKRDLHTSWLDYAKAYDTTPHELIVRLLKMLKVYPNIIHAIENIIALWKTKFAIRAEGRTVYTGWVRYRRGVFQGDSLSPLLFCITLIPLTIELRESKIGYKAGPPGRRNHLISHLLYMDDLKLYAPSESALRQLLNIVSDYTSAMGMSFGLDKCAVFHLRRGQDIRLEDGMTFRHLEDGETYKFLGMKQRGVLETTQIKDALTASYKKKLRDIWKSQLSGKNKVSAANMLAIPIITYSFGVVNWTVNELLDLDRSTRKTMNMNRSLHPDSSIQRIYLPGSQGGRGLQCLEYQHYQQTLEMAVRILRSEDPLLKFVAQHEIANHGAFLFRAAQRAVEKLSITGVSINPELAGAPITQAELRSLARLIRKSQADKLLEHHMSKNLHSIYFRSLKDQELSEELSFAFLKSASLKSETEGFVMACQDGVLNTRWYKKNIMKMDTPTTCRACHRQQETIMHILSAFRVHAPSGYVERHNAALRILYFHLRAAYEIDKEPVLPYVPLEIEAVVQNKRARICWNYPVSTTRQINAVKPDILLLDKELKELFVVEFSSPAENNVVMKEEQKRQKYKDLMFELGTLYPGHKVRIVVLIIGCLGGMRANYVDELKIIPACRSLAEVLAHRMQKAVLLGSLHIIRSHEL

SEQ ID NO: 25944 - protein, 1331 aa, Coccinella septempunctata
MHVRGNNNNNNNNNNPARGYYLVVHGCDNPADPGHSQPMSERNQLSLGKQSLPGDRQGTSGVGAGRDSMRDTNGRTLRRRAPATQKATPLDEEDIDEERVQVVGRIGIQSSQEHPVVGTGSRNRTAQRGRHKWTPEQHSLLSALYRRSGPDRRGYMNRLHGLWCENCPDLNYMTQQNLRDQISHLKRRGILQRSREQGRLEQQAEEQVTDALSQHQQLTVDITQEQAIALLSDIAGRTRTGTRSNRPITEHVRDVPDIERAEEQVTDAPDQQHQAMTHRSEAVALEARPRTEQVREVPEIELAGEQVTDAPDRQQQRPRTVRDSSELIDNTKEAFEAAVGDPLIKPTRIKSRHKAEDLAVLNSIIQDHLNETCSLEEVEAAVRAAAYLLCPPKSTAANNNNKHRKRLNRLDIKIKSMRQQASWYQCVIDVMKGKTKPSKRMREMIEELRAIHGTVNLPTVHLLKQKAVDKIRSLAAARKKLIRRKRWIEDNNTFTAEPSKLFQPQQQEVQNPPSPQDVEEFWKSLYEQPAKTRDTPALPRFQQMCDQTLQQNDELSEISAEDIRQALENKNDFTAPGPDGIQNYWWKSFPATHKHLARLFSGMLIRREPIPSWLVEGRTVLIPKSGDLGQPKNYRPITCLNTLYKILTSVIQDRILRVIGPVWDSIYEQRGAKKGVQGCKDNLLIDKSVCLDARHYKRDLHTSWLDYAKAFDKSPHDLIIRLLKMLKVHPNIIHAIESIIALWKTKFAIRAEGRTAYTGWVRYRRGVFQGDSLSPLLNCITLMPLSIELRASKIGYKAGPPGRRNHLISHLMYVDDLKLYAPSRTALQQLLNIVSEYTSAMGMSFGLDKCAVFHLRRGRVDDPGEDIQLEDGMTYKFLGMKQRGVLETTQIKDALSASYKKKLRDIWKSQLSGKNKVSATNMLAIPILTYSFGVVNWTMNELLDLDRSTRKTMNMNRSLHPNSSIQRIYLPRSQGGRGLQCLEYQHYQQTLETAVRVLRSEDPLLKFVAQHELANHGAFLFRAAQRALEKLGITGVSIDPERAGAPITQADQRKLARLIRKSQSNTLLKHHMSKSLHSIFFRSLKDQDLSEELSFAFLKSASLKSETEGFVMACQDGVINTRWYKKNIMKMDTPTTCRACHSQQETIMHILSACRVHAPSGYIERHNAALRVLYFHLRAAYEIDKEPVLPYVPLEIEAVVQNEKARIYWNYPVSTTRQINAIKPDILLLDKELKELFVVEFSSPAENNMVMKEEQKRQKYKDLVFELGTMYPGHKVRMVVLIIGCLGGMRANYVEELKIIPACRSWAEILAHRMQKAVLLGSLHIIRSHEL

SEQ ID NO: 25945 - protein, 1022 aa, Sitodiplosis mosellana
MVAQDFVPQNEANTNHNVEGTFRCTECDHAPFARQVGLSQHMRQMHPEVYNRSVNVDRVKGRWSEEETDRMARAEAEAIRDGMVRNMNVHLLALFPNRTLDGIKGKRRKEEYKARVTHFDSMLGEGDNGSGAPVAQGTSVQLQEENVSGDFDFLKTAILDLVASLDDNTLKSTRDLVGYARILTSGTSLEPGTLSKWLKSIFKHAKPPKGPVYNRRVVVQDNISPKKRRRQEYAAIQKLFRKDFGGAVRRVLSGGDQQVNMPSSEEVIAFWKRIFEQEPEESGAEANITYEENAQLRGVWDPVSVDDILACELDIDSAAGPDGITVANWRGIGVKVRALFFNLILYTGSLDDELKRARTVLIPKGTGDIVPSNTRPLSITSVIVRHLHKILAKRFKTLHSFDPCQRAFIDCDGTMENLSIISTVLADARMSKKEVHIATLDLRKAFDSVSHKAIVDSITDLGFPMKFIDYIKSLYTDSRTTLQYNSIDTTLKVNQGVLQGDPISPLLFNAVLDRAVKQIPGEVGYRINGCIISCVAYADDLILISTTKGGLQSSIDAVTSCLATFGLKTNIEKSSTLSLVPSGREKKIKVIEESHFEIDGTSLRAIGVLDTWKYLGIHFNGSKIVERENRLAFDLEKITKAPLKPYQRLRLLCGAVIPKYLHTLVLGRTSRVQLKQMDLLIRSHVKRWLYFPKDLPTAYLYAKVRDGGLGVFNLSLQVPLIKKMRLRRFILNEGSTVRAVKQSLYIKRQLEWCDEQLGHIRNNATKNCLSKHWRDVLYGMVDTNDLKDASIDSASNSWVVDHAHEISGMEYIHYHHIRAGCLPSRARLARGRERARLCRAGCMVSETNYHIVQQCQRSHGGRCIRHDRVVDMLYSHLNSRANCKVIKEYRFKTELGRRKPDLLISEGNKTIVLDVQIVGGRDMKRDYLQKCNKYREIRGFETLVKRKCFTSIVEFQSLTISFKGLIEESSSKLLDQLDINEQLRFLMVTSVLRGAWLNWTSFNRMTTMTRRVPISSVLATNY

SEQ ID NO: 25946 - protein, 1003 aa, Cherax destructor
MNVKARWSKEENYMLAVEEVKILREARNGDREAPVGINAMLSQVHVRRTVEAIKGHRKAASYRGLVHRLMSEVVVEGDGFQDVAHPEVVNNDIGGREGVVQIEGRGGFFGISHNINVPTRQTLTQHLLDTLNTYTYTNTSQRLQNMLHYVTLCVEKMREGFGGIEFTNDCIVSVRSLMDEMAETMLTYVAKDERREDQNRDAPQYNNNRGGRRVQRRQIYRDLQKLYNKDRSKCAKIVLEGRWRNLGAPEQQGVPREQLKEFWLSLFARQSEQDERPRRMLVEDHLWQLQVPIDVDEFKRAVVNLNSSSAPGPDWKLNDLKMFPERFWIDLFNMWLYIGYLPKVLRRARTVLLPKVDAPDQPGQYRPITISSIIVRVFHKILATRCVNWVPLHLAQKAFLPTDGLAQNIMLLDAIISESKSRLKPLYAIFLDVKKAYDSVNHPSVRRALEVHNIPPLLIDYIMSTYEDATTNVLGQDGNVTRGVKQGDPLSCILFNIVMNEALLALDTQVGWQLGGNESKISALAFADDVVLVAESEQGINAQLSIFLKQLEASGLEINPQKCATLKLKIVPKIKKWYVDTQNKTEIYGAQVQTLRPTAVYKYLGMHFSSAGRGKPNIQKLRDKLTALDEAPLKPQQRLFILNKHLIPGIIHLMVLGGVCQNMLKTSDKSIRQMVKKWLKLPKDTPLGVYYAPTAVGGLGCVCLSTRIPILRTNRLNAFHNAEDQVIRNLAIHPNTIKALRFVGRSRVKNVIVTTRQVHKWMSSGTSLMRGATYIDAIKIKHNLMPMKMRRSRGRRQINTACEGCAQNESLGHLLQVCPRLHGQRVRRHDTIVDAVATDCLDKKYAVVKEPQIPTVNGTRKPDLIICDVENKKAYVLDVKIGSDSNIATMTDQYKQKVNYYDTGQIRNWAGRWATQQLHLHNEQQDNAVSPTVINIQPIDPGDVVLGAVIITWRGAMAPQSYKILNRELRIPASKVELYVVKAMEGSIQQWRMHNQWGGQRAA

SEQ ID NO: 25947 - protein, 1076 aa, Cherax destructor
MAGVGNGAPFRCLDCGVVYRSKAGLSIHRRSKHPDQYHRDVEGAVMNVKARWSKEENYMLAVEEVKILREARNEDREAPVGINAMLSQVHVRRTVEAIKGHRKAASYRELVNRLMSEVVVEGDGFQDVAHPEVVNNDIGGREGVVQIEGRGGFFGISHNINVPTRQTLTQHLLDTLNTYTYTNTSQRLQNMLHYVTLCVEKMREGFGGFEFTNDCIVSVRSLMDEMAETMLTYVAKDERREDQNRDAPQYNNNRGGRRAQRRQIYRDLQKLYNKDRSKCSKIVLEGRWKNLGAPEQQGVPREQLKEFWLSLFARQSEQDERPRRMLVEDHLWQLQVPIDVDEFKRAVVNSNSSSAPGPDGWKLNDLRMFPERFWIDLFNMWLYIGYLPKVFRRARTVLLPKVDAPDQPGQYRPITISSIIVRVFHKILATRCVNWVPLHLAQKAFLRTDGLAQNIMLLDAIISESKCRLKPLYAIFLDVKKAYDSVNHPSVRRALEVHNIPPLLIDYIMSTYEDATTNVLGQDGNVTRGVKQGDPLSCILFNIVMNEALLALDTQVGWQLGGNESKISALAFADDVVLVAESEQGINAQLSIFLKQLEASGLEINPQKCATLKLKIVPKVKKWYVDTQNRTEIYGAQVQTLRPTAVYKYLGMHFSSAGRGKPNIQKLRDKLTALDEAPLKPQQRLFILNKHLIPGIIHLMVLGGVCQNMLKTSDKLIRQMVRKWLKLPKDTPLGVYYAPTAVGGLGCVCLSTRIPILRTNRLNAFHNAEDQVIRNLAIHPNTIKALRFVGRSRVKNVIVTTRRQELKEWGNVLVGSMDGAGLKEHHFVPQVHKWMSSGSSLMRGATYIDAIKIKHNLMPTKMRRSRGRRQINTACEGCAQNESLGHLLQVCPRLHGQRVRRHDTIVDAVATDCLDKKHAVVKEPQIPTVNGTRKPDLITCDVENKKAYVLDVKIGSDSNIATMTDQYQQKVNYYDTGQIRNWAGRWATQQLHLHNEQQDNAVSPTVINIQPIDPGDVVLGAVIITWRGAMAPQTYKILNRELRIPASKVELYVVKAMEGSIQQWRMHNQWGGQRAA

SEQ ID NO: 25948 - protein, 1001 aa, Cherax destructor
MKIVKPQWELMQCYHKFMFEEQWKLLKAIERLLLIELVNGLMSEVVVEGDGFQDVVHPEVVNNDIGEGKGVIQIEGRGGFFGISHNINVETRQTLTQHLLDTLNTYTNTSQRLQNMLHYVTLCVEKMREGFGGIEFTNECIVSVRSLMDEMAETMLTYVVKDERREDQNRDAPQYNNNRGGRRAQRRQVYRDLQKLYNKDRSKCAKIVLEGRWRNLGAPEQQGVPREQLKEFWLSLFARQSEQDERPRRMLVEDHLWQLQVPIDVDEFKRAVVNSNSSSAPGPDGWKLKDLKMFPERFWIDLFNMWLYIGYLPKVLRRARTVLLPKVDAPDQPGQYRPITISSIIVRVFHKILATRCVNWVPLHLAQKAFLPTDGLAQNIMLLDAIISESKSRLKPLYAIFLDVKKAYDSVNHPSVRRALEVHNIPPLLIDYIMSTYEDATTNVLGQDGNVTRGVKQGDPLSCILFNIVMNEALLALDTQVGWQLGGNESKISALAFADDVVLVAESEQGINAQLSIFLKQLEASGLEINPQKCATLKLKIVPKIKKWYVDTQNKTEIYGAQVQTLRPTAVYKYLGMHFSSAGRGNPNIQKLRDKLTALDEAPIKPQQRLFILNKHLIPGIIHLMVLGGVCQNMLKTSDKSIRQMVKKWLKLPKDTPLGVYYVPTAVGGLGCVCLSTRIPILRTNRLNAFHNAEDQVIRNLAIHPNTIKALRFVGRSRVKNVIVTTRRQELKEWGNVLVGSMDGAGLKEHHFVPQVHKWMSSGTSLMRGATYIDAIKIKHNLMPTKMRRSRGRRQINTACEGCAQNESLGHLLQVCPRLHGQRVRRHDTIVDAVATDCLDKKHAVVKEPQIPTVNGTRKPDLIICDVENKKAYVLDVKIGSDSNIATMTDQYQQKVNYYDTGQIRNWAGRWATQQLHLHNEQQDNAVSPTVINIQPIDPGDVVLGAVIITWRGAMAPQTYKILNRELRIPASKVELYVVKAMEGSIQQWRMHNQWGGQRAA

SEQ ID NO: 25949 - protein, 1033 aa, Campodea augens
MTADGGNTENRVNSSNDDLNDINDRKFATPESWSDMNGVTSCVHCKKEFSLRGIKRHHRYCKENIENQQSNNTTKCLYCSIEFLNINEHIRRSHPQEYRNKLNKPQMQIHGISPDKPECKKKKDSIFNEAIDSYKLVMKTYCEYFESLQSGVGMETEAFQSKVEDFQKYLSSCISLFPGPKHPATKYYEARKTTKTFKNNDRTFKDSSNPQRHSKRDRIRRNEKYQYDLAQYQYYNRRSKVVRRIMNADKPTTCNIKTETIHEAFQRTFSKENNMGRESYGRPISEDDQRKLDENYSINPITTEDVKRSVESMKVDTAAGPDHVLIRAIKHKECYLVISLIANIMLSWNFVPESLKCARTILISKGDDIEDTSNWRPISIASVIRRVIEKILDKQLRSYVDFSSHQRGFKNTPGTHINASIVNGCLQKAKKEKNNCTVVFLDLSKAFDSVGHEHIHRTLIHLPIPELLRSLIVNFLKQNKTQIEVSQGKTKYISLNRGVMQGSPLSPTLFNLSIDFVLKELSEIEISDKFGYKLNNELEAVSVLGFADDTTLICNSRESATSLFRTTESLFKSIGLSINTKKSKTIIIENGKLYEDDLSICDDSKITSTKQGEKIKYLGVSFNAEICLDQDLIIGKLTANINKLVSSPVLKQNQKLIILNQYIWPTLIYPLQVAPLYRLPNSFLGKIDKIIRSAVKEILNLPGDTPNVFIYSPQEYKGLGILKAEWEAYIQHYNICFALLRSNDSFVPYVRDIPEEMQKCLTSLNVSSSLNYEPSIPPSVKESKSEVKQIRTTLRKREYDKWCSLSQKGKGVIQYKDCPAVNKWVFKKYDLTSSEWTTALKMTVNITPVRAIPGRSLDGRHCRHCDEIETLPHVLGYCPKGSLLRNTRHHKIRSVLAAELRKIGYDVHEEVGCIADGGSTKRVDIIAFKKPENKGYILDPTIRFEDSEQQAELVDKEKKNHYEPTVTFMKEKYHLTHVEVIGLYIGARGTITQFFMKNFVRKFNIRRDLVDEIVINVIRSSVHIFQNHVYNVK

SEQ ID NO: 25950 - protein, 896 aa, Campodea augens
MKTYCEYFESLQSGVGMETEAFQSKVEDFQKYLSSRISLFPGPKHPATKYYEARKTTKTFKNNDRTFKDSSNPQRHSKRDRIRRNEKYQYDLAQYQYYNCRSKVVRRIMNADKPTTCNIKTETNHEAFQRTFSKENNMGRESYGRPISEDDQRKLDENYSINPITTEDVKRSVESMKVDTAAGPDHVLIRAIKHKECYLVISLIANIMLSWNFVPESLKCARTILISKGDDIEDTSNWRPISIASVIRRVIEKILDKQLRSYVDFSSHQRGFKNTPGTHINASIVNGCLQKAKKEKNNCTVVFLDLSKAFDSVGHEHIHRTLIHLPIPELLRSLIVNFLKQNKTQIEVSQGKTKYISLNRGVMQGSPLSPTFFNLSIDFVLKELSEIEISDKFGYKLNNELEAVSVLGFADDTTLICNSRESATSLFRITESLFKSIGLSINTKKSKTIIIENGKLYEDDLSICDDSKITSTKQGEKIKYLGVSFNAEICLDQDLIIGKLTANINKLVSSPVLKQNQKLIILNQYIWPTLIYPLQVAPLYRLPNSFLGKIDKIIRSAVKEILNLPGDTPNVFIYSPQEYKGLGILKAEWEAYIQHYNICFALLRSNDSFVPYVRDIPEEMQKCLTSLNVSSSLNYEPSIPPSVKESKSEVKQIRTTLRKREYDKWCSLSQKGKGVIQYKDCPAVNKWVFKKYDLTSSEWTTALKMTVNITPVRAIPGRSLDGRHCRHCDEIETLPHVLGYCPKGSLLRNTRHHKIRSVLAAELRKIGYDVHEEVGCIADGGSTKRVDIIAFKKPENKGYILDPTIRFEDSEQQAELVDKEKKNHYEPTVTFMKEKYHLTHVEVIGLYIGARGTITQFFMRNFVRKFNIRRDLVDEIVINVIRSSVYIFQNHVYNVK

SEQ ID NO: 25951 - protein, 968 aa, Anastatus disparis
MPEPTPHNIVDATPQAVNAREDVAGQQTERPRRSRRLPNTDQRRLINLLNSANTGELLDEAATEVSRFLGRLTQRGPTQQHRRPGSQQRGVSQARRAPDRIQEATRLQRLYRNNRKRAVQEILAGSNRPCNINLATLERHFADSAARRSTGEDWPPVFDQDAPSAVSDERLTRPVTREEILGRLRGRANTAPGPDGLKYSDLVKADPGAHVLAALYNTIFRLEAVPSLWRDTNTILLYKKGDTADASNWRPISLGDTCPKLFAAILADRVKAWAVANERFSSSQKGFLQYEGCYEHNFVLQEILQDAKKHLKEVVVVWLDLENAFGSVPHDSIMRSLEGHGMPVKMRNIISALYDGLRTRIRTADGFTNPIPLQSGVRQGCPLSPDVFNLTLEVVVRAIARTGEGYDIGGRRISNLAYADDVALVADSPAAMRVILDAAEAAARALNITFNPAKCASLHVAGCRDDRVRATEFAIQGVPVQTLGPNDPYEHLGIPTGYQVKQTPVNTMASLLSDMRDIDRSLLAPWQKLDAAATFLLPRIDFIMQGASIEKAHLTEADKIIKKLAKSWLNIPQRASPELAFISPSKGGGGLLPLADMYDLLTVAHAYKMLYAKDPAVGELAMSSLGDVVSERLRKRASNIDIARYLSGDLDLPRSGSLSSYWSKVRTATGRINTKLRLRWLYCQERGVYLLDCGDPQGRGSVAVSPRERNNVISFLRRRLVQHYERSLLAKRDQGKVYEVTRRSGYSNHFLRTGRNTRFCDWRFIHRARLGVLPLNACKRWQTGGDKRCRKCGFVLETIPHVLNNCGVHSAARQLRHNNVQDRLVKASKCPGIIRTNRAVEGARGSASTLRPDIVVRDEVSRKITIIDVTIPFENRIIDFERARQEKIRKYQPLADQLAGNGYVVKVDAFVVGALGAWDPKNEQTMSLLSISRYYAAMMRRFMVSDTIRWSRDIYVEHVSGRRQYVQN

SEQ ID NO: 25952 - protein, 832 aa, Dermanyssus gallinae
MYLTEDTYTTTHRTKSNKDHRVGLAERKLAEGDIRAAVRALMSSDVIAPVDHNTEEELKRKHPPLNNSSSDNIEAMNEPSMDDHRPVSDLLVLEAVGSFALASGAGLDGLRPRHLKDMLDQTIPSSTRLLEELRVLMENAINGRLPPFCLSIFYGANLTALRKKTGSIRPVACGLTLRRLAAKIALATNKRAILAAIKPHQVGVAIKGGAEAAVHAARAFVEVEGPTRVMVKLDFCNAFNSIRRDLLLRKVEQHVPDLLPLVWQSYKEPSLLSWDTMAPIGSENGVQQGDPLGPALFSLGISGLVAQLQSPFNVWYLDDGTLGGPADIVASDIRQIREFQQQGGLALNAEKCEVTAFGGSHEDRARAMTTILEILPSARQLDKADMELLGAPLGRRRIPQVLNDQAAFIEGVSPLLKQMHPQAAMCVWRYSLGAPRLNYILRSAPTDICPDELEAYDTSTREIMSEVLNVKLNDEIWKRASLPIKEGGLGLRSAVDLAPVCYAASLNQFGALSESLVSHDVQQLIHKHQVEAECKIRMKLDPGPLEEHLYQRKLDGYSSRKLARDIQDSLCTRREQAVFRAARDISSGGWLKALPSPHLGTMLDPTTFRMAAAIRIGAPICEPFPCAACGNEVDAYGLHPLSCPRSSGRISRHMELNEIIKRALRKAKLPAKLEPRGLGQDNDKRPDGVTIPLWSHGKCLAWDATVSCTVAPSYLSHSSVSTGWVAEHAEQERRRKYADLENSLHFVPVAMETLRPISSGTAKFIRDLARRMTATTGDQREGEYLRQLLSLAVCRGNAASIIGAMGCAAKYVLESTRHVRTSQLYSDNTITN

SEQ ID NO: 25953 - protein, 979 aa, Dermanyssus gallinae
MTSQPLRHSESVDNRDIQQIHTWTQPTHTCEQCGRVLRTLQGLRAHTTRIHSPNRSALTYNRTERQTNQASADLPRDLSFSPALNNDGLLQLLVQTRKHLRLIRIIPRGVREPCAAAFARALGDFNRKKDVTSWVKLLSIPTLIFALPRHKTDSTLCQLIRRNIRSLENTNLKMYLTEDTYTTTHRTKSNKDHRVGLAERKLAEGDIRAAVRALMSSDVIAPVDHNTEEELKRKHPPLNNSSSDNIEAMNEPSMDDHRPVSDLLVLEAVGSFALASGAGLDGLRPRHLKDMLDQTIPSSTRLLEELRVLMENAINGRLPPFCLSIFYGANLTALRKKTGSIRPVACGLTLRRLAAKIALATNKRAILAAIKPHQVGVAVKGGAEAAVHAARAFVEVEGPTRVMVKLDFCNAFNSIRRDLLLRKVEQHVPDLLPLVWQSYKEPSLLSWDTMAPIGSENGVQQGDPLGPALFSLGISGLVAQLQSPFNVWYLDDGTLGGPADIVASDIRQIREFQQQGGLALNAEKCEVTAFGGSHEDRARAMTTILEILPSARQLDKADMELLGAPLGRRRIPQVLNDQTAFIEGVSPLLKQMHPQAAMCVWRYSLGAPRLNYILRSAPTDLCPDELEAYDTSTREIMSEVLNVKLNDEIWKRASLPIKEGGLGLWSAVDLAPVCYAASLNQFGALSESLVSHDVQQLIHKHQVEAECKIRMKLDPGPLEEHLYQRKLDGYSSRKLARDIQDSLCTRREQAVFRAARDISSGGWLKALPSPHLGTMLDPTTFRMAAAIRIGAPICEPFPCAACGNEVDAYGLHPLSCPRSSGRISRHMELNEIIKRALRKAKLPAKLEPRGLGQDNDKRPDGVTIPLWSHGKCLAWDATVSCTVAPSYLSHSSVSTGWVAEHAEQEKRRKYADLENSLHFVPVAMETLGPISSGTAKFIRDLARRMTATTGDQREGEYLRQLLSLAVCRGNAASIIGAMG

SEQ ID NO: 25954 - protein, 950 aa, Dermanyssus gallinae
MTSQPLRHSESIDNRNIQQIHTWTQPTHTCDQCGRVLRTLQGLRAHTTRIYSPNRSALIYNRTERQTNQASADLPRDLSFSPALNNDALLQLLVQTRKHLRLIRIIPRGVREPCAAAFARALGDFNRKKDVTSWVKLLSIPTTDSTLCQLIRRNTRSLENTYLKMYLTEDTYTTTHRTKSNKDHRVGLAERKLAEGDIRAAVRALMSSDVIAPVDHNTEEKLKRKHPPLYNSSSDNIEAMNKPSMDDHRPVSDLQVLEAVGSFALASGAGLDGLRPRHLKDMLDQTIPSSTRLLEKLRVLMENAINGRLPLFCLSIFYGANLTALRKKTGSIRPVACGLTLRGLTAKIALATNKRAILAEIKPHQVGVAVKGSAEAAVHAARAYVEVEGPTRIMVKLDFCNAFNSIRRDLLLRKVEQHVPHLLPLVWQSYKEPSLLSWDTMTPIGSEHGVQQGDPLGPALFSLGISGLVAQLQSPFNVWYLDDGTLGGPADIVASDIRQIREFQQQGGLALNAEKCKVTPFGGSHEDRARAMTTILETLPSARQLDKADMELLRAPLGRRRIPQVLNDQTAFIEGVSPLLKRMHPQAAMCVWRYSLGAPRLNYILRSAPTDLCPDELEAYDTSTREIMSEVLNVKLNDEIWKRASLPIKEGGLGLRSAVDLAPVCYAASLNQFGALSESLVSHDVQQLIHKHQVEAECKIKIKLDPGPLEEQLYQRKLDGYSSRKLARDIQDSLCTRREQAVFRAARDISSGGWLKALPSLHLGTMLDPTTFRMAAAIRIGAPICEPFPCAACGNEVDAYGLNPLSCPRCSGRISRHMELNEIVKRALRKAKLPAKLEPRGLGQDNDKRPDGVTIPLWSHGKCLAWDATVSCTVAPSYLSYSSVSTGWVAEHAEKEKRRKYADLENSLHFVPVAMETLGPISSGTAKFIRDLARRMTATTGDQREGEYLR

SEQ ID NO: 25955 - protein, 979 aa, Dermanyssus gallinae
MTSQPLRHSESVDNRDIQQIHTWTQPTHTCDQCGRVLRTLQGLRAHTTRIHSPNRFALTYNRTERQTNQASAGLPRDLSFSPALNNDALLQLLVQTRKHLRLIRIIPRGVREPCAAAFARALGDFNRKKDVTLWVKLLSIPTLIFALPRHKTDSTLCQLIRRNIRSLENTNLKMYLTEDTYTTTHRTKSNKDHRVGLAERKLAEGDIRAAVRALMSSDVIAPVDHNTEEELKRKHPPLDNSSSDNIEAMNEPSMDDHRPVSDLLVLEAVGSFALASGAGLDGLRPRHLKDMLDQTIPSSTRLLEELRVLMENAINGRLPPFCLSIFYGANLTALRKKTGSIRPVACGLTLRRLAAKIALATNKRAILAAIKPHQVGVAVKGGAEAAVHAARAYVEVEGPTRVMVKLDFCNAFNSIRRDLLLRKVEQHVPDLLPLVWQSYKEPSLLSWDTMTPIGSENGVQQGDPLGPALFSLGISGLVAQLQSPFNVWYLDDGTLGGPADIVASDIRQIREFQQQGGLALNAEKCEVTAFGGSHEDRARAMTTILEILPSARQLDKADMELLGAPLGRRRIPQVLNDQTVFIEGVSPLLKQMHPQAAMCVWRYSLGAPRLNYILRSAPTDLCPDELEAYDTSTREIMSEVLNVKLNDEIWKRASLPIKEGGLGLRSAVNLAPVCYAASLNQFGALSESLVSHDVQQLIHKHQVEAECKIRMKLDPGPLEEHLYQRKLDGYSTRKLARDIQDSLCTRREQAVFRAARDISSGGWLKALPSPHLGTMLDPTTFRMAAAIRIGAPICEPFPCAACGNEVDAYGLHPLSCPRSSGRISRHMELNEIIKRALRRAKLPAKLEPRGLGQDNDKRPDGVTIPLWSHGKCLAWDATVSCTVAPSYLSHSSVSTGWVAEHAEQEKRRKYADLENSLHFVPVAMETLGPISSGTAKFIRDLARRMTATTGDQREGEYLRQLLSLAVCRGNAASIIGAMG

SEQ ID NO: 25956 - protein, 979 aa, Dermanyssus gallinae
MTSQPLRHSESVDNRDIQKIHTRTQPTHTCDQCGRVLRTLQGLRAHTTRIHSPNRSALTYNRTERQTNQASADLPRDLSFSPALNNDGLLQLLVQTRKHLRLIRIIPRGVREPCAAAFAKALGDFNRKKDVTSWVKLLSIPTLISALPRHKTDSTLCQLIRRNIRSLENTNLKMYLTEDTYTTTHRTKSNKDHRVGLAERKLAEGDIRAAVRALMSSDVIAPVDHNTEEELKRKHPPLNNSSSDNIEAMNEPSMDDHRPVSDLLVLEAVGSFALASGAGLDGLRPRHLKDMLDQTIPSSTRLLEELRVLMENAINGRLPPFCLSIFYGANLTALRKKTGSIRPVACGLTLRRLAAKIALATNKRAILAAIKPHQVGVAVKGGAEAAVHAARAFVEVEGPTRVMVKLDFCNAFNSIRRDLLLRKVEQHVPDLLPLVWQSYKEPSLLSWDTMAPIGSENGVQQGDPLGPALFSLGISGLVAQLQSPFNVWYLDDGTLGGPADIVASDIRQIREFQQQGGLALNAEKCEVIAFGGSHEDRARAMTTILEILPSARQLDKADMELLGAPLGRRRIPQVLNDQTAFIEGVSPLLKQMHPQAAMCVWRYSLGAPRLNYIFRSAPTDLCPDELEAYDTSTREIMSEVLNVKLNDEIWKRASLPIKEGGLGLRSAVDLAPVCYAASLNQFGALSESLVSHDVQQLIHKHQVEAECKIRMKLDPGPLEEHLYQRKLDGYSSRKLARDIQDSLCTRREQAVFRAARDISSGGWLKALPSPHLGTMLDPTTFRMAAAIRIGAPICEPFPCAACGNEVDAYGLHPLSCPRSSGRISRHMELNEIIKRALRKAKLPAKLEPRGLGQDNDKRPDGVTIPLWSHGKCLAWDATVSCTVAPSYLSHSSVSTGWVAEHAEQEKRRKYADLENSLHFVPVAMETLGPISSGTAKFIRDLARRMTATTGDQREGEYLRQLLSLAVCRGNAASIIGAMG

SEQ ID NO: 25957 - protein, 979 aa, Dermanyssus gallinae
MTSQPLRHSESVDNRDIQQIHTWTQPTHTCDQCGRVLRTLQGLRAHTTRIHSPNRSALTYNRTERQTNQASADLPRDLSFSPALNNDGLLQLLVQTRKHLRLIRIIPRGVREPCAAAFARALGDFNQKKDVTSWVKLLSIPTLIFALPRHKTDSTLCQLIRRNIRSLENTNLKMYLTEDTYTTTHRTKSNKDHRVGLAERKLAEGDIRAAVRALMSSDVIAAVDHNTEEELKRKHPPLNNSSSDNIEAMNEPSMDDHRPVSDLLVLEAVGSFALASGAGLDGLRPRHLKDMLDQTIPSSTRLLEELRVLMENAINGRLPPFCLSIFYGANLTALRKKTGSIRPVACGLTLRRLAAKIALATNKRAILAAIKPHQVGVAVKGGAEAAVHAARAFVEVEGPTRVMVKLDFCNAFNSIRRDLLLRKVEQHVPDLLPLVWQSYKEPSLLSWDTMAPIGLENGVQQGDPLGPALFSLGISGLVAQLQSPFNVWYLDDGTLGGPADIVASNIRQIREFQQQGGLALNAEKCEVTAFGGSHEDRARAMTTILEILPSARQLDKADMELLGAPLGRRRIPQVLNDQTAFIEGVSPLLKQMHPQAAMCVWRYSLGAPRLNYILRSAPTDLCPDELEAYDTSTREIMSEVLNVKLNDEIWKRASLPIKEGGLGLRSAVDLAPVCYAASLNQFGALSKSFVSHDVQQLIHKHQVEAEYKIRMKLDPGPLEEHLYQRKLDGYSSRKLARDIQDSLCTRREQAVFRAARDISSGGWLKALPSPHLGTMLDPTTFRMAAAIRIGAPICEPFACAACGNEVDAYGLHPLSCPRSSGRISRHMELNEIIKRALRKAKLPAKLEPRGLGQDNDKRPDGVTIPLWSHGKCLAWDATVSCTVAPSYLSHSSVSTGWVAEHAEQEKRRKYADLENSLHFVPVAMETLGPISSGTAKFIRDLARRMTATTGDQREGEYLRQLLSLAVCRGNVASIIGAMG

SEQ ID NO: 25958 - protein, 979 aa, Dermanyssus gallinae
MTSQPLRHSESVDNRDIQQIHTWTQPTHTCDQCGRVLRTLQGLRAHTTRIHSPNRFALPYNRTERQTNQASADLPRDLSFSPALNNDALLQLLVQTRKHLRLIRIIPRGVREPCAAAFARALGDFNRKKDVTSWVKLLSIPTLIFALPRHKTDSTLCQLIRRNIRSLENTNLKMYLTEDTYTTTHRTKSNKDHRVGLAERKLAEGDIRAAVRALMSSDVIAPVDHNTEEELKRKHPPLDNSSSDNIEAMNEPSMDDHRPVSDLLVLEAVGSFALASGAGLDGLRPRHLKDMLDQTIPSSTRLLEELRVLMENAINGRLPPFCLSIFYGANLTALRKKTGSIRPVACGLTLRRLAAKIALATNKRAILAAIKPHQVGVAVKGGAEAAVHAARAYVEVEGPTRVMVKLDFCNAFNSIRRDLLLRKVEQHVPDLLPLVWQSYKEPSLLSWDTMTPIGSENGVQQGDPLGPALFSLGISGLVAQLQSPFNVWYLDDGTLGGPADIVASDIRQIREFQQQGGLALNAEKCEVTAFGGSHEDRARAMTTILEILPSARQLDKADMELLGAPLGRRRIPQVLNDQTVFIEGVSPLLKQMHPQAAMCVWRYSLGAPRLNYILRSAPTDLCPDELEAYDTSTREIMSEVLNVKLNDEIWKRASLPIKEGGLGLRSAVNLAPVCYAASLNQFGALSESLVSHDVQQLIHKHQVEAECKIRMKLDPGPLEEHLYQRKLDGYSTRKLARDIQDSLCTRREQAVFRAARDISSGGWLKALPSPQLGTMLDPTTFRMAAAIRIGAPICEPFPCAACGNEVDAYGLHPLSCPRSSGRISRHMELNEIIKRALRKAKLPAKLEPRGLGQDNDKRPDGVTIPLWSHGKCLAWDATVSCTVAPSYLSHSSVSTGWVAEHAEQEKRRKYADLENSLHFVPVAMETLGPISSGTAKFIRDLARRMTATTGDQREGEYLRQLLSLAVCRGNAASIIGAMG

SEQ ID NO: 25959 - protein, 979 aa, Dermanyssus gallinae
MTSQPLRHSESVDNRDIQQIHTWTQPTHTCDQCGRVLRTLQGLRAHTTRIHSPNRFALTYNRTERQTNQASADLPRDLSFSPALNNDALLQLLVQTRKHLRLIRIIPRGVREPCAAAFARALGDFNRKKDVTSWVKLLSIPTLIFALPRHKTDSTLCQLIRRNIRSLENTNLKMYLTEDTYTTTHRTKSNKDHRVGLAERKLAEGDIRAAVRALMSSDVIAPVDHNTEEELKRKHPPLDNSSSDNIEAMNEPSMDDHRPVSDLLVLEAVGSFALASGAGLDGLRPRHLKDMLDQTIPSSTRLLEELRVLMENAINGRLPPFCLPIFYGANLTALRKKTGSIRPVACGLTLRRLAAKIALATNKRAILAAIKPHQVGVAVKGGAEAAVHAARAYVEVEGPTRVMVKLDFCNAFNSIRRDLLLRKVEQHVPDLLPLVWQSYKEPSLLSWDTMTPIGSENGVQQGDPLGPALFSLGISGRVAQLQSPFNVWYLDDGTLGGPADIVASDIRQIREFQQQGGLALNAEKCEVTAFGGSHEDRSCAMTTILEILPSARQLDKADMELLGTPLGRRRIPQMLNDQTVFIEGVSPLLKQMHPQAAMCVWRYSLGAPRLNYILRSAPTDLCPDELEAYDTSIREIMSEVLNVKLNDDIWKRASLPIKEGGLGLRSAVNLAPVCYAASLNQFGALSESLVSHDVQQLIHKHQVEAECKIRIKLDPGPLEEHLYQRKLDGYSTRKLARDIQDSLCTRREQAVFRAARDISSGGWLKALPSPHLGTMLDPTTFRMAAAIRIGAPICEPFPCAACGNEVDAYGLHPLSCPRSSGRISRHMELNEIIKRALRKAKLPAKLEPRGLGQDNDKRPDGVTIPLWSHGRCLAWDATVSCTVAPSYLSHSSVSTGWVAEHAEQEKRRKYADLENSLHFVPVAMETLGPISSGTAKFIRDLARRMTATTGDQREGEYLRQLLSLAVCRGNAASIIGAMG

SEQ ID NO: 25960 - protein, 979 aa, Dermanyssus gallinae
MTSQPLRHSESADNRDIQQIHTWTQPTHTCDQCGRVLRTLQGLRAHTTRIHSPNRSALTYNRTERQTNQASADLPRDLSFSPALNNDGLLQLLVQTRKHLRLIRIIPRGVREPCAAAFARALGDFNRKKDVTSWVKLLSIPTLIFALPRHKTDSTLCQLIRRNIRSLENTNLKMYLTEDTYTTTHRTKSNKDHRVGLAERKLAEGDIRAAVRALMSSDVIAPVDHNTEEELKRKHPPLNNSSSDNIEAMNEPSMDDHRPVSDLLVLEAVGSFALASGAGLDGLRPRHLKDMLDQTIPSSTRLLEELRVLMENAINGRLPPFCLSIFYGANLTALRKKTGSIRPVACGLTLRRLAAKIALATNKRAILAAIKPHQVGVAVKGGAEAAVHAARAFVEVEGPTRVMVKLDFCNAFNSIRRDLLLRKVEQHVPDLLPLVWQSYKEPSLLSWDTMAPIGSENGVQQGDPLGPALFSLGISGLVAQLQSPFNVWYLDDGTLGGPADIVASDIRQIREFQQQGGLALNAEKCEVTAFGGSHEDRARAMTTILEILPSARQLDKADMELLGAPLGRRRIPQVLNDQTAFIEGVSPLLKQMHPQAAMCVWRYSLGAPRLNYILRSAPTDLCPDELEAYDTSTREIISEVLNVKLNDEIWRRASLPIKEGGLGLRSAVDLAPVCYAASLNQFGALSESLVSHDVQQLIHKHQVEAECKIRMKLDPGPLEEHLCQRKLDGYSSRKLARDIQDSLCTRREQAVFRAARDISSGGWLKALPSPHLGTMLDPTTFRMAAAIRIGAPICEPFPCAACGNEVDAYGLHPLSCPRSAERISRHMELNEIIKRALRKAKLPAKLEPRGLGQDNEKRPDGVTIPLWSHGKCLAWDATVSCTVAPSYLSHSSVSTGWVAEHAEQEKRRKYADLENSLHFVPVAMETLGPISSGTAKFIRDLARRMTATTGDQREGEYLRQLLSLAVCRGNAASIIGAMG

SEQ ID NO: 25961 - protein, 979 aa, Dermanyssus gallinae
MTSQPLRHSESVDNRDIQQIHTWTQPTHTCDQCGRVLRTLQGLRAHTTRIHSPNRFALTYNRTERQTNQASADLPRDLSFSPALNNDALLQLLVQTRKHLRLIRIIPRGVREPCAAAFARALSDFNRKKDVTSWVKLLSIPTLIFALPRHKTDSTLCQLIRRNIRSLENTNLKMYLTEDTYTTTHRTKSNKDHRVGLAERKLAEGDIRAAVRALMSSDVIAPVDHNTEEELKRKHPPLDNSSSDNIEAMNEPSMDDHRPVSDLLVLEAVGSFALASGAGLDGLRPRHLKDMLDQTIPSSTRLLEELRVLMENAINGRLPPFCLSIFYGANLTALRKKTGSIRPVACGLTLRRLAAKIALATNKRAILAAIKPHQVGVAVKGGAEAAVHAARAYVEVEGPTRVMVKLDFCNAFNSIRRDLLLRKVEQHVPDLLPLVWQSYKEPSLLSWDTMTPIGSENGVQQGDPLGPALFSLGISGLVAQLQSPFNVWYLDDGTLGGPADIVASDIRQIREFQQQGGLALNAEKCEVTAFGGSHEDRARAMTTILEILPSARQLDKADMELLGAPLGRRRIPQVLNDQTVFIEGVLPLLKQMHPQAAMCVWRYSLGAPRLNYILRSAPTDLCPDELEAYDTSTREIMSEVLNVKLNDEIWKRASLPIKEGGLGLRSAVNLAPVCYAASLNQFGALSESLVSHDVQQLIHKHQVEAECKIRMKLDPGPLEEHLYQRKLDGYSTRKLARDIQDSLCTRREQAVFRAARDISSGGWLKALPSPQLGTMLDPTTFRMAAAIRIGAPICEPFPCAACGNEVDAYGLHPLSCPRSSGRISRHMELNEIIKRALRKAKLPAKLEPRGLGQDNDKRPDGVTIPLWSHGKCLAWDATVSCTVAPSYLSHSSVSTGWVAEHAEQEKRRKYADLENSLHFVPVAMETLGPISSGTAKFIRDLARRMTATTGDQREGEYLRQLLSLAVCRGNAASIIGAMG

SEQ ID NO: 25962 - protein, 1168 aa, Phylloscopus trochilus
MGCLVTNDNEIDKIQGGITAAPAVRCEGAMRCHVTKDNEDARDQEKVNTPPLAPGEPTAFSNHKSTPIQLANNEELQDHPVILVPDKNPPCPCCGVKMNKMLGLIDHLLRSHGVRDCRFKCSKCDLENTNLHSIACHCAKCKGKLKEPPPGKWPCDVCQMSFQTKIGLGQHKRIAHPVARNQERIEATRPKEISARGARKKTWTDEEESLLIKLSQQYEGNKYINKLIADHMPSKTTKQISDKRRLLLLKQQAPTGSQNTNESGEQQGEKSHKPATQEDAPINLLKKHYEESIPSKISDGTFIIFQNAFQELLQQTIKDPVNIIDEATRVCMRKLKGMHHLGKNNRKPKKGHSQHMKSKATKWMAKRAVKKGNYLRMQRLFYTDRGRLGRIILDDVEGLKCQIPASEVCSVFRTRWETPGEFKGLGNFAAEGTTDNTKFLQLITAKEIEKNINEMAKTSAPGPDEISLGDLYKADPKFSLMMEIFNLWLVAGTVPDQLKTCRTVLLPKSDQPERLKDINNWRPITIVSTVMRLFSRVLTARLSKACPINPRQKGFTRAPGCSENLQLLQLLLKTAKKEHKEMAVVFVDIAKAFDTVSHRHIIASLRQRKVDEHVINLIQSMYVNTSTCINTKDETSAPINILKGVKQGDPMSPLLFNLALDPLLCKLEKEGCGYQHGGAKITAMAFADDLVLLSDSWEGMKHNIKILETFCDITGLKTQGEKCHGFYIRPTKDSYTVNDSPPWTVKDTPLNMIPPGESEKYLGLRVDLWTGIAQADLLAKTNTWLHRLGRTLLKAMQKIDLLKVYTIPRLFYVADHADTPFGLLSSIDQAVRTKVKEWLHLPSCTCDALLYSSTRDGGLGIPHLEGLIPSIQARRLHRLAQSSDEILKDLLKGEGADLRYKKLWVKAGGDKKKIPSIWSTEPTGAVQAPRSVVLSEWEAPTAKLKYPRPCNWRKKEFEKWQQLVSQGRGIAQFENDSISNAWITSYRSLPHRKLLTALQLRANIYPTREFLARGRGDQYIKTCRHCDAKNETCSHIIGKCPITKDARIQRHNNICEQLTKIAQHKDWTVFQEPHIRDSNGQLFKPDLIFVKDDRAQVVDVTVRYEREESTLEKAAKEKVAKYQHLHKEIEELTNTKQVTFIGFPLGSRGKWYPENGMLLETMGLSKRE

SEQ ID NO: 25963 - protein, 1250 aa, Cyanistes caeruleus
MVKALKLLRVSTATQTNFEDLWQVKSPQKPNFKPSELGREVWKSLKLEFYNSIHCSEECEAHCLGREGLEDYPDVYWEETMTCLSLNDQGTDKGQERITTPPPTGEEAAVLSEPEEATIHPPNNGESEGCPVISVPDKNPPCPCCGVKMNKMLGLIDHLLRTHGIRECKFKCAKCDLENTNFHSIACHYPKCKGKTKEPSPGKWPCNVCQMSFQTKIGLGQHKRKAHPAIRNQERIEAAKPKETSARGAHKKCWSEEEENLLIQLIKQYEGNRNINKLIAEHIPSKTSKQISDKRRCLVSKQPAPFGLQLRGKTERQPQEKSQKPPQRKETTVNQLKKHYEEIVPSKISDGTFVVYQEAFQEILKKKTENPAHIISEITKDCMKVFKGMHSRGKNTRKTKQGHLQPKKRQAAKWMSKRAIKKGQYLRFQKLFYTDRGKLARIILDDVEGLKCQIPANEISSVFRERWETPGSFKGFEDFEAEGKTDNTKFLPLITAKEIDKNIKEMAKTSAPGPDDITLEDLCKADPKFSLLTEIFNLWLISGTVPDQMKNCRTVLLPKSDRPDRLKDINNWRPITIGSTVLRLFSRVLTARLSKACPINPRQKGFTRAPGCSENLQLLQLLLKTAKREHNEIAVVFVDIAKAFDTVSHQHIIEGLRQRKVDEHIINLIQSMYVNTSTCIRTKDETSAPINILKGVKQGDPMSPLLFNLALDPLLCKLEKEGQGYKCDGANITAMAFADDLVLLSNSWEGMMRNIKILETFCNITGLKTQGEKCHGFYIKPTKDSYTINDCPPWTVNNTPLNMISPGESEKYLGLQVDPWVGIAQAELLTKINTWLQRIGKAHLKPLQKIDLLKVYTIPRLYYIADHTDTPFVLLKSIDQAVRTKVKEWLHLPACTCDALLYSSTRDGGLGISRLEGLIPSIQARRLHRLAQSKDEILTNLLKGEGAELRYKKLWVKAGGDKSKIPSIWTTKPMVAVQAPTSEILSEWEAPTAKFKYPKPCNLRKKEFEKWKQLVSQGRGITHFENDSISNAWLTSYRAIHHRKLITALQLRANVYPTREFLARGRDGQYIKSCRHCKAENETCSHIIGKCPITQDARIQRHNKICDLLTNIAQRKDWTVFHEPHIRDSNGQLFKPDLIFVKDNQAQVVDVTVRYESENCTLENAAKEKVTKYQHLEKEIQELTNAQQIDFIGFPLGSRGKWYPGNNTLLETLGLSKRELERTSKTLASRALESSVDIIHIFASKSRAPG

SEQ ID NO: 25964 - protein, 1031 aa, Bradysia odoriphaga
MDSDSDGTNDNICPLCYRDFETLTGLKQHWSKSHTPEEFEEAVERNAQGLAPLPVGPTIPPHNQIPTQSASTTVQTRETCPICGFVAKNERGLTVHERIHSRQPIPGDQQAQQSQVDLDFNDEASVIQRFGEILYKCKCSIPVVRIIQKSVRTVVCQELTKVIELAAAKNDVYSLLRLLCFPVIILNTIPKSNTKSTHCPNIIRQNLAIFSKLNDVPSLFKELLNLLAVDLPKKPKSHSEKLLIKIAQRKVAEGDISGAVRVLSSQEGIAECTPETIEKLKEKHPDETIPTDSECDPTDASFETSVEEVTNSIKHFPISSSGGIDCLRPRHLKDLISFTCGDASNKLLVSISKLVNVIRAGKICSKICPIFYGAALIALAKLNGDIRPIAIGLVWRRLAGKIGVFAVKESIADILKPIQNGFGVKGGAEAIVHAVRTFIEAQHGSPMVILKFDFKNAFNELFRKLLLKSIKEHAPSLYPMLRQAYSCPSSLFFGDIIIDSKRGTQQGDPCASLAFCLAIMKLTHSLRSRLNAWFADDGTIGDNVDTILEDVAKVLAFSDESGLTLNSSKCEVYFINSPPDVKAETLEKLNRMLPGVKVLDDASFQLLGSPITIDGIPDALAKTQNTVMTLCKRLTLLDVHPALRLLRSSLSSPRFQHLLRCSPTFAHSHQLSEIDNFYRLTCEAITNNELNSSSWTQASLPLAFAGLGIRKLVDLAHPAYFASVYQSQALSNRILANYNLCVLNDRFITSVESYPTEWIPVRPEQKICQSSWDLLRVNHIYNELLLSSDLNDRARLLASSSKTSSKWLQAVPSHQLGLLLDNDTARIAVALRLGCNVCEPHICVCGKLVKSNGHHGLSCNKMIGKYFRHAEFNKTMSMAMTSAGFPNNTEPPGLSRRDGKRPDGLTCYPWSHGRSLIWDVTVVDTLAASYINQTSKKCGAAADQAERDKHNHYTELKSRYHFTPVAFETLGSVGPETELFLSKLGKLMKRRTGEPRSLDFLLQRISIAIQRGNAVSIRNTFCDTSDNNVFL

SEQ ID NO: 25965 - protein, 1061 aa, Cantharis rustica
MTLLSQGRFVNQHLVSIMVGRTLEAVKSRRRRPDYVDLVKELRAERGACAIPVVDVVEEVEAELLAESLERSQLPEGELVETSCFGEPRGADEWINRSPPPEQVRRKIRTPPVSCLKAAGPSDPSGPRRPTVWSRRLRSAAGTEAKDTGPSPRSAGEAAEETGAGRRSRVVKSPRLAAESPPNPGLIPTTHMAAAQNPGPKADGSLSPQTPVIRTETPPALARPLDCPILSGDPIALHIAALFSEWDSWNDSDLSVFSAVSQTTPGNRAILRDELAKWVSGALKPSGGKECIFEGRDIGAEPVQPPRASLEKGLKDLFGAASPPDEAPIRDPKVAPNLWTPVTGQEIENALASSKPSSCGPDGVSLHRLRKLPRFRLELFLNATLVSGALPADLLVSKTVMIPKTDLGLENPDNWRPISVPCAMTRLLHKILASRLSKLPLHPHQRGFTAQNGVFLNTVTLDAMIRNRRKTGRPYHLLALDLRKAFDTVSHNSVLRAMRRFGIDERLASFVMEGYRRGQTVLACWEMGSTGKDPIRVTRGVKQGDPLSPILFNLVMDELVCDLEATGLGLPVNDLVKVACLAYADDLVIASDNYPHALRLLRHCTDFFEQRGLSLNVAKCASVCCNVVPGKKVLYSSTQSRFFVGGVPIKALGPMDFVRYLGSAYNHLGQAKPLFDDLMLQLSRLSGAALKPQQKIKLLKIYLIPRFLARLTSTRVTLGILKGADRIIRVFVRRTLHLVRTCSDAFLHAPTRLGGLGIQSLYTAVPGLLHSRFVEAMVSDQLLTRAALASPECEKLWERINAWTRRTGGTSKAAVKRAWGERLEASYSGNGLIQGSGTPFSSRWIDAPPTFWSGEEYVQAAQLRGNLLPTMGIPSNPPAQRRCRAGCDRVESLSHVLQGCPLSHWPRIRRHDRVCGRLAALARRRGWVVESEPRLRARSGRLYKPDVIMIKAEKVVVCDVAIVWEGPSSMGVAFRDKVARYSAPDVMEALVERFPGAEIIVTALVVGARGTWCSENSEISAILRLSSIEAASIVQNVVGGSIIIHSTFMRTVWRSRAERNG

SEQ ID NO: 25966 - protein, 981 aa, Aelia acuminata
MRLMHKAEYNERINLPSVKIRWSEEELRLMARWEAEAVLRGIRYMNQYLLPKMPDRTLESVKGVKRRTDYKAFVEQALAEVQVRPPSPEFSGVSEADDPPSSAWATGLQLAITELMQQTIMPGEGFKAEELRSIAERSLEGHDVSYELGNWARECFPKPNEAGSREPRRTPKSEPYLSRRVTRRREYARVQALWKRNRTRAAQEVLDGRRKEGAHSLEDLEAYWAPQMEREVDIGVPQPLRREGEPIDLTELWGPISAEDAGACMVSVRSAPGPDGISARAWNAVPHEIKALVFNTIIRLGKIPESLNECRTVFIPKSDRPRGPGDYRPISIASVIVRHFHKIVAARMERMKLNDYRQRAFIRTDGVAENIVILDTLLAEARAHRKEIHLATVDLAKAFDSLDHGAIVRILKARGFPDEFVSYISNVYGNSATRFEADGGTGRKVAVRRGVRQGDPMSPMLFNLAVDEILAAIPQEVGFTLGNSTASCLAFADDLVVIASSQVGMKLSLQRLQDAASGLGLSINPAKCHALSIVPDGHTKRVKVVTKCLFKLGDTPLPQASAVSEWKYLGVKMTPEGTGSLEMDLTGLLRNVSKAPLKPQQRLEILRTYLMPRLTHCLILGGATDGRLLQLDRQVRRSVRGWLRLPKDVAVGYFHAQVRSRGLGIPSLRTMVPELVVKRLSRLEESDSPVVRAAWQSRRVQRRLDWGRWMLSRFGIPTEGPRAGRKEYWDNRLHTSVDGVELKESARTRESTRWISNATSGIPGRDYIQYVHVHSNSLPTRVRTSRGSRRGDREIKCRAGCPDTETLAHVIQHCHRTHGGRVLRHNAVCNVIATDLRRKGWQVEQEPHVQTEEGLRKPDISATKDGSTVVVDAQIVSGARPLNLAHERKRRYYADNLSLIVGIAGRTGVPQEKVQVTTCTISWRGVWSPRSHGDLLLLGISPGVLGGVVSRVLQGSHTNWARFNKLTSTRPTRPPRRCTRH

SEQ ID NO: 25967 - protein, 968 aa, Aelia acuminata
MARWEAEAVLQGIRYLNQYLLPKMPNRALESVKGVRRRTDYKAFVEQALVELQVRPPSPELSGVSEADGPPNSAWATGLQLAITELMQQTIMPGEGFKAEELRSIAERSLEGHDVSHELGNWARECFPKPNEAGSREPRRTPKSEPYLSRRVTRRREYARVQALWKRNRTRAAQEVLDGRRKEGAHSLEDLEAYWAPQMEREVDIGVPQPLRREGEPIDLTELWGPISAEDAGACMVSVRSAPGPDGISARAWNAVPHEIKALVFNTIIRLGKIPESLNECRTVFIPKSDRPRGPGDYRPISIASVIVRHFHKIVAARMERMKLNDYRQRAFIRTDGVAENIVILDTLLAEARAHRKEIHLATVDLAKAFDSLDHGAIVRILKARGFPDEFVSYISNVYGNSATRFEADGGTGRKVAVRRGVRQGDPMSPMLFNLAVDEILAAIPQEVGFTLGSSTASCLAFADDLVVIASSQVGMKLSLQRLQDAASGLGLSINPAKCHALSIVPDGHTKRVKVVTKCLFKLGDTPLPQASAVSEWKYLGVKMTPEGTGSLEMDLTGLLRNVSKAPLKPQQRLEILRTYLMPRLTHCLILGGATDGRLLQLDRQVRRSVREWLRLPKDVAVGYFHAQVRSGGLGIPSLRTMVPELVVKRLSRLEESDSPVVRAAWQSRKVQKRLDWGRWMLSRFGIPTEGPRAGRKEYWDTRLHTSVDGVELKESARTRESTRWISNATSGIPGRDYIQYVHVHSISLPTRVRTSRGSRRGHREIKCRAGCPDTETLAHVIQHCHRTHGGRVLRHNAVCNVIATDLRRKGWQVEQEPHVQTEEGLRKPDISATKDGTTVVVDAQIVSGARPLNLAHERKRRYYADNLSLIVGIAGRTGVPQEKVQVTTCTISWRGVWSPRSHGDLLSLGISPGVLGGVVSRVLQGSHTNWTRFNKLTSTRPTCPPRRCEGEESPRGRGRRKSELPVG

SEQ ID NO: 25968 - protein, 915 aa, Lacerta bilineata
MNLALMEKFPERTAEAIKAHRRQQAYRELVAAYTQEQLEVAARSAPQPVVEASNTQWRNRLIQHLQRLPRMTATTEHLERLDRLSATVECRSLTDVFDELSLVVRGMQGTRPWRAQRGERSSQETPTSNRRKRRKQFAKFQHLWHKSPTKCIKWALDKNRDAPVENGADLFPFWEKLMTRAPDCTPGPGPRRNEITSLWEPITAAEIKRALPSASTAPGPDGMTVEQVKRLPLGVLERLFNLIMVCGKCPQSMLGARTTLIPKKEHARDPGDFRPITVSPVLTRVFHKVLAARLTREVDLDPRQRAFQQFDGCSENIFLLDMVLRYHKQRSKPLYIASLDVAKAFDSVAHNTITETLQVMGVPDPMTHYISDVYDRSTTVLSCGGATSQEFHPRCGVKQGDPMSPCIFNMIMDRLLRKIPKEVGADLGEGVTVNGVAFADDLVLLASTPVGLQTTIDIVADHLALCGLTVNSGKSLTVSLETVPREKKTVVNPRRVFTCNNRPLQALKRSDQWRYLGVPFTPDGRMSARPLDRLRELLDTIGKAPLKPQQRMFGLRTVLLPSLYHQLSMGSTTVGLLNKVDRCVRTAVRKWLGLPDSTPVAYFHAKVGDGGLGIPAMRWMMPRLRRDQLLRLPLQRTEESTSGTFLRRELSLVEGRLLERGNSLFTSQAQDRRWASLLYQSVDGCALRESGKTRSQHDWVYGCTKFLSGKDYRNSIRMRINALPTRSRLARGRRADRLCRGGCQMPETLNHVLQVCYRSHAARVRRHDAVVKYISKGLRRQGYHVDLEPHFRTSEGLRKPDIVASIGRTARIIDAQVVGEQADLRRAHAQKVQYYAGNSSLLEMVKQRYQVDDLCTTSATLSCRGVWSDRSAEDLLAMGIVRKQDLKVLSSRVVLGGIYAHSVFNKTTASLSAGW

SEQ ID NO: 25969 - protein, 995 aa, Eurytoma brunniventris
METHVCDTCLRAFTTATGLGVHVRARHAEVMNDRIVTTRVRPRWSEEEMSRVAALELSLSGTTAMNTAIVDKLGGVRTLEAIKGLRKQQKYKDLLGRLAEELGRATETAATPTEGNLEEESNTVAALREELKQAILQDKTLIREDTPHGELLLRAISAVEHNHGDPLPMIEEWIAKVVVPEEKDDEEDHVRDRMQRENRYMPANGNRTRRKEKRRREYDRIQKLWRKNMSKAAHIVLDGDNDSAVHPSLEQQVEFWKPIFNGNGGSTTNDITNLNDENLMSAGPNAHLWKPITAAEIKALKPMNGTAPGPDRITTSDWSAIADSIKRLIFNIILHSEDCPQSLVDSRTVLIPKEKNSMDPAKYRPLSISSVVIRHLHKVLAARLAQCPMFHERQRAFLAADGCAENVFLLSAILDDAHNKQKELHLAVLDVKKAFDSVSRAAIEKQLMNKKLPKPMIRYIMKQYRKGRTIIEVDRQKSERIQVNEGVKQGDPLSPLIFDATIDRAIEAIPLTVGYTINGMTINCLAFADDIVLIASTEDGLQESIGALEEALKELGLTLMPAKCSGLSLKPSGKDKKLKVLQEARFRIQGQLIRQNGLTDTFKYLGVQFNHKGPVESKIEGQLEQLLGNVTSAPLKPQQRLRILKTFLVPRFMHALVLGKASYGTLRRADKAIRKRVREWLRLPHDVPKSFMHADVKEGGLGIISLESQIPDLLRKRIMKLGVQTTSAASIILGSDWVETRLRWCRQSSISPWAWPHYLHVSVDGYELREAKGCTASTSWVNDDFVAIPANEWVKYLHVRINALPSKIRTSRGRRYENTNCRAGCDRRETTAHIIQECHRTHGGRVLRHDKIAETIAMELNKKGWTVERERIFRTSEGNRKPDIIAVRDNAIQVLDVQIVSGHMSLGESHRRKVDYYNTWEVKRGITNYLRRHDVPVNVSAVTISWRGIWASQSENLVHRMGISKRVLRGLTTRVLMGSYLNFSTFNKATYRRSG

SEQ ID NO: 25970 - protein, 1201 aa, Culicoides sonorensis
MPNTTNMMSTRRRRKPDRNTVASGSPNNSRVSDLGTGSDAISDLQPQRTTQNNNVVENTQAITSNANSSTGSSIVTQQGTAVRGGRTEGRSRIKWTKDMNMEVMRAFYKINQCEDNPRTGYRRLLHEEYSRLRPDLGLTEQNIVDRWKLIITKKYLTSQELENIKREIGYELHQQDIVEQIEDIEAANHPQQIEPPTETTSDDEHFFSFTEAPESDPMKEKFYSYLELYRGTIPSSRPHIPILKNVRKATNLVSKMNEILMQHLIECEDFEEILLTLYCAAVTVIEMNGQATYERSQTMNRSNQNQDPAWKTRLEKSINDFRGKADLIGEYLKGTRSTKLKRKVAVLCHQHKINLKSTEAPQKLLELKDSFRQKAKVKGCRLSRYNELSKRKAQNHQFYVSRKNFFRSLDANTTSHSNTPDIDDTKFKQYWNSIWATEKHYNQNAEWVQMIQDSYGHVERQIVYEFTSDDIKNAVKKTHNWKCPGPDKLHNFWLKYFTAIHHPLAKIFSKLLYYPELIPTHLMEGNTFLLFKKGDPNQPENYRPITCLSVVYKLFTALINDKIYNHCEAHGLISEEQKGCIRGALGCKQQLTIDSVIMKQVHTRKRNLFMCFIDYTKAFDSTPHDWLLKCLDIFKIDPKLRRLLQSMMRTWHVNLHVGKTQLGKIHIKRGIFQGDSLSPMWFILALNPLSILLNKTGLGYKPNISENFRLNHLLFMDDLKLYADTRQKLNELISTVKSFSDDICMSFGLEKCATIGIKRGQLDDENEVFEGITDLEPGSMYKYLGIPQNMKIDHTELKKQFTEKYKKRLTKVLNTKLTGKNIITSINSWAIPVLTYSFGIVKWSNSDLEALDRTTRRMLKKFRCLHPNSSIIRLYLPRKEGGRGLLNINKMCKKQVEKMKINLTRSTDRIITSISRSDKNFTPLNLQAPIIASTSTTVQENVQSWKAMQLHGRYPTSLENTLVDKKSSLQWLKTGHLYPETEGFVMAIQDRVMRTRNYEKHVLKMNVVDKCRKCNAVGESIEHIMAGCSTLSENAYLGRHNQLAKLVHQQLGFKYNLLPKTTPPYYKYEPKAVLENNTHVIYWDRLVNTDTTVAYNRPDIVVLDKINKKAIIIDIAVPLTHNVRSTEVEKVRKYEDLSIQMKQIWHLNEVTTIPLVMSVEGVVTKNFKRNLEKLNITSNIFNAAQKAIILQTCHIVRKFLS

SEQ ID NO: 25971 - protein, 1083 aa, Fasciola hepatica
MTLWVMVADQTTSSWSRWISLVSASAGAWPNQVSGHPSCGPITHSGVLGTITETHTNTQSLDSLLSGGGSNRCPPAPREVGPCRSSGANIGSNENGFQCDCGRSFGSRIGLGQHRRHAHPTQVNEERIASVISRTRRGTWSTADDESLVRLANTTFQPGMFRKDLCATLTSFFDGRSAESIKKRLQFLHWSPPASINLVEASEASPSSPPSADTQHLPEMVDESANEWTQRLVADITSGLANGPVGAGPWADLLGIITNWRDRVFDLQSARSALETLLAATFPHTWQSTPARMVRCVPTSKRGIRRLQYAHVQKLYATRRKDCAQTVLSGDWKEAHLRRSAPPTDLLAYWKGIFSQPSHPDPRPVQRPSVAQWSVLDPILASEVSEALRLMGTTAPGLDRLTVRDLMQMDQNYLAQLLNALLVLRTPTQHLSMARVTLVPKCSKPTGPGDYRPIAVTSIVLRLLHKILARRWRNQLALSPWQMAFLQRDGCSEASTVLHTILRSVHQDCTPLASIFVDISKAFDLVSHDTIIRAASMFGLPAPMVDYLRSLYSGSMVRLGDESIACSRGVRQGDPLSPLLFIAVMEEVLSNSAPALGVSIGGASVDHLAYADDLVLFADNADRLRERLAALSTSLAAAGMCINGAKSVGLTIRKDGKNKRLILWPTTYEVNGVRVQPVGVDQQIKYLGLHFTWKGRIQPRSTAKLESMLVNITKAPLKPHQRLDILARFALPKLYHELVLGMAHRRTLKSMDVMVRARVRAWLRLPKDTVLGFFYAKRASGGLGLPNLSTTVPIAQRTRLERLARSSLAPARMATSASPFHQLVRQANIPIRVGASVITSKDDAVSAWSADLFNSNDGRGLRNFPMDRASLLWLGAGDSVPPRLFLRATWLRGGLLSTKVRRARGYVVSAEDLKCRGRCGAVESADHILQCCAATHQVRCERHNKVVRWLASSFLKRGLRVLVEPIIPLVPSFCKPDLIVCCDDLAYVLDVCVVSGQSAESAWRTKVEKYSTTPVEESIKRTLGLPTVRLKHCPVIISNRGFLFKRSGSGLRRLGLRPFVLARACQLVVEGSLKTYDVYMKGL

SEQ ID NO: 25972 - protein, 1287 aa, Rotaria magnacalcarata
MSNCGGPGAGEHENARRQNLRSIGTAQNLPLVRLGCVTRSARAANPSNFNILNPIADIRAASPELTHPSDESSLGRDKGLSKDAPVKQGKTGLWTEIEITELRQLVGSNTNHAGNVSWVKVEKAWKLIANLPERSRASLSSKWYDIKTKSAILIADETNQTQGSADSNPDNTLTGFASNVTTTAAAQVTVSNILGITTAVGDEEEDQCPPVDSPDALIQLTFRKNLQKARKIGCQMTLRKPPNRVSGQHIKPIICVVDGLIKSELHKKGPCRLTWNQLSVLAYAGALTVSELGNQLTTEKAEKRQAWFSSSYRECDNLRRVIGKATAELRRRKRLRKKKDAQRAPTMQQVANIRMLVNKYKAVSFAEITSLVEKLKTRLQLLQSKIALRQDDENRVRVRHMPAKMLLRSMEREEEKQDSSEIPDVHRIRKYWETIVGVKKPFNSKNVQLQAWEQSLSHIPEDSDLKGHLTKELWDRVVRKAKPWKAHGPDGLQGYWWKVFVSANMALHKLVLHHLTSGESLPQSWITEGRIVLIHKAGPKSKPGNFRPIACLNTCYKLLTGYVTMYLNQHVTERKIMPEEQIALRGGVWGCTHALTLDQTLTADAQYQKQRPLSVAWIDYAKAFDSVPHSYIKWLFSVLRIPDLLKKFLVSIMANWRVRYEVRINRGQTDRSNYLKIRSGVLQGDSFSPLLFCLAMAPISHALNNVAGAYVTASGTKTNMQLSLSHIFYMDDLKLYGNSRESLAKQIECVTSISKDIHMELNEKKCAVAHFTPKSLKKKQVPVNPVATVEKSINFPLLDAESVYKYLGIEQRLGVNETEAWDRVVERCYTVAHKIWSSELTFRQKIVTHNATVNPSLNYVASCIIKGNGTYASALKRGDTADTQLRKVLKEQKSRYNANCVARLYLPAEQGGCGLRSVKDSLQESTIYSWAYLCTKPELRSSLNLFKNMANRGKRCVISDAQSILKTYNINAEIDEAHSTVILDGAIFVDAKTLARHVVSLMRTANNNMRYEKWRDLPLAGRVLSSNANIDLVASFAWLKQGMLSSTAVRNVLAAQEGCLLTKTHPVHTKHSADLSCRACRKSKETIAHVISNCTTWLPTLYVDRHDSAARNIYYKLCQKYGLVPPHYTQQVLPVQENDTIKLYWNQPVQTKKIIRHNKPDIILFDKIKKTALVIEFAISWFTGIERQIDIKTNRYCVNGNYDQDLNVPYPNGDNLLRELQTAGWDASFLPIVIGATGEVLLGLSGKIKENLGISSEAADECIERMQRSAVLGTSRIIKNHLSKKAN

SEQ ID NO: 25973 - protein, 1008 aa, Ormyrus nitidulus
MDNPQNVHICVDCRRTFSTPNGLGLHRKRAHVTAANDAINITRTKQPWTPEEMRRMARLEASNPNIRSINTFLASHFRNRTEEAIKGMRKQAKYKALLQTITEDEDVGETNGTTGHADPQPAQQVSAADNPENLRRWITTHLSKMPATTPGINILHRAAAEALEGSNPEDSLTQWLEGVRPTDRLQRTDQRHRPASRQNQGKGPQPQSRKKKKREEYKRIQNLWRKNTSKAAKTVLDGEESQEEVPSLEEQEAYWRPLFEARQNSPEIQPVQGGAVTAKHNPCTPITETEVRRIRPPNGTSPGPDGITVASWRTIPDVAKAIAFNVILLHGKCPQLISDSRTVLIPKVKGTRDPTKFRPISIASVVLRHLHKIVATRLGQMNLLSPTQRAFIEADGVAENTIALAAILADARLRLKPLHIAILDVRKAFDTVTHEAIVTTLRSNGITNQFVEYISRLYGTSRTQLQVRGRSSGWIQPGQGVRQGDPLSPIIFNMVIDNTIRHLHTEVGYDTTSGSISALAFADDLILLASSKEGMQSQLDNVTKSLNRNGLHLMPTKCRVLSMIPSGREKKTKIVTEQTFSAENQPVKQIGIDENWEYLGVEFNSYGPTKRKINIDEYLTRISEAPLKPQQKIEILKVYLIPRYTHMLVLGRTLHGELRKADKHVRKAARRWMRLPHDTPNAYFHAKTEEGGLGIASFESTIPSYTKDRLENLKASEAPGAVWAYNSTWTADKKRWCSLTKKTQKDWKESLHSSVDGRELRECKKAPSSYNWIRDPYVAIPAADWIRYHHIRINAMPSRMRTTRGRRTGSQDTRCRAGCTVDETTAHIIQQCPRTNAGRIKRHDLVADCISSWLGQKGWNVARERVFRTSRGVFKPDIIASRMGDTKILDVQIVSGTQALSESSRRKREYYDQNVELKRDAHREVGNAGGTTSVEAITISWRGIWDIRSHNTLIGMGIAGTKLRGLTTRVLKGAYLNFCTFNKATYRTDGHAATTSQSQDDRRRTTRV

SEQ ID NO: 25974 - protein, 1011 aa, Ormyrus pomaceus
MDNPQNVHICVDCRRTFSTPNGLGLHRKRAHVTAANDAINITRTKQPWTPEEMRRMARLEASNLDSRSINTFLASHFRNRTEEAIKGMRKQAKYKALLQTIIEDADVGETNGITGHADPQPSQQVSTIDNPENLRRWLTTHLSKMPATTPGINILHRAAAEALEGSNPEESLTQWLVGVRPADGPQRTDHRHRPASSQNQGKGLQPQSRKKRKREEYKKIQNLWRKNISKAAKTVLDGEESQEEVPSLEEQEAYWRPLFEARQDSPEIQPVQGGAVTAKHNPCTPITETEVRRIRPPNGTSPGPDGITVASWKTIPDVAKAIAFNVILLHGKCPQLISDSRTVLIPKVKGTKDPTKFRPISIASVVLRHLHKIVATRLGQMNLLSPTQRAFIEADGVAENTIALAAILADARLRLKPLHIAILDVRKAFDTVTHEAIVTTLRANGITNQFVEYISRLYGTSRTQLQVRGRSSGWIHPGQGVRQGDPLSPIIFNMVIDNTIRHLHTEVGYDTTSGSISALAFADDLILLASTKEGMQSQLDNVTESLNRNGLHLMPTKCRVLSMIPSGREKKTKIVTEETFSAENQPVKQIGIEENWEYLGVEFNSYGPTKRKINIDEHLTRISEAPLKPQQKIEILKVYLIPRYTHTLVLGRTLHGELRKADKYVRKAVRRWMRLPHDTPNAYFHAKTEEGGLGIASFESTIPSFTKDRLENLKASEAPGVVWAYNSIWTADKKRWCSLTKKTQKDWKESLHSSVDGRELRECKKAPSSYNWIRDPYVAIPAADWIRYHHIRINAMPSRMRTTRGRRTSSQDTRCRAGCTVDETTAHIIQQCPRTNAGRIKRHDLVADCISSWLGQKGWNVARERVFRTSRGVFKPDIIASRMGDTKILDVQIVSGTQALSESSRRKREYYDQNVELKRDAHREVGNAGGTTSVEAITISWRGIWDIRSHNTLIGMGIAGTKLRGLTTRVLKGAYLNFCTFNKATYRTDGHAATTSQSQDDRRRSTRVQER

SEQ ID NO: 25975 - protein, 1008 aa, Ormyrus nitidulus
MDNPQNIYICVDCRRAFSTPNGLGLHRKRAHASAANESINTTRTKQPWTPEEMRRMARLEASNPDIRSINTFLASHFRNRTEDAIKGMRKQAKYKALLQAITEDTETTATNRTTGHTQPQTIPQINTADNEDNLRRWITRHLSKMPETTPGINILHRAAAVALEGSNPEESLTQWLEVIRPTDGRQGMTQRHRPGLRQNQGVGQQLQSRKKRKREEYKRVQNQWRKNISRAAKAILDGEDNQEEVPCLEEQEAYWRPLFEARQNPSEGQPFQEETATANHNPCTPITETEVRRIRPPNGTSPGPDGITVAIWRTIPDVAKAIAFNTILLHGKCPQLISDSRTVLIPKVKGTKDPTKFRPISIASVVLRHLHKIMATRLSQMNILSATQRAFIEADGVAENTMALAAIIADARLRLKPLHIAILDVRKAFDTVTHEAIVATLRSNGIANQFVDYIAELYGTSRTKLQVRGRSSGWIQPGQGVRQGDPLSPILFNMVIDNTIRHLHKEVGYDTTSGSISALAFADDLILLASSKDGMQAQLNNVTQSLNRNGLHLMPTKCRVLSMIPSGREKKTKIVTEETFSAENQPVKQIGIEEKWEYLGVEFDTYGPTKRKINIDEYLKRISEAPLKPQQKIEVLKVYLIPRYTHMLVLGRTLHGELRKADKHVRKAARRWLRLPHDTPNAYFHAKMEEGGLGIASFESTIPSLTKERLENLNASEAPGAAWTYNSVWAADKKRWCCLAKKTQKDWKDSLHSSVDGRELRECKKAPSSHNWIRDPYVAIPAADWIRYHHVRINAMPSRMRTTRGRRTGSQDTRCRAGCTAEETTAHIIQQCPRTNAGRIKRHDLVAGCISSWLGQKGWHVARERVFRTTHGVFKPDIIASRMGDTRILDIQIVSGSQALSESSRRKREYYDQNVELKRDAHREMGNAGGTATVEAVTISWRGIWDTRSHNTLLGMGIAGTKLRGLTTRVLKGAYLNFCTFNKATYRTDRQRTTIPQSQEDRRRTSRV

SEQ ID NO: 25976 - protein, 936 aa, Danio aesculapii
MKEIAILRGDLRRLRKVFREAPANEKPALSEIRDNLRERIKTLRRAECHRRDRRKRMKAQTEFIKNPFRYLSNILGDVRSGQLEATKEEVEDHLRQAHSDPRREKGLGEMEKLLKPTAPSILFRSEEPSWQEVNTFLRKARAKSAPGPNGIPYKVYKCCERLRRRLWKLLRVAWKKDFLADSWLVAEGCFIPKEGNSSGIKQFRTISLLNVEGKIFLGILAKRLTSFMMDNGYMDTSVQKGGVPGVSGCLEHTSVVTKIIEDAKKNRGDLAVLWLDLTNAYGTIPHKLVDLTLETYHVPERFRKLLQCYYGKFHIRFTCRDFTTEWQRLEVGIVTGCTISVILFSAAINLLVKSAEKLRRGAILANGKQQVPIRAFMDDLTIMAKSVPEGRWILEDLVELTDWARMEFKPEKSRSLVLRRGCIQDRFRFRIKGTTIPTVREKPVKSLGKWYRADLNDKESVRQMSVQVDTWMTSLEKSGLPGKYKAWGYQHGVLPRLLWPLLVYEVPVSTVEGLERKMNTYLRRWLGVPRSFCSIGLYSTGSKLQLPLTSVLEEYKVTKTRQAIMLRDSQDEKVRQADLVVGAGRKWSANKAVRDAEERLQHADIVGTVAQGRLGLGCFTSASWNKADPKERRWLIQREVRKAEEETRQVKAVGMKKQGSWTRWEGVRERALTWQDIWSMEGQRIKFLLCSVYDVLPTPSNLHIWGMVERPSCSLCGKQANLEHVLSACQSSLADGKFRWRHDKILSQLADGLEQARKKVKQHSDGQCFIQFIRSGESIAAGRRRGGVLASAKDWEMRADLKKQLKYPEEIAQTSLRPDIVLWSRGTKQVVLIELTIPWEERMEEAHERKLKKYQSLILESQENGWRAWNLPVEVGCRGFAGQSLWRALGWLGIEGMARKRLVGKVTKEAEVTSRWIWLQREVQWESQPVERQTIT

SEQ ID NO: 25977 - protein, 1150 aa, Pimephales promelas
MERYIIRYPQGRARAGEDDRPTGQTFVMTTHDGLSTMEQVNDVSRVCRCGKICKNGRGLKIHQSKMKCVQPEHNVQRTGKPGETEERPGQEANHSSPNLQAHDEDGSRNGITDVSEDTKHQTEMEGSQDIRRPGQDIWVGVARKELVNWPAAAARKEWERFDHDVDEVLETALAGDVGKKLKAMASIIWSIGADRFGKKEPKAKTNTQPKESRRLKEIAILRGDLRRLRKAFREAAGDERPALKEIRDNLRERIKILRRAECHRRDRKRRMKERTDFTKNPFKYLTKLLGDVRSGELKATKEEVEEHLRQVHSDPRREDSLEEMEKLIQPAEPATPFRAEEPSWQEVNTFLRKARAKSAPGPNGIPYKVYKYCERLKRRLWKLLRVAWRKDFLADSWLVAEGCFIPKEENSIGIKQFRTISLLNVEGKIFLGILAKRLTTFMVDNGYMDTSVQKGGVPGVAGCLEHTSMITKIIEDAKKNRGDLAVLWLDLTNAFGTIPHKLVHLTLKTYHVPERFQKLLQRYYDNFNMRFSCGDFTTEWQRLEVGIVTGCTISVILFSAAMNLLVKSAEKLRRGAVLASGIQQIPIRAFMDDLTITAKSVPEGRWILEDLVELTDWARMDFKPEKSRSLVLKKGRIQDRFRFKIKDTIIPTVLERPVKSLGKWYRADLNDKQSVREMIIQVDTWMTSLEKSGLPGKYKAWGYQHGVLPRLLWPLLVYEVPISTVEGLERRINTYLRRWLGVPRSFCSIGLYSTGSKLQLPVTSVVEEYKATKTRQAMMLRDSKDERVRQAGIVVRTGRKWSASRALTEAEDRLHHADIVGTVAVGRLGLGCSTRISWKKADPKERRGMVQREVRKAEEETRHVKAVAMKKQGSWTRWEGVRERALTWQDIWNMEGRQIKFLMCSVYDVLPTPSNLHIWGIAENPSCTLCGKTANLEHVLSACRSSLADGKFRWRHDKILSRLADGVEQARKNRKPPPDGLHFIHFVRTGESTAAVRRSRGVLASANDWEMRADLKKQLKFPEEIALTSLRPDIVLWSRGTKQVVLIELTVPWEDRMEEAHERKLKKYQGLILESQQKGWKAWNLPVEVGCRGFAGQSLWRALGVLGIEGMARKRLIGSVTEQAEAASNWIWIQREVRWQSKPVEGLKTQ

SEQ ID NO: 25978 - protein, 1148 aa, Danio kyathit
MERYMIKYPQGRARAGENDRPTGQTSVMTTHDGQLTMEQPSDLSRVCRCGRICKNERGLKIHQSKMKCLQPDHNVQRTGKPGETEERQGQEANHSPQNLQAYDEDGSRNRGIVVSEDVRHQVAEGTQDIIQSQQDTCVGVVRKEQVNWPAAVAIKEWEKFDQDVDAVLEAALAGDVGKKLKAMAAIMWSMGADRFGKKEVKVKAGIQLKENRRMKEIAIIRGDLRRLRKAFREAPTNEKPALSEIRDNLRERIKTLRRAECHRRDRRKRMKARTEFIKNPFKYLSNILGEVRSGQLEATKEEVEEHLRQAHSNPRREEGLGEMEKLIKPTAPSIPFRSEEPSWQEVNTFLRKARAKSAPGSNGIPYKVYKCCERLRRRLWKLLRVAWKKDFLADSWLVAEGCFIPKEGNSAGIKQFRTISLLNVEGKIFLGILAKRVTSFMMDNGYMDTSVQKGGVPGVSGCLEHTSVITKIIEDAKKNRGDLAVLWLDLTNAYGTIPHKLVDLTLETYHVPERFRKLLQCYYGNFHIRFTCRNFTTEWQRLEVGIVTGCTISVILFSAAINLLVKSAEKLRRGAILANGNQQVPIRAFMDDLTIMAKSVPEGRWILEDLVKLTDWARMEFKPEKSRSLVLRRGCIQDQFRFRIKGTTIPTVREKPVKSLGKWYRADLNDKESVRQMIVQVDTWMTSLEKSGLPGKYKAWGYQHGVLPRLLWPLLVYEVPVSTVEGLERKMNTYLRRWLGVPRSFCSIGLYSTGSKLQLPVTSVLEEYKVTKTRQALMLRDSKDGKVRQADIVVRAGRKWSANDALRDAEERLQHADIVGTVAQGRLGLGCIKSASWNKADPKERRRLIQREVRKAEEETRRVKAVGMKKQGSWTRWEGVRERALTWQDIWSMEGQRIKFLLCSVYDVLPTPSNLHIWGMVERPSCSLCGKQANLEHVLSACQSSLADGKFRWRHDKILSQLADGLEQARKKVKQHSDGQCIQFIRSGESTAVGRRRGGVLNSAKDWEMRADLKKQLKYPEEIAHTSLRPDIVLWSRGTKQVVLIELTIPWEERMEEAHERKLKKYQSLILESQENGWRAWNLPVEVGCRGFAGQSLWRALGLLGIEGMARKRLVGKVTQEAEVTSRWIWLQREVRWKSQPAERQTVS

SEQ ID NO: 25979 - protein, 1144 aa, Pimephales promelas
MERYIIRYPQGRARAGEDDRPTGQTFVMTTHDGLSTMEQVNDVSRVCRCGKICKNGRGLKIHQSKMKCVQPEHNVQRTGKPGETEERPGQEANHSSPNLQAHDEDGSRNGITDVSEDTKHQTEMEGSQDIRRPGQDIWVGVARKKLVNWPAAVARKEWERFDHDVDEVLETALAGDVGKKLKAMASIIWSIGADRFGKKEPKAKTNTQPKESRRLKEIAILRGDLRRLRKAFREAAGDERPALKEIRDNLRERIKILRRAECHRRDRKRRMKERTDFTKNPFKYLTKLLGDARSGELKATKEEVEEHLRQVHSDPRREDSLEKMEKLIQPAEPATPFRAEEPSWQEVNTFLRKARAKSAPGPNGIPYKVYNYCERLKRRLWKLLRVAWRKDFLADSWLVAEGCFIPKEENSIGIKQFRTISLLNVEGKIFLGILAKRLTTFMMDNGYMDTSVQKGGVPGVAGCLEHTSMITKIIEDAKKNRGDLAVLWLDLTNAFGTIPHKLVHLMLKTYHVPERFQKLLQRYYDNFNMRFSCGDFTTEWQRLEVGIVTGCTISVILFSAAMNLLVKSAEKLRRGAVLASGIQQIPIRAFMDDLTITAKSVPEGRWILEDLVELTDWARMDFKPENSRSLVLRKGRIQDRFRFKIKDTIIPTVLERPVKSLGKWYRADLNDKQSVREMIIQVDTWMTSLEKSGLPGKYKAWGYQHGVLPRLLWPLLVYGVPISTVEGLERRINTYLRRWLGVPRSFCSIGLYSTGSKLQLPVTSVVEEYKATKTRQAMMLRDSKDERVRQAGIVVRTGHKWSASRALTEAEDRLHHADIFGTVAVGRLGLGCSTRISWKKADPKERRGMVQREVRKAEEETRHVKAVAMKKQGSWTRWEGVRERALTWQDIWNMEGRQIKFLMCSVYNVLPTPSNLHIWGIAENPSFTLCGKTANLEHVLSACRSSLADGKFRWRHDKILSRLADGVEQARKNRKLPPDGLHFIHFIRTGESTAAVRRSRGVLASANDWEMRADLKKQLKFPEEIALSSLRPDIVLWSRGTKQVVLIELTVPWEDRMEEAHECKLKKYQGLILESQQKGWKAWNLPVEVGCRGFAGQSLWRALGVLGIEGMARKRLIGSVTEQAEAASNWIWIQREMRWQKQTC

SEQ ID NO: 25980 - protein, 1058 aa, Nerophis ophidion
MESYNRRYPRGRARAGEDDRPTGQTNVMTINDGQSTTEQLSDLSRVCRCGKICKNEKGLKIHQTKMHKMQPESNVQRTGKPGETEERLGQDTNHSPQNLQAHDGDGGRRSIAGVTEAAGHHSEREVTQDTRRHGQNTCAGDVRKERVNWPTAAEKKEWDMFDCDVDQVLEAALAGDVGKKLKAMSSIIWSIGADRFGKREQKGRVNIQPKENRRLKEIAILRGDLRRLKKAFREATADEKPALTELRNGLRERIKILRRAECHRRNRKRRLKERVAFTKNPFNYLSKLLGDKRSGELKATKEEVEEHLRQVHSDPRREDNLEVMERLIKPAEPTIPFKAEEPSWQEVSSFLKKARGKSAPGPNGISYSVYKHCERLRKRLWKLLTVAWRKNFLADEWLVAEGCFIPKEENSSGIKQFRTISLLNVEAKLFLGILAKRLTTFMLDNGYMDTSVQKGGIPGVSGCLEHTSVISKIIEDAKRNHGDLAVLWLDLTNAYGTIPHKLVELTLKTYHIPEQFQKLLRQYFDGFNMRFTCGEFTTNWQRLEVGIVTGCTISVILFSAAMNLLVKSAEKLCRGAVLASGIQMLPIRAFMDDLTITARSVPEGRCILEDLIELTNWARMEFKPAKSRSLVLKKGRVQERFRFKIRENIIPTVQEKPVKCLGKWYRADLKDRLSVKEMLSQAEAWMTSLEKSGLPGKYKAWGYQHGVLPRLLWPLLVYEVPVSTVESLERKLNTYLRRWLGVPRSFCSIGLYSTGSKLQLPITSVVEEYKVTKTRQAMMLRDSKDERVRQAGIVVRSGIKWSASEALREAEDRLHHADIVGSVAQGRLGLGCSSRTNWNKADPKERRGLVQREVRKAEEESRHVKAVTMNKQGSWTRWESVKDRSLTWKDIWSMEGHRIKFLLCSTYDVLPTPSNLHTWGMVESPSCTLCGKIANLEHVLSSCHSSLADGKFRWRHDQILAQLAEGVEQARKRTRQLSNGPRFIHFIRAGESAAAGGRNKGILATASDWEMRVDLKKQLKFPEEIAHTTLRPDIVLWSKGTKQVVLIELTVPWEERME

SEQ ID NO: 25981 - protein, 1144 aa, Pimephales promelas
MERYIIRYPQGRARAGEDDRPTGQTFVMTTHDGLSTMEQVNDVSRVCRCGKICKNGRGLKIHQSKMKCVQPEHNVQRTGKPGETEERPGQEANHSSPNLQAHDEDGSRNGITDVSEDTKHQTEMEGSQDIRRPGQDIWVGVARKKLVNWPAAVARKEWERFDHDVDEVLETALAGDVGKKLKAMASIIWSIGADRFGKKEPKAKTNTQPKESRRLKEIAILRGDLRRLRKAFREAAGDERPALKEIRDNLRERIKILRRAECHRRDRKRRMKERTDFTKNPFKYLTKLLGDARSGELKATKEEVEEHLRQVHSDPRREDSLEKMEKLIQPAEPATPFRAEEPSWQEVNTFLRKARAKSAPGPNGIPYKVYNYCERLKRRLWKLLRVAWRKDFLADSWLVAEGCFIPKEENSIGIKQFRTISLLNVEGKIFLGILAKRLTTFMMDNGYMDTSVQKGGVPGVAGCLEHTSMITKIIEDAKKNRGDLAVLWLDLTNAFGTIPHKLVHLMLKTYHVPERFQKLLQRYYDNFNMRFSCGDFTTEWQRLEVGIVTGCTISVILFSAAMNLLVKSAEKLRRGAVLASGIQQIPIRAFMDDLTITAKSVPEGRWILEDLVELTDWARMDFKPENSRSLVLRKGRIQDRFRFKIKDTIIPTVLERSVKSLGKWYRADLNDKQSVREMIIQVDTWMTSLEKSGLPGKYKAWGYQHGVLPRLLWPLLVYEVPISTVEGLERRINTYLRRWLGVPRSFCSIGLYSTGSKLQLPVTSVVEEYKATKTRQAMMLRDSKDERVRQAGIVVRTGHKWSASRALTEAEDRLHHADIFGTVAVGRLGLGCSTRISWKKADPKERRGMVQREVRKAEEETRHVKAVAMKKQGSWTRWEGVRERALTWQDIWNMEGRQIKFLMCSVYNVLPTPSNLHIWGIAENPSCTLCGKTANLEHVLSACRSSLADGKFRWRHDKILSRLADGVEQARKNRKLPPDGLHFIHFIRTGESTAAVRRSRGVLASANDWEMRADLKKQLKFPEEIALSSLRPDIVLWSRGTKQVVLIELTVPWEDRMEEAHECKLKKYQGLILESQQKGWKAWNLPVEVGCRGFAGQSLWRALGVLGIEGMARKRLIGSVTEQAEAASNWIWIQREMRWQKQTC

SEQ ID NO: 25982 - protein, 1149 aa, Danio aesculapii
MERYMIRYPQGRARAGENDRPTGQTSVMTTYDEQLTREQPNDLSRVCRCGRICKNERGLKIHQSKMKCLQPDHNVQRTGKPGETEERQGQEANHSPQNLQAHYEDGNRNRGIGVSEDTRHQVVEGTKDSILPQQDTCVGVVRKEQVNWPAAVAIKQWEKFDQDVDEVLEAALAGDVGKKLRAMAAIMWSMGADRFGKKELKVKAGIQLKENRRMKEIAILRGDLRRLRKVFREAPANEKPALSEIRDNLRERIKTLRRAECHRRDRRKRMKAQTEFIKNPFRYLSNILGDVRSGQLEATKEEVEDHLRQAHSDPRREKGLGEMEKLLKPTAPSILFRSEEPSWQEVNTFLRKARAKSAPGPNGIPYKVYKCCERLRRRLWKLLRVAWKKDFLADSWLVAEGCFIPKEGNSSGIKQFRTISLLNVEGKIFLGILAKRLTSFMMDNGYMDTSVQKGGVPGVSGCLEHTSVVTKIIEDAKKNRGDLAVLWLDLTNAYGTIPHKLVDLTLETYHVPERFRKLLQCYYGKFHIRFTCRDFTTEWQRLEVGIVTGCTISVILFSAAINLLVKSAEKLRRGAILANGKQQVPIRAFMDDLTIMAKSVPEGRWILEDLVELTDWARMEFKPEKSRSLVLRRGCIQDRFRFRIKGTTIPTVREKPVKSLGKWYRADLNDKESVRQMSVQVDTWMTSLEKSGLPGKYKAWGYQHGVLPRLLWPLLVYEVPVSTVEGLERKMNTYLRRWLGVPRSFCSIGLYSTGSKLQLPLTSVLEEYKVTKTRQAIMLRDSQDEKVRQADLVVGAGRKWSANKAVRDAEERLQHADIVGTVAQGRLGLGCFTSASWNKADPKERRWLIQREVRKAEEETRQVKAVGMKKQGSWTRWEGVRERALTWQDIWSMEGQRIKFLLCSVYDVLPTPSNLHIWGMVERPSCSLCGKQANLEHVLSACQSSLADGKFRWRHDKILSQLADGLEQARKKVKQHSDGQCFIQFIRSGESIAAGRRRGGVLASAKDWEMRADLKKQLKYPEEIAQTSLRPDIVLWSRGTKQVVLIELTIPWEERMEEAHERKLKKYQSLILESQENGWRAWNLPVEVGCRGFAGQSLWRALGWLGIEGMARKRLVGKVTKEAEVTSRWIWLQREVQWESQPVERQTIT

SEQ ID NO: 25983 - protein, 1147 aa, Danio aesculapii
MERYMIRYPQGRARAGENDRPTGQTSVMTTYDGQLTREQPNDLSRVCRCGRICKNERGLKIHQSKMKCLQPDHNVQRTGKPGETEERQGQEANHSPQNLQAHYEDGNRNRGIGVSEDTRHQVVEGTKDSILPQQDTCVGVVRKEQVNWPAAVAIKQWEKFDQDVDDVLEAALAGDVGKKLRAMAAIMWSMGADRFGKKELKVKAGIQLKENRRMKEIAILRGDLRRLRKVFREAPANEKPALSEIRDNLRERIKTLRRAECHRRDRRKRMKAQTEFIKNPFRYLSNILGDVRSGQLEATKEEVEDHLRQAHSDPRREKGLGEMEKLLKPTAPSILFRSEEPSWQEVNTFLRKARAKSAPGPNGIPYKVYKCCERLRRRLWKLLRVAWKKDFLADSWLVAEGCFIPKEGNSSGIKQFRTISLLNVEGKIFLGILAKRLTSFMMDNGYMDTSVQKGGVPGVSGCLEHTSVITKIIEDAKKNRGDLAVLWLDLTNAYGTIPHKLVDLTLETYHVPERFRKLLQCYYGKFHIRFTCRDFTTEWQRLEVGIVTGCTISVILFSAAINLLVKSAEKLRRGAILANGKQQVPIRAFMDDLTIMAKSVPEGRWILEDLVELTDWARMEFKPEKSRSLVLRRGCIQDRFRFRIKGTTIPTVREKPVKSLGKWYRADLNDKESVRQMSVQVDTWMTSLEKSGLPGKYKAWGYQHGVLPRLLWPLLVYEVPVSTVEGLERKMNTYLRRWLGVPRSFCSIGLYSTGSKLQLPLTSVLEEYKVTKTRQAIMLRDSQDEKVRQADLVVGAGRKWSANKAVRDAEERLQHADIVGTVAQGRLGLGCFTSASWNKADPKERRWLIQREVRKAEEETRQVKAVGMKKQGSWTRWEGVRERALTWQDIWSMEGQRIKFLLCSVYDVLPTPSNLHIWGMVERPSCSLCGKQANLEHVLSACQSSLADGKFRWRHDKILSQLADGLEQARKKVKQHSDGQCFIKFIRSGESIAAGRRRGGVLASAKDWEMRADLKKQLKYPEEIAQTSLRPDIVLWSRGTKQVVLVELTIPWEERMEEAHERKLKKYQSLILESQENGWRAWNLPVEVGCRGFAGQSLWRALGWLGIEGMARKRLVGKVTKEAEVTSRWIWLEGRFSGKANQLNDKP

SEQ ID NO: 25984 - protein, 1149 aa, Danio aesculapii
MERYMIRYPQGRARAGANDRPTGQTSVMTTYDGQLTREQPNDLSRVCRCGRICKNERGLKIHQSKMKCLQPDHNVQRTGKPGETEERQGQEANHSPQNLQAHYEDGNRNRGIGVSEDTRHQVVEGTKDSILPQQDTCVGVVRKEQVNWPAAVAIKQWEKFDQDVDEVLEAALAGDVGKKLRAMAAIMWSMGADRFGKKELKVKAGIQLKENRRMKEIAILRGDLRRLRKVFREAPANEKPALSEIRDNLRERIKTLRRAECHRRDRRKRMKAQTEFIKNPFRYLSNILGDVRSGQLEATKEEVEDHLRQAHSDPRREKGLGEMEKLLKPTAPSILFRSEEPSWQEVNTFLRKARAKSAPGPNGIPYKVYKCCERLRRRLWKLLRVAWKKDFLADSWLVAEGCFIPKEGNSSGIKQFRTISLLNVEGKIFLGILAKRLTSFMMDNGYMDTSVQKGGVPGVSGCLEHTSVVTKIIEDAKKNRGDLAVLWLDLTNAYGTIPHKLVDLTLETYHVPERFRKLLQCYYGKFHIRFTCRDFTTEWQRLEVGIVTGCTISVILFSAAINLLVKSAEKLRRGAILANGKQQVPIRAFMDDLTIMAKSVPEGRWILEDLVELTDWARMEFKPEKSRSLVLRRGCIQDRFRFRIKGTTIPTVREKPVKSLGKWYRADLNDKESVRQMSVQVDTWMTSLEKSGLPGKYKAWGYQHGVLPRLLWPLLVYEVPVSTVEGLERKMNTYLRRWLGVPRSFCSIGLYSTGSKLQLPLTSVLEEYKVTKTRQAIMLRDSQDEKVRQADLVVGAGRKWSANKAVRDAEERLQHADIVGTVAQGRLGLGCFTSASWNKADPKERRWLIQREVRKAEEETRQVKAVGMKKQGSWTRWEGVRERALTWQDIWSMEGQRIKFLLCSVYDVLPTPSNLHIWGMVERPSCSLCGKQANLEHVLSACQSSLADGKFRWRHDKILSQLADGLEQARKKVKQHSDGQCFIQFIRSGESIAAGRRRGGVLASAKDWEMRADLKKQLKYPEEIAQTSLRPDIVLWSRGTKQVVFIELTIPWEERMEEAHERKLKKYQSLILESQENGWRAWNLPVEVGCRGFAGQSLWRALGWLGIEGMARKRLVGKVTKEAEVTSRWIWLQREVQWESQPVERQTIT

SEQ ID NO: 25985 - protein, 1151 aa, Menidia menidia
MRATAMEKYIKRYPRGRARAGEDDRPTGQNNVMTTINGQPTTEQLSDLSRVCRCGKKCKNEKGLKIHQTKMKCLQPESHVQRTGQPGETEERLGQDANHSPQNLQARDEEGSKSSIADVTEAARQQSKREATQYTRQLVQITREGDVRKQRVNWPTAAARKEWEMFDCDVDQVLEATTAGDVGKKLKAMSSITWSMGAERFGRKELKGRANTQPKENRRLKEIATLRGDLRRLKKAFRKATPDEKPALTELWKNLRERIKILRRAECHCRDRKRRLKERAAFTKNPFQYLSKLLGDKRSGELKATKEEVEEHLRQVHSDPRREVSLDEMEKLIKPAKPTIPFKTEEPSWQEVNSFLKKARGKSAPGPNGISYNVYKHCKRLRRRLWKLLTVAWKKNYLPDDWLIAEGCFIPKEENSSGIKQFRTISLLNVEAKIFLGILAKRLTTFMLENGYIDTAVQKGGIPGISGCLKHTSVISKIIEDAKKNHGNLAVLWLDLSNAYGTIPHKLVELTLKTYHIPERFQALLQYYFDGFNMRFTCGKFTTNWQRLEVGIVTGCTISVILFSAAMNLLVKSAEKLRRGAVLASGVQMLPIRAFMDDLTITARSVPEGRWILEDLVEITNWARMEFKPAKSRSLVLKKGRIQNRYRFKIGENTIPTVQERPVKSLGKWYRMDLNDRQSVKEMLSQAEAWMTSLEKSGLPGKYKAWGYQHGVLPRLLWPLLVYEVPVSTVEGLERKLNTYLRRWLGVPKSFCSIGLYSTGSKLQLPITSVVEEYKATKTRQAMMLRDSKDERVRQEDIVIWTGRKWSASRAVKEAEDRLHHADIVGSVAQGRLGLGCSTRTSWNKADPKERRGLVQKEVRKAEEESRYVKAVAMTKQGSWTRWECARERALTWQDIWSMEGHRIKFLLCSVYDVLPTPLNLHIWGMVESPSCKLCGRTANLEHVLSSCHSSLADGKFRWRHDQILAQLADGIDQARKRARQLSKGPRFIHFTRAGENGAAGGRSKGVLATANDWEMRADLKKQLRFPEEIAHTSMRPDIVPPQSKGTKQVALIELTIPWEERMEEAYERKLSKYQALILESQLNGWKTWNLPVEVGCRGFAGRSLWRALGLLGIEGLARKRLVANATKRAEEASRWIWMQREVRWQSCSTE

SEQ ID NO: 25986 - protein, 986 aa, Menidia menidia
MFDCDVDQVLEATTAGDVGKKLKAMSSIIWSMGAERFGRKELKGRANTQPKENRRLKEIATLRGDLQRLKKAFRKATPDEKPALTELWKNLRERIKILRRAECHRRDRKRRLKERAAFTKNPFQYLSKLLGDKRSGELKATKEEVEEHLRQVHSDPRREVSLDEMEKLIKPAKPTIPFKTEEPSWQEVNSFLKKARGKSAPGPNGISYNVYKHCKRLRRRLWKLLTVAWKKNYLPDDWLIAEGCFIPKEENSSGIKQFRTISLLNVEAKIFLGILAKRLTTFMLENGYIDTAVQKGGIPGISGCLEHTSVISKIIEDAKKNHGNLAVLWLDLSNAYGTIPHKLVELTLKTYHIPERFQAPLQYYFDGFNMRFTCGEFTTNWQRLEVGIVTGCTISVILFSAEMNLLVKSAEKLRRGAVLASGVQMLPIRAFMDDLTITARSVPEGRWILEDLVEITNWARMEFKPAKSRSLVLKKGRIQNRYRFKIGENTIPTVQEKAVKSLGKWYRMDLNDRQSVKEMLSQAETWMTSLEKSGLPGKYKAWGYQNGVLPRLLWPLLVYEVPVSTVEGLERKLNTYLRRWLGVPKSFCSIGLYSTGSKLQLPITSVVEEYKATKTRQAMMLRDSKDERVRQADIVIWTGRKWSASRAVKEAEDRLHHADIVGSEAQGRLGLGCSTRTSWNKADPQERRGLVQKEVRKAEEESRYVKAVAMTKQGSWTRWESARERALTWQDIWSMEGHRIKFLLCSVYDVLPTPSNLHIWGMVESPSCKLCGRTANLEHVLSSCHSSLADGKFRWRHDQSLAQLADGIDQARKRARQLSKGPRFIHFTRAGENGAAGGRSKGVLATANDWEMRADLKNQLRFPEEIAHTSLRPDIVLWSKGNKQVALIELTIPWEERMEEAYERKLSKYQALILESQLNGWKTWNLPVEVGCRGFAGRSLWRALGLLGIEGLARKRLVANATKRAEEASRWIWMQREVRWQSCSTE

SEQ ID NO: 25987 - protein, 1145 aa, Cyprinodon tularosa
MERYITRYPRGRARAGEDDRPTGQNNVMTTINGQTTTEQPSDLSRVCRCGKKCKNEKGLKIHQTKMKCLQPESNVQRTGKPGETEERPGQDTNHSLQNLQAHDEEGSRSSIADVTEAARQQSESEVTQYNRQLAQITCEGDVRKQRVNWPNAAATKEWEMFDRDVDQVLEAATAGDVGKKLKAMSSIIWSMGAERFGRKELKGRADTQLKENRRLKEIATLRGDLRRLKKAFRKATPNEKPALTELWKNLRERIKILRRAECHRRDRKRRLKERAAFTKNPFQYLSKLLGDKRSGELKATKEEVEEHLRQVHSDPRREVSLDEMEKLIKPAEPTIPFKTEEPSWQEVNSFLKKARGKSAPGPNGISYSVYKHCKRLRRQLWKLLTVAWKKNYLPDDWLIAEGCFIPKEENSSGIKQFRTISLLNVEAKIFLGILAKRLTTFMLENGYMDTAVQKGGIPGISGCLEHTSVISKIIEDAKKNHGNLAVLWLDLSNAYGTIPHKLVELTLKTYHIPKRFQALLQYYFDGFNMRFTCREFTTNWQRLEVGIVTGCTISVILFSAAMNLLVKSAEKLRRGAVLASGVQMLPIRAFMDDLTITARSVPEGRWILEDLVEITNWARMEFKPEKSRSLVLKKGRVQDRYHFKIGENTIPTVQEKPVKCLGKWYRADLNDRQSVKELLSQAETWMTSLEKSSLPGKYKAWGYQHGVLPRLLWPLLVYEVPVSTVEGLERKLNTYLRRWLGIPKSFCSIGLYSTGSKLQLPITSVVEEYKATKTRQAMMLGDSKDVRVRQADIVIWTGRKWSASRALKEAEDRLNHADIVGSVAQGRLGLGCFTRTSWNKADPRERRGLVQKEVRRVEEESRHVKAVAMNKQGSWTRWESARERALTWQDIWSMEGHHIKFLLCSVYDVLPTPSNLHTWGMVESPSCKLCGRTANLEHVLSSCHSSLADGKFRWRHDQILAQLADGIEQARKRARQLSKGPCFIHFTRAGESGVVGGKSKGVLATANDWEMRADLKKQLKFPEEIAHTSLRPDIVLWSKGTKQVVLIELTIPWEERMEEAYERKLNKYQALILESQQNGWKTWNLPVEVGCRGFAGRSLWRALGLLGIEGLARKRLVANVTKRAEEASRWIWMQREVRWQNRSTE

SEQ ID NO: 25988 - protein, 822 aa, Cyprinodon tularosa
MEKLIKPAEPTIPFKTEEPSWQEVNGFLKKARGKSAPGPNGISYSVNKHCKRLRRRLWKLLTVAWKKNYLPDDWLIAEGCFIPKEENSSGIKQFRTISLLNVEAKIFLGILAKRLTTFMLENGYMDTAVQKGGIPGISGCLEHTSVISKIIEDAKKNHGNLAVLWLDLSNAYGTIPHKLVELTLKTYHIPKRFQALLQYYFDGFNMRFTCREFTTNWQRLEVGIVTGCTISVILFSAAMNLLVKSAEKLRRGAVLASGVQMLPIRAFMDDLTITARSVPEGRWILEDLVEITNWARMEFKPEKSRSLVLKKGRVQDRYHFKIGENTIPTVQEKPVKCLGKWYRADLKDRQSVKELPSQAETWMTSLEKSSLPGKYKAWGYQHGVLPRLLWPLLVYEVPVSTVEGLERKLNTYLRRWLGIPKSFCSIGLYSTGSKLQLPITSVVEEYKATKTRQAMMLRDSKDVRVRQADIVIWTGRKWSASRALKEAEDRLNHADIVGSVAQGRLGLGCFTRTSWNKADPRERRGLVQKEVRRVEEESRHVKAVAMNKQGSWTRWESARERALTWQDIRSMEGHRIKFLLCSVYDILPTPSNLHTWGMVESPSCKLCGRTANFEHVLSSCHSSLADGKFRWRHDQILAQLADGIEQARKRARQLSKGPCFIHFTRAGESGVVGGKSKGVLATANDWEMRADLKKQLKFPEEIAHTSLRPDIVLWSKGTKQVVLIELTIPWEERMEEAYERKLNKYQALILESQQNGWKTWNLPVEVGCRGFAGRSLWRALGLLGIEGLARKRLVANVTKRAEEASRWIWMQREVRWQNRSTE

SEQ ID NO: 25989 - protein, 1356 aa, Theope publius
MSQRVYNLRSLPGGRRGTSGADAGCGSMRTVGDGGLSRRAPLEQYTTAENHHLSSSPSSLFSSLPSSPPSFINSSHPSSSPSITSNHTSIHNSFEDVVQEANFAHKPVPAKKVQHARKKWSKEMNIFIVRAYFIITELETTNTKNYLSSLHQQFCERFPDMQVSRQRIGDQRRAIMHRNLLSLQEVNNIRQEVEIILQQHPQIGTHSNIVPSSHRLKWSDEINESIIKIYYKITKLETDCTAYRPLLHKEIINQFPELAHVSVQRIADQRRIIIKNKYISDEKLQQIRAEIFTKLNTTNDAGNIEEDNLITNCPVINDFGSEDNTAITIDTQILDNTVDHNSPSTENSYTSTLLSDAQKQIKELFLQSIEKFRYSDPTCRPYLPKQKLSKRFYDIVNFINSQLLTEVLTPETNFEDLQLIIYCGAYTTAVQNGSRVPEIRNIKQSTHFTPHWLKRLQDKVNKIRSQIAQLIAYSNGSRSPALEKKVDNIKRQYAVHSRHENDNTTLPQFLDTLKQKLNVIVNRIRRYKKTSLRKTQNKLFINNEKAFYRQLNKCNTDAAVNSHVHPTPENLENFWSSIWSNSVDHKTSRWIEEDMTELPEMSFSDLTINILQKIIAKTHNWKATGSDNLHNFWYKKFTNTHTLLVTHINNFLKHPEYLPGYITQGTTYMLPKDQSDLSNPAKYRPITCLQTLYKIITACIAELIYEHINNNNILSEEQKGCRKQSQGCKEQLIIDSVISKQSLKQKKDIYTAYIDYRKAFDSVPHSWLLCILKHYKINPTIINFLQTTMTNWATRLKLNNNNECIQTDFIKIRRGIFQGDALSPLWFCLALNPLSNILNKSQKGYNVSYSQNMYTLTHLMYMDDIKLFGSSLAEIETLISITHKFSSDICMEFGIDKCKMQSVHKGQLQTNSYILDNLQEIDPVDEIEGYKYLGYQQSLQIHSKQTKTTLTQKFKDRLNKILLTNLNSRNIVKAINTYAIPILTYSFGIIPWSQTELKNLQRKINTSMTYHRKHHPRSCIQRLTLPRNEGGRGFIDIQNLHNKIVTNLRSFFYTKSQDSELHKAIVTTDKKLSPLNLADTTINLPNTDIQQKLDCWVQKSLHGRHRLDLTNDNVDKPASNAWLKRGELFPETEGFILAIQDQVIETKNYKKFIIHDQNSNNDLCRHCHSNSETIQHITGACKSITQTDYKHRHDQVAAIIHQYLAYKYKLIPKKTSYYKYTPEVILESSSHKLYWDRTILTDKTIHFNRPDITVLDKANKIVYLVDIAVPNTHNIQSTYAEKIAKYTDLATELKSQWRVNTVKTIPIVISTTGVIPKILHNSLKLLEIHPLTYTLIQKAVILNTCRIVRKFLSLDK

SEQ ID NO: 25990 - protein, 1373 aa, Apodemia walkeri
MSRRIYNLRSLPGGRRGTSGADAGCSSIRSVGDGGLSRRAPLEQYTTADTGKLNRRASHEQTTAENHHSSSSSSLFSSAYSSPHSDLYLSPSSSSLVSEQFSISPRSFKDVVQEADSANIPAPAKKSFRARNKWTKEMNTFILRTYFIITRLESVNTKNYLATLHHKFCEQFPEMKVTRQRVGDQRRAIMYKNLLSIEEINCIQQEIQSILPNLPQTVTHTDDVYNTHRIKWNDDINMAIMRIYYQITNLETNCTGYRPLLHKEVVNLFPHLAHVSVQRIADQRRLIVHKKYVSDEKLQQIRAEVTRELDRNTVCDEVHLPSENLIPLPVPPSYSNDNDNLINLTQYSQASHRVQANATENGEASLNKSSDMESVQIKETFLRAIKQFTDSDPTSRPYLPKQKTSKKLAINVEYINSYLIPEVISTENMSFEAIQTILYCGANTACVQNGTRITEGYTIKHKKHVTPGWLKRLQDKVNGLRSKIAQLTEYINGNKSRALEKKVTHIKYQYSVHTRHENYNTDDTHYLDTLKQKLNIVSNRIRRYKKTTLRKTENKLFINNEKAFYRQLTETQNNNTAISLAPSPESFHSFWSNIWSKPVEHKNSSWIEKENVDKIPEMEFDKIDINLLQTVIAKTHNWKTGGSDNIHNYWYKKFTSLHPILVTHINYFILNPDKLPKYITQGTTYMLPKDKTDLSNPAKYRPITCLQNIYKIITACLAQSIYKHIDKHKILSEEQKGCRKQSQGCKEQLIIDSVISRQAIKQKNNIYTMYIDYKKAFDSVPHSWLLYILKHYKIHSNIVNFLENTMLNWTTRLKLHFNNDSIQTETINIRRGIFQGDTLSPLWFCLALNPLSTLLNNSKHGYKVSYNYVNHTLSHLMYMDDIKLFGSTLKEIEALADITHAFSSDIHMEFGIDKCKIQSVQGGKVQKNIYHLNEHQQIDPVDEIEGYKYLGYQQSQQIHMKETKASLTQHFKVRLHKILNTHLNSWNTIKAINTYAIPILTYSFGVIQWSQTELKNLQRKINTTMTKHCKHHPRSCTQRLTLPRNEGGRGLIDIQNLHNKIVTNLRSFFYKKSQQSPLHHVIVQIDFIHSPLKLKNSNFNFPITNKHDKVEAWVQKSLHGRHRLDLLNENVDKIASNAWLKYGELFPETEGFMVAIQDQVIETRNYRKFITHDPNLHSDICRHCHNNSETIQHITGACKSIAQTDYKHRHDQIAAIVHQYLAYKYKLITEKTSYYKYTPQVVLESSSYKMYWDRTILTDKTIHCNRPDITVLDKASKKVYLIDIAVPNTHNLQTTFTEKVTKYTDLAIELKNQWRVNTVKTIPIIISTTGVIPKTLHNSLEQLQIHPLIYILMQKAVILNTCRIVRKFLSLQN

SEQ ID NO: 25991 - protein, 1384 aa, Curvie emesia
MSRRIYNLRSLPGGRRGASGADAGCSSIRSVGDGGLNRRAPLEEYATAEIGKSSRRASQTQYTTAENHLSSPSSPSFSSDFPSPSSNLYLSSFSSSSVSDFNISPFHIFKDVVQEANVADIPVPAKKSLRVRNKWTKEMNIFILRTYFIITQLESINTKNYLSTLHQKFCEQFPEMKVSRQRVGDQRRAIMHRNLLPIEEINDIRQEIQIILPNLPQIVTKQDKTHNTHRIKWSSDVNEAIMRTYYRITNLEANCTAYRSILHKEVVRLFPYLAHVSVQRIADQRRIIVNQMYIPAEKLQQIRAEVAIELETNTVNSVQLQSSNPNPGPLSLTQSTINFNIGTNDCTIKNFNSTSPPKSQSHETIQMITTENEDVLVTTPYDRELTQIRESFLHAIESFKNTDPTSRPYLPKQRASKKLATIVKYINSHLLTEIISSEMDFDMTQTIIYCCAYTACKENGARINEGLTRNHRTQLPPRWLKRLEDKVKLLRSKIGQLTEYINGNKSPALERKITQIKYQYSIHSRHENNNTDLTHYLDTLKQKLNVTANRIRRYKKTTLRKTQNKLFGNNEKAFYRQISEPHSRDTTVAVEREISEEPSPEDLYSFWSNIWSKSVRHKHSDKIEDVNNLPEMEFNEIGIDQLQTVIAKTHNWKTGGSDNIHNYWYKKLTRIHPILVTHINYFILNPNKLPKYITQGITYMIPKDKADLRNPAKYRPITCLQNIYKIITACLALSIYNHVDKHQILSEEQKGCRKRSQGCKEQLIIDSIVSRHALKHKHNIYTMYIDYKKAFDSVPHSWLLFILKHYKIHPTIIHFLENVMQNWTTRLKLNTNNHPVQTDVINIRRGIFQGDSLSPLWFCLALNPLSTLLNNSKYGYKVSHNQTLNHLIYMDDIKLFGATFKEIEALADISQIFSSDIYMEFGIDKCRIQSVQRGKVQHNSYQINEHQQIEPVDEIEGYKYLGYQQSQQIHTKEIKTKLTQNFKDRLNKILNTYLNSRNTIKAINTYAIPILTYSFGVINWSQTELKNLQRKINTSMTKHCKHHPRSCIQRLTLPRNEGGRGLIDIQHLHNKIITNLRSFFYDKMQQSPLHQVIVQIDLVYSPLKLKNSNFSFLNTSKQDKLETWIKKSLHGRHRLDIINENVDKSASNTWLKRGELFPETEGFMVAIQDQVIETKNYRKFITHDLNLHSDICRRCHNNSETIQHITGACKAIVQTDYKHRHDQIAAIIHQYLAYKYKLITEKTSYYKYTPQIILESSSYKMYWDRTILTDKTVHFNRPDITLYDKVKQVVFLIDIAVPNTHNLQTTFSEKIAKYTDLAVELKNQWRVNTVKTIPIIISTTGVIPKTLHNSLEQLQIHPLTYILMQKAVILNTCRIVRKFLSPLH

SEQ ID NO: 25992 - protein, 952 aa, Apodemia chisosensis
MLSPETNFETLQLITYCSAYTSAIKNGTRISETLKLEKHKQYTPPWLKRLQDRIIKLRSHIGQIIAYINGNRSPALEKKIDNIRQHYTVHSKHENDNVDFSQYLDTIKQKLNVIANRIRRYKLTTLRKTKNKLFANNEKSFYRKLNEPNSNTSPDSNVCPTQESIEMFWSGIWSIPVEHKTNNWIEKEDMSDLPTMEFNEINIDLLQKVTARSHNWKATGSDRIHNYWYKKLTYMHPMILTHINSFLQKPELLPKYITQGVTYMLPKDKTDLTNPEKYRPITCLQTIYKIITACITEVIYDHINNNNILSEEQKGCRKRSQGCKEQLIINSVAAQQAFRQKRDIYTVYIDYKKAFDSVPHSWLLFILKHYKIHSTIIDFLKNAMTNWCTRLNLTINNKPIQTDLIKICRGIFQGDSLSPLWFCLVLNPLSNLLNRLNVGYNISNNDNSYTLTHLMYMDDIKLFGSSFTEIGKLIDIITHKFSTDICMEFGIDKCKIQSVQKGQLETNTYLLNDDQQIDIVDETYGYKYLGYLQSRQIHYKQTKIILTQKFKDRLNKVLNTNLNSRNTIKAINTYAIPILTYSFGVIPWSQTELKNLQRKINTSMTYHRKHHPHSCIQRLTLPRIEGGRGIIDVQNLHNKIIANLRSFFYYKSQDSDIHKVVVKTDAKYTPLNLSNSTVNLPNSDKQHKLELWAQKSLHGRHRHDLVNERVDKAASNEWLKKGELFPETEGFIMAIQDQVIDTKNYRKFIRHDQTVRNDLCRRCHSSSETIQHITGACKAITQTDYKHRHDQVAAIIHQYLAYKYKFITEKVAYYKYAPEIVLESSTYKIYWVRTILTDKTIHSNRPDITILDKINKIVYLIDIAVPNTHNLQTTFSEKIAKYTDLSIELKSQWRVNTVKTIPIIISTTGVIPKSLHTNLKQLETHPFTYILMQKAVILNTCRIVRKFLSLNN

SEQ ID NO: 25993 - protein, 1428 aa, Emesis russula
METRSKYKNKGPLPGGDRRGTSGADAGCLSMRTVSGEELSRRALVGSLSESTTAETHIHPSPSISAFQFNTSSYNLRSLPGGRRGTSGAGAGCSSIRSVGDGGLSRRAPLEQYTTAEDHQLSSPSSLFSSIPSSPPSYLEIPRSPTSSIISSQFYSSSHHSFEDVVQEANPARESAPAEKAQRARNKWTKVMNIFIIRTYFIITHLETTNTKNYLSSLHQQFCDKFPTIQVSRQRVGDQRRAIMQRNLVPVQDIEKVRQEVQNLLQNQSQSTHTYITHTSHHHSSQRIKWSEEINEAIIRTYYRITKLETDCTSYRPILHRQITTQFPHLAHVSVQRIADQRRIIITNKYISSEKLQLIRAEVANELSRNNDVGEVSSFTNNLIIHDTQYNNYNTLEQTLSLISDNTPEHFDENVETVQIPALSNETKYEIKQSFLKILEKFTDSDPTSRPYLPKQKSSKKLLEIVNYIDSTLLPDVLNPETDFETLHLIIYCGAYTAALQNGSRISETPNVKQRTLYTPPWLKRLSEKLNKLRRQIAQLIAYSNGNRSPALEKKVTEIKRLYAVHSRHEDNNTDLSHYLDTLKQKLNVIANRIRRYNKTTLRKTQNKLFINNEKAFYRQLNEHNTNSTTTHSHTSPTPESLEKFWSGIWSNPVDHEMNTWINEENLDIVPEMESNEITIELLQQIIEKTHNWKAAGSDNIHNFWFKKFKHTHTYLVTHINNFLQNPELLPKYITHGTTYMLPKDKLDLTNPAKYRPITCLQTIYKIITACLAELIYKHVSHHKILAEEQKGCRKHSQGCKEQLIIDSVASRQALKQKKNIYTAYIDYKKAFDSVPHSWLLYVLKHYKINSTIIYFLENTMNNWTTKLKLNVNNESIQTDFIKIRRGIFQGDSLSPIWFCLALNPLSKLLNSSNKGYDIDNSNNSYILTHLMYMDDIKLFGSSLTEIETLIDITHNFSSQIHMEFGIDKCRIQSVQKGKPEANSYTLSDYQQIDPVDEIEGYKYLGYQQSQQIHSKDIKTILTRKFKDRLHKILHTQLNSRNTVKAINTFAIPILTYSFGIIPWSQTELKNLQRKINTTMTNHRKHHPRSCIQRLTLPRIEGGRGLIDIQNLHNKIVTDLRSYFYNKSQDSELHRAIVQTDLKFTPLNLKDLTINLPEINKQHKLDLWLQKSLHGRHRLDLVNENVDKAASNAWLKRGELFPETEGFIMAIQDQVIDTKNYRKFVIRDRSLHNDICRHCHSNSETIQHITGACKSITQSDYKHRHDQIASIVHQYLAHKHNLISERTSYYKYTPQIILESTAHKMYWDRTILTDKTIHFNRPDITLLDKINKIVYLIDIAVPNTHNLKTTFSEKITKYTDLAIELKSQWQVNTVKTVPIVISTTGVIPKSLHTSLKLLQIHPLTYTLMQKAVILNTCRIVRKFLSLDN

SEQ ID NO: 25994 - protein, 990 aa, Apodemia murphyi
MHAIEKFTNSNPTSRPYLPKQKTSKKLATTVEYINTHLIPEVVSTEMSFDRMQTIIYCGAYAACKQNGTQITEGWARNNGTQTTPRWLKRLEDKVNVLRSKIAQLTEYINGNKSPALKRKIIQIQYQYAIHSRHENHNTDTTHYLDTLKQKLNVTANRIRRYKKATLRKTQNKLFGNNEKAFYRHLTEPSNNATVMEKPSPESLYSFWSNIWSKPVEHKTSSWLETEDVEKLPEMEFDEIDIGLLQTVIAKSHNWKTGGSDNIHNYWYKKFTRVHPILVKHINYFISNPDKLPKYVTQGITYMLPKDKNDLRNPAKYRPITCLQNIYKIITACLTLSIYKHVEKHKILSEEQKGCRKQSQGCKEQLIIDSVISRHALKQRHNIYTMYIDYKKAFDSVPHSWLLFILKHYKIHPTIVNFLENTMQNWTTRLKLNINNEIIQTEVINIQRGIFQGDSLSPLWFCLALNPLSTHLNKSQYGYKVSYNHTNPTLNHLMYMDDIKLFGATLKEIEQLADMTQTFSSDIHMEFGIDKCKIQSVQGGRVLLNTYHLNEHQQIDPVDEIEGYKYLGYQQSQQIHTKETKTTLTHNFNSRLNKVLNTHLNSRNTIKAINTYAIPVLTYSFGVIHWSQTELKNLQRKINTSMTKHCKHHPRSCVQRLTLPRDEGGRGVIDIQQLHNKIVTNLRSFFFKKAQQSSLHQTIVQIDLTYSPLKLKNSSFNFPITNKHDKLDAWIKKSLHGRHRLDILNENVDKIASNTWLKRGELFPETEGFMVAIQDQVIETRNYRKFITHDPSLHSDICRHCHSNSETIQHITGACKSIVQTDYKHRHDQIAAIIHQYLAYKYKLITEKTSYYKYIPQVILESSSYKMYWDRTILTDKTIHFNRPDITLHDKVNKVVFLIDIAVPNTHNLQTTFTEKITKYTDLAIELKNQWRVNTVKTIPIIISTTGVIPKTLHNSLKQLQIHPLTYILMQKAVILNTCRIVRKFLSPLN

SEQ ID NO: 25995 - protein, 1428 aa, Emesis furor
METRSKYKNKGPLPGGDRRGTSGADAGCLSMRTVSGEELSRRALVGSLSESTTAETHIHPSPSISAFQFNTPSYNLRSLPGGRRGTSGAGAGCSSIRSVGDGGLSRRAPLEQYTTAEDHQLSSPSSLFSSIPSSPPSYLEIPRSPTSSIISSQFYSSSHHSFEDVVQEANPAREPAPAEKVQRARNKWTKVMNIFIIRTYFIITHLETTNTKNYLSSLHQQFCDKFPTMQVSRQRVGDQRRAIMQRNLVPVQDIEKVRQEVQNLLQNQSQSTHTYITHTSHHHSSQRIKWSEEINEAIIRIYYRITKLETDCTSYRPILHRQVTTQFPHLAHVSVQRIADQRRIIITNKYISSEKLELIRAEVANELNRNNDVGEISSFTNNLIIHNTQHNNYNTLEQTLSLISDNTPEHFDENVETVQISALSNETKYEIKQSFLKILEKFTDSDPTSRPYLPKQKSSKKLLEIVNYIDSTLLPDVLNPETDFETLHLIIYCGAYTAALQNGSRISETPNVKQRTLYIPPWLKRLSEKLNKLRRQIAQLIAYSNGNRSPALEKKVTEIKRLYAVHSRHEDNNTDLSHYLDTLKQKLNVIANRIRRYNKTTLRKTQNKLFINNEKAFYRQLNEHNTNGTTTHSHTSPTPESLEKFWSGIWSNPVDHEINTWINEENLDIVPEMESNEITIELLQQIIEKTHNWKAAGSDNIHNFWFKKFKHTHAYLVTHINNFLQNPELLPKYITHGTTYMLPKDKLDLTNPAKYRPITCLQTIYKIITACLAELIYKHVSHHKILAEEQKGCRKHSQGCKEQLIIDSVASRQALKQKKNIYTAYIDYKKAFDSVPHSWLLYVLKHYKINSTIIYFLENTMNNWTTKLKLNVNNESIQTDFIKIRRGIFQGDSLSPIWFCLALNPLSKLLNSSNKGYDIDNSNNSYILTHLMYMDDIKLFGSSLTEIETLIDITHNFSSQIHMEFGIDKCRIQSVQKGKPEANSYTLSDYQQIDPVDDIEGYKYLGYQQSQQIHSKDIKTILTRKFKDRLHKILHTQLNSRNTVKAINTFAIPILTYSFGIIPWSQTELKNLQRKINTTMTNHRKHHPRSCIQRLTLPRIEGGRGLIDIQNLHNKIVTDLRSYFYNKSQDSELHRAIVQTDLKCTPLNLKDLTINLPEINKQHKLDLWLQKSLHGRHRLDLVNENVDKAASNAWLKRGELFPETEGFIMAIQDQVIDTKNYRKFVIRDRSLHNDICRHCHSNSETIQHITGACKSITQSDYKHRHDQIASIVHQYLAHKHNLISEKTSYYKYTPQIILESTAHKMYWDRTILTDKTIHFNRPDITLLDKINKIVYLIDIAVPNTHNLKTTFSEKITKYTDLAIELKSQWQVNTVKTVPIVISTTGVIPKSLHTSLKLLQIHPLTYTLMQKAVILNTCRIVRKFLSLDN

SEQ ID NO: 25996 - protein, 1361 aa, Hypophylla argenissa
MYQRVYNLRSLPGVRRGASGADAGCSSIRSVGDGGLNRRAPLEQYTTAENHHSSSPPSSLFSSVPSSPPSYIDPRRSLSSPSSSIKSNPIHISSHNSFEDVVQEAISANEPAPAEKVQRARKKWTKDMNIFIVRTYLIITHLETRNTRNYLSSLHQQFCEQFSDMQVSRQRIGDQRRAIMRRSLLSIQEINDIKHEVQISLQNHPHSTTHTSKSQELIYTSQRLKWSEEINETILKIYYRITKLETDCTAYRPLLHREIITKFPQLAHVSVQRIADQRRIIINNNYFPAAKLQEIRADVATELIENNDIENTEEVQLETNIAVANNTQDNNSVRIANSLILENEEEHTTLSTHTSTLSRDAKQEIKDQFLQTVDKFKNSDPTDRPYLPKQKLTKKLAATVDYINSHLLPEILTSETDFDSLQLSIYCGAYTAAIQNGSRVFETTDKKQHTQHTPQWLKRLQDKVNKLRSQIAQLIAYIDGNRSMALEKKIQYIKRQYTVHSRHENDNRNLSHYLDTLKQKLNVTANRIRRYKKTTLRKTQNKLFHSNEKRFYRQINEHNTNTSIDSHASPTPEDLEDFWSSIWSNPVDHKTSSWIEGEDLSGLSDMVFNEITINILQRVIQNTHNWKATGSDKIHNYWYKKFTYTHSLLAKHINYFLLRPEQLPKYITQGTTYMLPKDKTDLTNPAKYRPITCLQTIYKIITACLTDIIYKHINTNNILAEEQKGCRKFSQGCKEQLIIDSITSKQAIKHKKSIYTVYIDYKKAFDSVPHSWLLYILKHYKINPTIINFLENTMANWSTKLMLCVNNESIQTNPIKIRRGIFQGDSLSPLWFCLALNPLSNLLRKSNKGYNLSTGHNLSTVTHLMYMDDIKLFGSSYTDIETLIDITQKFSSDICMEFGIEKCKIQSVQEGKLQVNTYVLDNLQHIDPVDEKEGYKYLGYQQSRQIHSKQTKITLRKKFIDRLNKILYTHLNSRYTVKAINTYAIPVLTYSFGIIPWSQTELKNLQRKINTTMTYHRKHHPRSCIQRLILPRIEGGRGLIDIQNLHNKIVRNLRSFFYNKSQDSELHSSIVLADNKLTPLNLKDTTVNISITEKQQKLDSWSQKSLHGRHRHDLTNDNVDKAASNAWLKRGELFPETEGFMMAIQDQVVDTKNYRKHIIHDRNLQNDFCRHCHSNSETIQHITGACKSITQTDYKHRHDQVAAIIHQYLASKFNLIKEKTTYYKYAPEIILESSTHKLYWDRTILTDKTIHFNRPDITLLDKTNKIVYLVDIAVPNTHNLQSTFSEKITKYTDLAIELKSQWQVNTVKTVPIIISTTGVIPRSLHNSLKLLEIHPLTYILMQKAVILNTCRIVRKFLSLHS

SEQ ID NO: 25997 - protein, 1356 aa, Hypophylla argenissa
MNGVMSQRFYNLRSLPGGRRGTSGADAGCSSIRSVGDGGLDRRAPLDKYTTADNHHSSSSSLFPSIPSSPQSYLQRPSSSSSIISEFNTSSHNAFGDVVQEVNLASEPAPTTEGCRVRKKWTKEMNIFIVRTYLTITQLETINTKNYLATLHQKFCEQFPQMKVTRQRVGDQRRAIMHRSLLSAEEINDIRLEVQTLLQNYPQTVKNIVDAGHSTHRLKWSNEINEAIVRTYFRVTQLETNCTAYRHLLHKEIITQFPQMAHVSVQRIADQRRLIINNKYICTEKLQQIREEVSLELDRNLSCEDVCLISNDKTLNDTNEDGILPELANSQSLNNLHINDTEDLEERRVFSLPKDVEENTRELFLHSIEKFRNTDPTTRPYLPKQKSSKKLAAIVEYINSYLIPEIISTETSFETTQTVIYCGAYTAIIQNGARITETSSKQRTSQETPSWMKRLENKINTLRTKIAQLTAYMNGNRSIALERKINEIKQQFIVHSKHEIENTDVTHYLDTLKQKLNVTAARIRRYKKTTLRKTQNKLFVNNEKSFYRQLNEQHNNNNTIPVPNNSPSPDSLYEFWSNIWSNPVNHNNNTCVDEEDTEKLPEMEFDKIEINLLQKVITKTHNWKTGGSDNIHNYWYKKFTSVHPSLVTHINNFLLHPDQLPNYITLGTTYMLPKDKSDPANPSKYRPITCLQNIYKIITACLTQLIYEHIDTHSILSEEQKGCRKQSQGCKEQLIIDSVVSRQALKQRRNIYTMYIDYKKAFDSVPHSWLLFILKHYKVNSTIVNFLETTMSNWSTRLKLNINNDLIQTDAIKIRRGIFQGDSLSPLWFCLALNPLSRLLNNSKHGYKISYNRKHYTLTHLMYMDDIKLFGGTLKEIEALADITQAFSSAIQMEFGIDKCKIQSVQRGKLQANVYHLNEHEQIDPVDEEEGYKYLGYQQSQQIHCKQTKIALTQKFKSRLSKIFNTYLNSRNTTKAINTYAIPILTYSFGVIKWSQTELKNLQRKLNTAMTKHCKHHPRSCIQRLTLPPNEGGRGLIDIQNLHNKIVTDLRSFFYSKSQYSSLHHAISQVDFKYTPLNLKNNNFNLPNTDKQHKLDVWLEKSLHGRHRLDLINENVDKVASNAWLKRGELFPETVGFMLAIQDQVMDTKNYRKFITRDTSLHNDLCRHCHSNSETIQHVTGACKAIVQTDYKHRHDQIAAIIHQYLAFKYKLISEKTTYYKYTPEIILESPTFKMYWDRTILTDKTIHFNRPDITVHDKIKKIVYLIDIAVPNTHNLQTTYTEKIKKYTDLSIELKSQWQVNTVKTIPIIISSTGVIPKTLHNSLKMLQIHPLTYVLIQKAAILNTCRIVRKFLSL

SEQ ID NO: 25998 - protein, 1450 aa, Sarota myrtea
METRSKVRKRQESLPGGDRRGASGAGAGCYSMRDTGGEALNRRAPVTQHATAERRKLNRRANDAKDTAERQGDEVTSPYSLILPTYNIPFSKFKSQTHEPSSSFVRQPNSSLYNLRPQPRCQRSISGDSAGCSSMRSGSDGRLNRRPPLTTVEDHSSSPSSLFSSIPSSPPSYLERASPSSSITSGPYITWPHHSFEDVVQEANFANKPAPAKRGVRVRNKWTKPMNIFIVRTYFIITQLETTNTKHYLAALHQKFCEQFPDMEVTRQRVGDQRRAIMQRDLLSTGEINDIRQEVKLFLQTHPHNIIVTQPDSHTTHRLGWSDEVNETIIRIYLKITNLETDCTTYRPILHKEVIRQFPHLAKVSVQRIADQRRLIINNKYISSEKLQEIRAEVAIGLDRNTAFEDVPLLSNNQSLNDTHTLTDLTISQESHNFQLNASANVEEVRTSFISIDTEKRVRELFLHAMEKFVYSDPTTRPYLPKQNSSRKLAKIVEHINSHIIPEFLKTDTSFEITQAIIYCGAYTACIENGARITDTFTKKTAAQQTPYWLKRLQNKISNIRRKIGQLTEYIRGNRSPALVRKVEEIKLEHTTHSKHENNNTELTHYLDTLKQKLNVFASRIRRYKKTTLRKNQNKLFANNEKAFYRQLTEKHTTSGSDTLPSSESLHSFWSNIWSHPVDHKTSSWIEMENLDKLPEMDFDKIDINLLQRVIAKTHNWKMGGSDNVHNYWYKKFTNTHPILLTHINNFLLNPEQLPKYVTEGTTYMLPKDKNDMRNPAKYRPITCLQNIYKIITACLAQSIYKHIDCNNILSEEQKGCRKLSQGCKEQLIIDTVACRQAFKHRKNIYTMFVDYKKAFDSVPHSWLLFILKHYKIHPTIVHFLEKTMSHWTTKLKLSVNEDSIQTDSIKILRGIFQGDSLSPLWFCLALNPLSHLLNNSKHGYQISYDYNHYTLTHLMYMDDIKLYGSTLKEIEELADITQIFSADIHMEFGIDKCKIQSVQRGKVQSHIYHLNDHQQIDPVDTFEGYKYLGYQQSQQIHYKEIKTDLIQKFKDRINKILNTYLNSRNTTKAINTYAIPILTYSFGVIHWSQTDLKNLQRKLNTTMTKHCKHHPRSCIQRLTLPRNEGGRGFIDIQNLHNNIVTNLRSFFFNKSQQSSLHNAVVLADFKHTPLNLKDGNVNLPNTDKQVKLDTWIKKSLHGRHRLDLINENVDKVASNTWLRRGELFPETEGFMVAIQDQIIDTRNYRKFIIHDPTLHSDVCRHCHSSSETIQHITGACKSIVQTDYKHRHDQVAAIVHQYLAYKYKLIAEKTAYYKYKPQIILESSTFKMYWDRTILTDKTVHYNRPDITLHDKVNKVVYLIDIAVPNTHNLQTTFTEKITKYTDLSIELKSQWHVNTVKTIPIIISTTGVIPKTLHNSLKLLDIHPLTYILLQKAVILNTCRIVRKFLSL

SEQ ID NO: 25999 - protein, 756 aa, Apodemia mejicanus
MEFSEINIDLLQKVIARSQNWKASGSDRIHNYWYKKLTYIHPVLLTHINTFLQKPELLPKYITQGVTYMLPKDKTDLTNPEKYRPITCLQTIYKIITACIAEVIYEHIDNNNILSEEQKGCRKQSQGCKEQLIIDSVATRQAFRQKRDIYTVYIDYKKAFDSVPHSWLLSILQHYKINLTIIDFLKNAMTNWATRLNLNINNEAIQTDLIRIRRGIFQGDSLSPLWFCLALNPLSKLLNRLNIGYNISDIHNNYTLSHLMYMDDIKLFGSSFTEIGKLIDITHNFSTDICMEFGIDKCKIQSIQKGHLQTNSYLLNNNQKIDTVDETYGYKYLGYQQSRYIHYKQTKIILTQKFKDRLNKILNTNLNSRNTVKAINTYAIPILTYSFGVIPWTQTELKNLQRKINTSMTYHRKHHPRSCIQRLTLPRIEGGRGFIDVQNLHNKIITNLRSFFYSKSQESDLHRVVVKTDAKYTPLNLSNTTVNLPVFDKQHKIELWAQKSLHGRHRHDLINENVDKVASNHWLKRGELFPETEGFIMAVQDQVIDTKNYRKFIRHDQTVHNDLCRRCHSNAETIQHITGACKSIAQTDYKHRHDQIAAIIHQNLAYKYNFITEKVPYYKYTPEVVLESSSHKIYWDRTILTDKTIHFNRPDITLLDKIHKTVYLIDIAVPNTHNLQTTFSEKIAKYTDLTIELKSQWRVNTIKTIPVIISTTGVIPKSLHISLKQLEIHPLTYTLMQKAVILNTCRIVRKFLSLNN

SEQ ID NO: 26000 - protein, 811 aa, Apodemia walkeri
MFYRQLNEPKINTPPNSNASPTPDSIKEFWSSIWSNPVDHKTNSWIEEVMSDLPAMEFSEINLDLLQKVIAKSHNWKAAGSDQIHNFWYKKLTYIHPMLLAHINAFLQKPDLLPKFITQGVTYMIPKDKNDLTNPEKYRPITCLQTIYKIITACLAEVIYKHINNKSILSEEQKGCRKQSQGCKEQLIIDSVFSRQALRQKRDIYTVYIDYKKAFDSVPHSWLLFILKHYKINLIIIDFLKNAMTNWATRLHLNINDEPIQTDLIKIRRGIFQGDSLSPLWFCLALNPLSKLLNELNIGYSISDHHNSNALTHLMYMDDIKLFGSSFTEIDKLIDVTHKFSTDICMEFGIDKCKIQSIQKGHLQPNAYLLNNDQVIDSVDETHGYKYLGYQQSRQIHYKQTKTILTQKFKDRLNKILNTNLNSRNTVKAVNTYAIPILTYSFGVIPWSQTELKNLQRKINTSMTYHRKHHPRSCIQRLTLPRIEGGRGIIDIQNLHNKVISSLRSFFYNKSQESYIHSMAVQADVKHTPLNLCDTTINLPNFDKQHKIELWLQKTLHGRHRRDLINEGIDKAASNDWLKRGELFPETEGFMVAIQDQVIDTKNYRKFIRHDQTAHNDICRRCHSNSETIQHITGACKAITQTDYKHRHDQIAAIIHQYLAFKYKFITEKVAYYKYIPEIILESSTHKIYWDRTILTDRTIHFNRPDITLLDKINKIVYLIDIAVPNTHNLQATFSEKIAKYTDLAIELKSQWRVNTVKTIPIIISTTGVIPKSLHVSLKQLEIHHLTYTLMQKAVILNTCRIVRKFLSLYN

SEQ ID NO: 26001 - protein, 1376 aa, Apodemia duryi
MSQQVYNLRPLPGGRRGASGAGAGCSSIRTVGDGGLSRRVPLEQYTTAENGALNRRVPHDQHATAEIHLSSPSSLFSTLTSSPPSYLELSRSLSSSSIMSSSPYRACHQSFEDVVQEANSATKPAPTKKAVRARKKWSKDMNIYIIRTYLIITQLETTNLRNYLAPLHQQFCEQFPNIQVSRQRIGDQRRAIMQRGLLSVQEIQNIRKEVQILLQNTPQVTLSNNNSTGRRLKWNQDINEAIMRTYFSITNLENDCTSYRPLLHKEIVTQFPHLSHVSVQRIADQRRLIVTNKYISSEKLEQIRLEVATELNKNNSVEEAEEIPAMTNSIINNETQNNNAHLPEIINAQILENETEQNNLNNINNFQHPNTLPNDEEQKIKELFLNAIEKFRDSDPTCRPYLPKQKSTRKLNDVVNFINSYLLPDVLNPETDFETLHLIIYCSAYTSIIKNGGRVSESLNFKKHTQRTPPWLKRLQDKIIKLRSHIGQLVAYINGNRSPALGKKIDNIKHQYSVHSRHENDNADLSHYLDTIKQKLNVIANRIRRYKLTTLRKTENKLFVNNEKSFYRKLSELNNNTSPDSNVCPTEDSIKLFWSGIWSNPVEHTNNNWIEEEDISDLPAMEFSEINIDLLQKVIARSQNWKASGSDRIHNYWYKKLTYIHPVLLTHINTFLQKPELLPKYITQGVTYMLPKDKTDLTNPEKYRPITCLQTIYKIITACIAEVIYEHIDNNNILSEEQKGCRKQSQGCKEQLIIDSVATRQAFRQKRDIYTVYIDYKKAFDSVPHSWLLSILQHYKINLTIIDFLKNAMTNWATRLNLNINNEAIQTDLIRIRRGIFQGDSLSPLWFCLALNPLSKLLNRLNIGYNISDIHNNYTLSHLMYMDDIKLFGSSFTEIGKLIDITHNFSTDICMEFGIDKCKIQSIQKGHLQTNSYLLNNNQKIDTVDEIYGYKYLGYQQSRYIHYKQTKIILTQKFKDRLNKILNTNLNSRNTVKAINTYAIPILTYSFGVIPWTQTELKNLQRKINTSMTYHRKHHPRSCIQRLTLPRIEGGRGFIDVQNLHNKIITNLRSFFYSKSQESDLHRVVVKTDAKYTPLNLSNTTVNLPVFDKQHKIELWAQKSLHGRHRHDLINENVDKVASNHWLKRGELFPETEGFIMAVQDQVIDTKNYRKFIRHDQTVHNDLCRRCHSNAETIQHITGACKSIAQTDYKHRHDQIAAIIHQNLAYKYNFITEKVPYYKYTPEVVLESSSHKIYWDRTILTDKTIHFNRPDITLLDKIHKTVYLIDIAVPNTHNLQTTFSEKIAKYTDLTIELKSQWRVNTIKTIPVIISTTGVIPKSLHISLKQLEIHPLTYTLMQKAVILNTCRIVRKFLSLNN

SEQ ID NO: 26002 - protein, 1376 aa, Apodemia mormo
MSQQVYNLRPLPGGRRGASGAGAGCSSIRTVGDGGLSRRVPLEQYTTAENGALNRRVPHDQHATAEIHLSSPSSHFSTLTSSPPSYLELSRSLSSSSTISSSPYRACHQSFEDVVQEANSATKPAPTKKAVRARKKWSKDMNIYIIRTYLIITQLETTNLRNYLASLHQQFCEQFPNIQVSRQRIGDQRRAIMQRGLLSVQEIQNIRKEVQILLQNTPQVTLSNNNSTGRRLKWNQDINEAIMRTYFSITNLENDCTSYRPLLHKEIVTQFPHLSHVSVQRIADQRRLIVTNKYISSEKLEQIRLEVATELNKNNSVEEAEEIPAMTNSIINNETQNNNAHLPEIINAQILENETEQNDLNNINNFQHPNTLPNDEEQKIKELFLNAIEKFRDSDPTCRPYLPKQKSTRKLNDVVNFINSYLLPDVLNPETDFETLHLIIYCSAYTSVIKNGGRVSETLNFKKHTQRTPPWLKRLQDKIIKLRSHIGQLVAYINGNRSPALGKKIDNIKHQYTVHSRHENDNADLSHYLDTIKQKLNVIANRIRRYKLTTLRKTENKLFVNNEKSFYRKLNEPNNNTSPDSNVCPTEDSIKLFWSGIWSNPVEHTNNNWIEEEDISDLPAMEFSEINIDLLQKVIARSQNWKATGSDRIHNYWYKKLTYIHPVLLTHINTFLQKPELLPKYITQGVTYMLPKDKTDLTNPEKYRPITCLQTIYKIITACIAEVIYEHIDNNNILSEEQKGCRKQSQGCKEQLIIDSVATRQAFRQKRDIYTVYIDYKKAFDSVPHSWLLSILQHYKINLTIIDFLKNAMTNWATRLNLNINNEAIQTDLIRIRRGIFQGDSLSPLWFCLALNPLSKLLNRLNIGYNISDIHNNYTLSHLMYMDDIKLFGSSFTEIGKLIDITHNFSTDICMEFGIDKCKIQSIQKGHLQTNSYLLNNNQKIDTVDETYGYKYLGYQQSRYIHYKQTKIILTQKFKDRLNKILNTNLNSRNTVKAINTYAIPILTYSFGVIPWTQTELKNLQRKINTSMTYHRKHHPRSCIQRLTLPRIEGGRGFIDVQNLHNKIITNLRSFFYSKSQESDLHRVVVKTDAKYTPLNLSNTTVNLPVFDKQHKIELWAQKSLHGRHRHDLINENVDKVASNHWLKRGELFPETEGFIMAVQDQVIDTKNYRKFIRHDQTVHNDLCRRCHSNAETIQHITGACKSIAQTDYKHRHDQIAAIIHQNLAYKYNFITEKVPYYKYTPEVVLESSSHKIYWDRTILTDKTIHFNRPDITLLDKIHKTVYLIDIAVPNTHNLQTTFSEKIAKYTDLTIELKSQWRVNTIKTIPVIIATTGVIPKSLHTSLKQLEIHPLTYTLMQKAVILNTCRIVRKFLSLNN

SEQ ID NO: 26003 - protein, 1351 aa, Hypophylla argenissa
MSKRIYNLRSLPGGRRGASGADAGCSSIRSVGDGGLNRRAPLEQNTTAESHHLSFPPSSPSSSISSTSSSCTVLPKPSSLSSSTINAYPIHSSPHVPFEDVVQEANFANDPAPAKKIKRTRKKWTKDMNLFIVRTYLIITQLETTNTRNYLTTLHQQFCEQFPDMQVARQRIGDQRRAIMQRNILSSEDINNIRQEVQILIQDRSQTVPYPNNVQVCNRLKWSDEINEAIIRIYYRLTNLETDCTAYRPQLHKEIITLFPVLAHVSAQRIADQRRLIINNKYISNEKLQEIRTEIAIELNRNSITVETNILGMHPNIENQPNQKSLQVLDEPSNRNENKETFQESILTNDTKKQIKKIFLETIDKFTGSNPTTRPYLPKQRSSKKLSSIVNYINSHLLCDVLSSEANFEKIHTLIYCGAYTAVIQNGTKVSESENNNLRIQQTPSWLKRLQEKINKLRSKIGQLTEYINGNRSTTLEKKIRKIMREYLTHSRHENDNVDLVHFLDTLKQKLNVTANRIRRYKKTMLRKSQNMLFNNNEKAFYRELNKTKEYNNTSADRSPTPESLQTFWSNIWSNPVEHKKNNWIEKEHLNTLPDMEFNQINIDILQKVIAKTHNWKATGSDNIHNFWFKKFTSTHTLLLSHINNFLTRPEELPKYITEGTTYMLPKDKTDLCNPAKYRPITCLQTIYKIITSCLADSINKHVNKHNILNEAQKGCRKLSQGCKEQLIIDSIVSSDALKQKKNIYTAYIDYKKAFDSVPHSWLLFVLNHYKIHPTFINFLKNTMTNWTTRLKLNVDKKFIQTDFIKIQRGMFQGDSLSPLWFCLALNPLSSLLDQSNKGYTISNSQSPYTLSHLMYMDDIKLFGSSFEEIDTLIDITHTFSSDIHMEFGIDKCKIQSVQKGKLQKNTYVLDDQQQLDSIDETEGYKYLGYQQSRQIHFKQTKITLTYKFKDRLNRIFNTHLNSRNTTKAINTYAIPILTYSFGVIPWSQTELKNLQRKINTTMTKHRKHHPRSCIQRLTLPRAEGGRGIIDIQSLHNKIVTNLRIFFYNKSQSSPLHNATVQADFKYTPLNLKDSNYNLPNIEKQQKLDLWLQKTLHGRHRLDIINKNVDKIASNTWLKRGEMFPETEGFMMAIQDQVIDTRNYKKYIIRDGTVLNDFCRHCHSNPETIQHITGACRSITQTDYKHRHDQIAAIIHQYLAYKYNLIKDRTSYYKYNPQIILESSTHKLYWDRTILTDKTVHFNRPDIVLHDKINKAVYLIDIAVPNTHNLQTTYTEKITKYTDLAIELKSQWRVNTVQTIPILVSTTGVIPKSLQNSLEMLQIHPLTYILIQKAVILNTCRIVRKFLSLEK

SEQ ID NO: 26004 - protein, 1365 aa, Emesis heteroclita
MSQRLYNLRSLPGGRRGTSGADAGCSRIRPVGDGGLNRRAPLEQYTTAENGKLNRRAPHNFTTAERHRSSSVSPFSLFSSIPSSPVSYSDTHTTCSSAFSSPNPCVSFHNSLEDVVQVASAANKPAPTKKVQRVRNKWTKDMNMFILRTYFIITQLEKINTKNYLTQLHQQFCEQFPDIQVSKQRIGDQRRAIMQRNLLSNEEIEDVRREVQISSQNCTQTVSCSNNINTTQRLKWSDEINEAIIRVYYRLTKLESNCTAYRISLHKEIIALFPHFAHVSVQRISDQRRAIINNKFISNERLLEIREDIAKELNRNNIFEEGSIVNENNSYESFTEQLPLQVAEEQTNTIEKSEIDQTNVLSCETKKLIKDIFLQAVNKFIDSDPTSRPHIPKQKYSKKFTAIVDYINSSLLPDVLNPETNFETLHSLIYCGAYAAVIQNGARINDNSNRNRQTRQTPAWLERLQKRVNKFRSKIAQLIEYMNGNRSLKLENKIKNILREYSTHTRHEHDNTDLKHYLDTLKQKLNVTANRIRRYKKTTLRKTENALFNNNEKAFYRQLNKYNGDKLPYSDTTVSPDNLQSFWSNIWSHPVEHKSTTCIEKEKLDELPEMEFDKINIEILQKIIQKTHNWKAAGSDNIHNYWYKYFTNTHTLLVTHINNFLINPESVPKYILEGTTYMLPKDKTDSANPAKYRPITCLQTIYKIITSCLADAIYKHVDTHNILSEAQKGCRRLSQGCKEQLIIDSIVSRQALKQKRDIYTVYIDYKKAFDSVPHSWLLFILKYYKIHPTIIYFLESMMKKWATRLKLYIDNKSIFTEFIKIQRGIFQGDSLSPLWFCLALNPLSNLLDKSNKGYTITNNLNHFNITHLMYMDDIKLFSSSYEDICSLIDITQKFSSDICMDFGIDKCKIQSVQRGKLQTNVYVLNNHEQIDPVDEQEGYKYLGYQQSQQIHYKEIKTSLTQKFKGRISKICSTYLNARNTTKAINTYAVPILSYSFGIIPWSQTQLKNLQRMINTTLTKNRKHHPRSCFQRLTLPRSEGGRGFIDIQNLHNKIVKDLRAFFFNKSQVSQLHNAIVLADFKYTPLNLKNSNITLPNNDKQQKLDAWIQKSLHGRHRLDLTNEHVDNTASNIWLRRGELFPETEGFMLAIQDQVIETRNYKKHIIRDQSTQNDFCRHCHSNAETIQHITGACKSFTQTDYKHRHDQIAAIIHQYLAHKYKLINEKTAYYKYTPQIVLESSTHKIYWDRTILTDKTVHFNRPDITLFDKINKIAYLIDIAVPNTHNLQTTFTEKITKYSDLATEIKSQWKISTVKTIPIVISSTGVVPKTLHSSLRELQIHPLIYTLIQKAAILNTCRIVRKFLSLNN

SEQ ID NO: 26005 - protein, 1365 aa, Apodemia mormo
MSRRIYNLRSLPGGRRGTSGADAGCSSIRTVGDGGLIRRAPLEQYNTAENGELNRRAFHYHTTAEHHRSSSSSPSSIFTSASSPPISHIDTHSSLSSASSSPNPSFASSHTSFEDVVQVASTANKPAPAKKVQRVRNKWTKEMNTFIVHTYLIITQLEKINTKNYLTQLHQQFCEQFPDMQVSKQRIGDQRRAIMQRNLLSSEEINVIRREVQHLLQDNTQTIPYSDNINTTQRLKWNDEINEAIIRVYYRLTNLDSNCTAYRINLHKEIIALFPHLANVTVQRIADQRRAIMKNNYISNERLNEIRTEIATELNESSVTEEVVTVNKNDRDENFSEQVISQAAEVQVHTIENPEANRQNILPSSTEKQIKEFFLQTLNNFMDSDPTSRPYLPKQKYSKKLTAIVDYINSSLLPDVLSPETSFNTLHTIIYCGAYTAVIQNGAKVKEKFNKNRRIQQSPPWLERLQEKIKKLRSKIAQLIEYINGNRSLKLENKIKDIIREYSTHTRHENDNTDLVHYLDTLKQKLSVKANRIRRYKKTTLRKTENSLFFNNEKAFYRQLNKHNGNSKPTSCTPATPENLQHFWSNIWSHTVEHKNIDYIEKEGLAELPEMEFNEINTEVLQKVIRKTHNWKAAGSDNIHNFWYKYFTNTHSLLITHINNFLINPERLPEYIIEGTTYMLPKDKTDLTNPAKYRPITCLQTIYKIITSCLTDIIYKHIDAHNILSEAQKGCRRHSQGCKEQLIIDSIVSRQALKQKKDIYTVYIDYKKAFDSVPHSWLIFILKHYKIHPTIIYFLENMMKNWATRLKLYSNNKFIYTDYIKIKRGIFQGDSLSPLWFCLALNPLSSLLNKSNKGYTIADSPNTFNLTHLMYMDDIKLFSCSFEDISTLIDITQKFSTDIHMEFGIDKCKIQSVKKGKLQTNVYTLNNYEQIDPVDEIEGYKYLGYQQSQQIHTKQIKINLTQKFKGRLSKILSTHLNSRNTTKAINTYAISTLSYSFGVIPWSQTELKNLQRMINTTMTKNRKHHPRFCIQRLTLPRAEGGRGLIDIQNLHNKIVTDLRAFFYKKSLSSHLHNIVAQTDFKYTPLNLRNNNFSLPNNDKQQKLDVWTQKSLHGRHRLDLTNENVDKAASNTWLKRGELFPETEGFMISIQDQVIETRNYKKYIIRDQITQNDFCRHCHSNPETIQHITSACKSITQTDYKHRHDQIAAIIHQYLAHKYNLIKEKTAYYKYIPQIILESSTHKIYWDRTILTDKTVHFNRPDITLLDKTNKIVYLIDIAVPNTHNLQTTFTEKITKYTDLATEIKSQWQVSTVKTIPIIISSTGVIPKTLHNSLKQLQIHPLTYILLQKAAILNTCRIVRKFLSLS

SEQ ID NO: 26006 - protein, 1231 aa, Apodemia walkeri
MNIFIVRTYLIITQLEKINTKNYLTQLHLQFCEQYPNMQVSKQRIGDQRRAIMNRNLLSNPEINVIRSEVQTLLQNNTQIKTIPCSLNNNTTQRLKWNDDINEAIIKMYYRLTNLDSNCTAYRTKLHKEITTLFPHFANVSVQRIADQRRAIINNNYISKERLNEIRSEIATELNRNNVTEETVTENEFSSLSLDRDDNLTEQSTPQVVEVPSYTTENPEVNQKIILPSSKEKQIKELFLQALDNFKDSDPTSRPYLPKQKSSKKLTAIVDYINSSLLPDILSPETEFDTLHTIIYCGAYTAVIQNGARLYENSNTNQRVQQTPAWLERLQKKVNVLRSKIAQLIAYMNGNTSLKLENKIKEIIREYSTHTRHENDNRDLTHYLDTLKQKLSVTANRIRRYKKTSLRKTENSLFSNNEKSFYRQMNEHNGNSKSSLSTIATPENLQNFWSNIWSHKVEHKNIDYVEKEDLDGVPEMEFNEINIEVLRKVIKKTHNWKAAGSDNIHNYWYKYFTNTHSLLVTHINNFLGNPEDLPQYIIEGTTYMLPKDKTDLTNPAKYRPITCLQTIYKIITSCLTDIIYKHIDSHNILSEAQKGCRRHSQGCKEQLIIDSIVSRQALKQKKDIYTVYIDYKKAFDSVPHSWLLFILKHYKIHPTIIYFLENVMKSWATRLKLFNNNKFVYTDYIKIQRGIFQGDSLSPLWFCLALNPLSSLLNRSKKGYTIADSLKPFNITHLMYMDDIKLFSSSFEDISTLIDITQKFSSDIYMEFGIDKCKIQSVQKGILQKNVYTLNNQEQIDPINEIEGYKYLGYQQSQQIHARQIKINMTQKFKGRLSKICCTHLNSRNTTKAINTYAIPILSYSFGVIAWSQTELKNLQRMINTTMTKHRKHHPRSCIQRLTLPRTEGGRGLIDIQNLLNKIVTDLRTFFYNKSQSSHLHSTVVQADFKYTPLNLKNNNISLPNYDKQNKLDVWTQKSLHGRHRLDLINENVDKAASNTWLKRGELFPETEGFMISIQDQVIETRNYKKYIIRDQATQNDFCRHCHSNPETIQHITGACKSIAQTDYKHRHDQIAAIIHQYLAYKYNLIQEKTAYYKYTPQIILESPTHKMYWDRTILTDKTVHFNRPDITLVDKINKTVYLIDIAVPNTHNLQTTFTEKITKYTDLATEIKSQWQVSTVTTIPVIISSTGVVPKTLHESLRQLHIHPLTYILLQKAAILNTCRIVRKFLSLSS

SEQ ID NO: 26007 - protein, 1341 aa, Symmachia rubina
MRTVGDGGLNRRAPLEQYTTAESDHPSTSPATSLFSSISSSPPSYLQVPRTLSSSPITSESFYSSSHQSFEDVVQKANCAVESALTKKAVRTRNKWTKEMNIFIVRTYFIITQLETTNTRNYLIPLHQKFCEQFPDMQVPRQRIGDQRRAIMQRNLLSIEDIKEIQQEVETLIQNSSQNIMFSNNAYASRRLKWSEEINEAIMKTYYRITKLETNCTAYRPLLHKEIITQFPHLAQVSVQRIADQRRIIINNKYISDEKLLQIQSEVAIEFNTNNVGERVGSVSLLENNILNNTQDNFNLTEQTNSRILDNILTEVNTDAVQPHNIISTGSPSTLSNDKKQQIHDTYLQAVEKYKDSDPTSRPYLPKQKSTTKFIEIVEYINSDILPNVLKPESNFEMFNLFVYCGAYTAAIHNGSRVSENFNANKLNIQSTPLWLNRLQEKINKLRSKIAQLIAYINGNRSPALERKIIDIKRQYKVHCRHENENSDISHYLDTLKQKLNVTVNRIRRYKRTTLRKNQNKKFVNNEKAFYRQLHEHKTDITSKTLTTSPTPENLENFWSAIWSYPVDHKTNGWIKEEDLSELPDMEFNNINLDLLQKVIAKTHNWKATGSDNIHNYWYKKFTYTHSILVTLINNFLQKPELLPKYVTQGVTYMLPKDRTDLTNPAKYRPITCLQTIYKIITACLAEVIYSHLNKHSILAEEQKGCRKLSQGCKEQLIIDSVVSRQAFKQKKDIYTVYIDYKKAFDSVPHSWLLYVLQHYKINPIIINFLQNIMTNWSTKLKLIVNNESIQTDFIKIRRGIFQGDSLSPLWFCLALNPLSNLLNRSNKGYNISNRHDYQSLTHLMYMDDIKLFSSTFTDIETLIEITHTFSSDICMEFGIDKCKIQSVKEGNLQKDAYLLSNHQQIDPVDETEGYKYLGYLQSRQIHFKQTKCTLTQKFKDRLNQIFCTELNSRNTVKAINTYAIPILSYSFGVIPWSQTELKNLQRKINTTMTQPRKHHPRSCIQRLTLPRIEGGRGFIDIPNLHNKLVTNLRSYFYSKSLNSKLHNIITQADSKYTPLNMKDSTLIFPNTDKQQKLDSWTQKSLHGRHRLDLMNENIDKAASNAWLKRGELFPETEGFIMAIQDQVIDTKNYRKFIIKERTLHNDLCRHCHSNSETIQHITGACKAITQTDYKHRHDQVAAIIHQYLAYKYNLITEKLSYYKYTPKIILESATHKIYWDRTILTDKTVHFNRPDITLLDKINKLVYLIDIAVPNTHNLQTTFSEKITKYTDLSIELKSQWQVNTVKTIPIVISTTGVIPKSLHSSLKLLGIHPLVYFLMQKAVILNTCRIVRKFLSLDS

SEQ ID NO: 26008 - protein, 1207 aa, Apodemia hypoglauca
MKVTRQRIGDQRRAIMHRNLLPIEDINSIRQETQNILPNLTQTVIHSDNTCNTRIRWSDDINEAIMKGYYRLTNMETNCTAYRPQLHKEVVSLFPFLSHVSVQRIADQRRLIVKKMYISDERLQQIRAEVAIELGRNTVCNDVDLPPSIPRSTPLSSSQSTVIFNTTATGCTAENDSFINCLESQTSDTPQVNSTENRETLVEIPQDTENIKIRESFMHAVEKFTNSDPTSRPYLPKQKASKQLSTTVEYINNHLIPEVISTEMSFDRMQTIIYCGAYAACKQNGTQITEEWTRNNRTRPTPRWLKRLEDKVNVLRSKIAQLTEYINGNKSPALKRKIIQIQYQYAIHSTHENHNTDTTHYLDTLKQKLNVTANRIRRYKKATLRKTQNKLFRNNEKAFYRHLTEPSNNTTVMEKPSPESLYSFWSNIWSKPVEHKTSSWLETEDVEKLPEMEFDEIDIGLLQTVIAKSHNWKTGGSDNIHNYWYKKFTSIHPILVRHINYFISNPHKLPKYVTQGITYMLPKDKNDLRNPAKYRPITCLQNIYKIITACLTLTIYKHVEKHEILTEEQKGCRKQSQGCKEQLIIDSVISRHALKQRHNIYTMYIDYKKAFDSVPHSWLVFILKHYKIHPTIVNFLENTMQNWTTRLKLNINNETVQTEVINIQRGIFQGDSLSPLWFCLALNPLSTHLNKSQYGYKVSYNHTNPTLNHLMYMDDIKLFAATLEEIEQLADITQTFSSDIHMEFGIDKCKIQSVQRGKVQLNTYHLNEHQQIDPVDETEGYKYLGYQQSQQIHIKETKTTLTQNFNSRLNKILNTHLNSRNTIKAINTYAIPILTYSFGVIHWSQTELKNLQRKINTSMTKHCKHHPRSCIQRLTLPRDEGGRGFIDIQQLHNKIVTNLRSFFYKKAQQSSLHQTIVQIDLTYSPLKLKNSSFNFPITNKHDKMDAWIKKSLHGRHRLDILNENVDKIASNTWLKRGELFPETEGFMVAIQDQVIETRNYRKFITHDPSLHSDICRHCHSNSETIQHITGACKSIVQTDYKHRHDQIAAIIHQYLAYKYKLITEKTSYYKYTPQVILESSSYKMYWDRTILTDKTIHFNRPDITLHDKLNKVVFLIDIAVPNTHNLQTTYTEKITKYTDLAIELKNQWRVNTVKTIPIIISTTGVIPKTLHNSLKQLQIHPLTYILMQKAVILNTCRIVRKFLSPLN

SEQ ID NO: 26009 - protein, 1385 aa, Emesis brimo
MSRKIYNLRSLPGGRRGTSGADAGCSSIRTVGDGGLNRRAPLEEYTTAEIGMLNRRASQHTTAENHHYYSTPSSSLFASTHTSPLSNLYLSSSSSSFASDKLISSPSHSFEDVVQEADTANTPAPTKKGFRARNKWSKEMNIFILRTYLIITRLESTNTKNYLVPLHQKFCEQFPEMNVTRQRIGDQRRAIMYRQLLSMEEINSIRHEIQTILPNLSQTVIQPDNTCNSQRMRWSNDLNEGIMRIYYRITNLEVNCTAYRPLLHKEFVSLFPHLAHISVQRIADQRRNIVNKKYVSDEKLQQIRAEVATELNRNIVSNEVNLQYNSPKPTSLSSTQATVNFDIVASDHTIEKDNSIIRLESQESDIMQVGTTQNVETLTQIPGDTDFDQIRESFLHCLNKFTDTDPTSRPYLPKQRATKKLATIVEYINSHLIPEVLSTEVSFDRLQTIIYCGAYTACKQNGSRIINGRIRNIHTHRKPQWLKRLEDKVNVLRCKIGQLTEYINGNRSPTLERKIMNIKYQYSIHSRHENHNTEITHYLDTLKQKLNVTANRIRRYKKTTLRKTQNKLFGNNEKAFYRQINGLDSDNTVVAEEPSPENLYSFWSNIWSKPVDHRISGWVETEDVEKLPEMEFDKIDIELLHTIIAKTHNWKTGGSDNIHNYWYKKFTSIYPILVTHINYLILNPDKVPKYVTQGITYMLPKDKTDLGNPAKYRPITCLQNIYKIITACLAKSIYKHVDTHKILSEEQKGCRKQSQGCKEQLVIDSVISRHALKQKHDIYTMYIDYKKAFDSVPHSWLLFILKHYKIHPTIVNFLENTMPNWTTRLKLNINNDPVFTEVIHIRRGIFQGDSLSPLWFCLALNPLSTLLNRSKYGYKISNDETNQTLTHLMYMDDIKLFGATLREIEELADITQTFSSDIHMEFGIEKCKIQSVLKGRVLQNTYHLNEHQEIDPVDEIEGYKYLGYYQSQQIHTKETKITLTQNFKSRLNKILNTHLNSRNTIKAINTYAVPILTYSFGVIHWSQTELKNLQRKINTTMTKHCKHHPRSCIQRLTLPRDEGGRGLIDIQNLHNKIVTNLRSFFFKKAQQSSLHQAIVQIDLIYSPLKLKNSSFNTLITSKYDKLDAWIKKSLHGRHRFDILNENVDKVASNTWLKRGELFPETEGFMLAIQDQVIETKNYRKFIIHDQTLHNDICRHCHSNSETIQHITGACKSIVQTDYKHRHDQIAAIIHQYLAYKYKLITEKVSYYKYTPQIILESSSHKMYWDRTILTDRTVHFNRPDVTLHDKANKVVYLIDIAVPNTHNLQTTFTEKITKYTDLAIELKNQWRVNTVKTIPIIISTTGVIPKTLHNSLEQLQIHPLTYILMQKAVVLNTCRIVRKFLSPLN

SEQ ID NO: 26010 - protein, 1456 aa, Apodemia zela
MRYRPTYKSRCWDTPGSLEEYNNNNNNPPKGSPCRGGGAYGKRLLSNYASSPGYFCILITFPTNDLKHNNEVMSRRIYNLRSLPGGRRGTSGADAGCSSIRSVGDGGLNRRAPLEQYTTAETGKLNRRASHEQYTTAENHHSPPSSSLFSSPYSSPPSNLNLSSSSSSFASEQSNISPSHSFKDVVQEANTADIPASAKKGLRVRNKWTKEMNIFILRTYLIITQLESINTKNYLVTLHQKFCEQFPEMKVTRQRIGDQRRAIMHRNLLSVEDINSIRREIQSILPNLTQTATHSDNVCNTHRIRWSDDINVAIMKTYYRVTNLETNCTAYRPQLHKEVVSLFPYLAHVTVQRIADQRRLIVNKMYISDEKLQQIRAEVALELGRNTVCNDLDLPSHRPESTQLSSSQSTAIFNTIATGCTIEDDSSINHLKSQTSDTVQISASENGETLIKISGDTESKQTRESFLLAIEKFANSDPTTRPYLPKQRPSKKLAIIVEFINSHLIPEVVSSEMSFDMMQTVVYCGAYAACKQNGARITEGWARNNRTPLTPRWLKRLEEKVKVLRSKIAQLTEYINGNKSPALERKIIQIQYQYSIHSRHENHNTDATHYLDTLKQKLNVTANRIRRYKKATLRKTQNKLFGNNEKAFYRQLTEHSNNSTITEGPSPESLYSFWSNIWSKPVEHKNSHWFETEDLEKLPEMEFNEIDIDLLQTVIAKTHNWKTGGSDNIHNYWYKKFTSVHPLLVTHINYFISNPGNLPKYVTQGTTYMLPKDKTDLGNPAKYRPITCLQNIYKIITACLTLTIYKHVDEHKILSEEQKGCRKQSQGCKEQLIIDSVISRHALKQRRDIYTMYIDYKKAFDSVPHSWLLFILKHYKIHPTIVNFLENTMQNWTTRLKLNINNETVHTEVINIQRGIFQGDSLSPLWFCLALNPLSTLLNKSPYGYKVSHNHINKTLNHLMYMDDIKLFGATYKEIERLADITQTFSSDIQMEFGIDKCKIQSVQKGRVQQNTYHINEHQRIEPVNETEGYKYLGYQQSQQIHIKETKTTLTQNFQGRLNRILNTHLNSRNTIKAINTYAIPILTYSFGVIQWSQTELKNLQRKINTSMTKHCKHHPRSCIQRLTLPRDEGGRGLIDIQHLHNKIVKNLRSFFYKKAEQSSLHQTIVQTDLIYSPLKLKNSSYNFPITNKNDKLEAWIKKSLHGRHRLDIINENVDKIASNTWLKRGELFPETEGFMVAIQDQVIETKNYRKFITHDPNLHSDICRHCHSNSETIQHITGACKSIVQTDYKHRHDQIAAITHQYLAYKYKLITEKIPYYKYTPQVILESPSYKMYWDRTILTDKTIHFNRPDITLHDKVNKVVYLIDIAVPNTHNLQTTFTEKITKYTNLAIELKNQWRVNTVKTIPIVISTTGVIPKTLHNSLEQLQIHPLTYILMQKAVILNTCRIVRKFLSPLN

SEQ ID NO: 26011 - protein, 1327 aa, Eantis tosta
MRLRNRQIPQAGTREGESRPEPSGSGSPTYSGEGNASHVTAQSYTVVVDEISSPISSHSSSPTSSVHRFVQSPNSSSDSYQSTQAAGITSSHLPSNSLLLDDVVRNTNLVTKPVPITTKASKRNKWSDDMNKYILRTYLELTKNETDDSVRYLPILHSKFLDKFPHMQVSRQRVGDQRRVIVRNKLIPQEEIDRIYQEVKDNLNVRTATQEKTQDVTAGQRMKWSSELNEFIIRSYYRITKLETDMIMYRTRLHQDFITTFPHLAHLSAQRIADQRRIIINNKKITDEHLNKIKQEVATEISMTQDNTTEQEQNNTLHTHLLTCDNIDTENQGLTYTSGNISSSKNYDITHAQNSPKLNKSRSSCLNNTNTESISNNIEKNDEIENTFQESLNYYIDTNPTKRHFIPKQKSSKRFSKIVHYINTVILPKHVNTDTDFETLQTVIYCAAWTAAKTNGGKLTIPPKDSSLQNRVTKKPKWMIRLERKIEDLRVKIGRLTQFILGNKSLKLQQKVEDIIAQYKIHSIHEEANTELPHFLDTLKQKLKVASSRLKRYKKCTLRKTQNKQFNMNEKQFYRSFKSNSTNPVDSSNQKENKLPSAQELHSFWASIWENPVGHYSETDWIKGEKHKYNSIEEMQFEKISDEIFNIAVCKLQNWKAPGSDYIHNYWYKKFTSVHSYLVGHINKFIKNPDLMPEYITEGITYMIPKDGISNDPGKYRPITCLQTMYKIITSCLAHCIYKHIDVNGILAEEQKGSRKLSQGCKEQLIIDSIIINQVQHKKKDLFTMYIDYQKAYDSVPHSWLIEILHIYKIHPQVIIFLQNTMSNWYTRLKLLTSNETIVTDNLKIQRGIFQGDTLSPLWFCLALNPLSNILKSTEVGYSLQYYDQGEQLKSKQETTINHLLYMDDIKLYADSQDGLCKLADLTERFSQDICMQFGVDKCKVNSVIAGQLHKHSYLMQTGDHIAPLGENDAYKYLGYYQSRCIHHKEVKLSLTKQFTERITSILKTELNSKNITKAVNSFAVPILTYSFGIVNWTKTELKNLQRKINTSMTKNRKHHPRSCIQRMTLPRFEGGRGFLDIINLHNRQIKRLRDFFYNCSLTSILHKAITQNDIRYTPLNLHNEETQNNEVATDNQSKILEWTRKPLHGRHRLDLCQPNVDKIASNEWLKFGQLFPETEGFITAIQDQVIETRNYQKHIMKIPIPTDMCRRCHSSSETIQHITGACKSIVQTDYKYRHDQVAKIIHQKLAKKSNLLRPPFKPYYNYNPDTVLENSKYKLYYDRALLTDRTIHFNRPDLTFLDKQNKIAYLIDIAVPNTHNVQSTISEKLA

SEQ ID NO: 26012 - protein, 1406 aa, Aethilla lavochrea
MRLRSSRIPQAGTRVGESRPESTGSGCPTYSGEGNASHMTAQSCTVVGDKTSPSPIQSHPSSPISSTHSIFQSPSSSSNSYQSTQYTIISSPVSSNSSLLEDVVRDTKLVTNPIPITSKSSKRNKWSDDMNEYILRTYLELTKNETDDSIRYLPILHAKFLDKFPHMQVSRQRIGDQRRVIIRNKLIPQKDIDRIYQEVKDNLKLRITTTEKTQDIIVGKRMKWSNELNESVMRSYYRVTKLETDMTMYRTNLHQDFITTFPRLTHLSVQRIADQRRMIINNKRITEERLNKIKQEVATEICITQENTSNIFQEEHNNLHTISLTCGNIDTGSHDVTFIGDNINSSNRHSRSHILNTRTRNKTRSNYVNGTNTDISNDTDFYQYHSISAELENNFQETLNYYIDTNPTRRHFIPKQKPSKRFSHIVHYINTVIIPKHVNTDTDFKTLQTVIYCAAWTAAKANGSKLTAPPKENLKANKLINKPKWMIRLERKVEDLRMKIGRLTQFMAGNRSFKLQQKVNDIIEQYKIHSVHEEANSQLPHFLDTLKQKLKVASSRLKRYKKCTLRKAQNKQFNMNEKQFYRSLKSDNTHSVKSSNLQTNKLPSEQKLHSFWASIWENPVSHNSEPDWIKNEKLMYNSTKDMAFEKISDEMFHSVVCRLQNWKAPGSDYIHNYWYKKFTNLHSFLVEHINNFIRNPHLVPEYITEGTTYMIPKNGINHDPGKYRPITCLQTMYKIITSCLAHCIYKHIDTNGILAEEQKGSRRLSQGCKEQLVIDSVIMKQVRHKKKHLFTMYIDYQKAYDSVPHSWLIEILRIYKIHPQIINFLQNIMTNWCTRLKLSTSNETIITNNLKIQRGIFQGDTLSPLWFCLALNPLSNILNSTRVGYSLNYYSHNEKLKSKQQTTINHLLYMDDIKLYANSQDDLSKLADLTERFSQDICMQFGVDKCKVNSVIAGQLHKHSYLMQTGEHIVPLEENDAYKYLGYYQSRCIHHKEVKLALTKQFKTRITAILKSELNSKNTTKAVNSFAVPILTYSFGIINWTKTELKNLQRIINTSMTKNRKHHPRSCVQRLTLPRAEGGRGFLDIANLHSRQVKNLRKYFHNRSLTSILHRAITQNDIRFTPLNLHNEETQNNEIEVDEQSKILDWTRKALHGRHRHELCEPNVDKIASNEWLRFGQLFPETEGFITAIQDQVIETRNYQKHIMKIPIPTDMCRRCHSSPETIQHITGACKAIAQTDYKYRHDQVAKIIHQKLAQKSNLLLPPIKPYYDYNPEVVVESNKYKLYYDRALLTDRTIHFNRPDITFLDKQNKIVYLIDIAVPNSHNVQSTISEKIAKYNDLKDEIIRMWHLKKAIVVPIVISATGIIPNSLKQSLKVIDLPLHTSITLQKSIILNTCRIVRKFLQDNC

SEQ ID NO: 26013 - protein, 1393 aa, Achlyodes mithridates
MRLRNRKIPQAGTCEGESRPEPNGSGSPTYSGEGTASHMTAQSYTVVVDKTSSLINSHPSSPISSIHSFVQSPSSSSDSYQSTQAESITSSPVSNNSSLVDDVVRNTNLVTKPVPITTKVSKRNKWSDDMNKYILRTYLELTKNETDNSIRYLPILHSKFLVKFPHMQVSRQRIGDQRRVILRNKLIPQEDIDKIYQEVKNNLHSTAATQEKTQDVIIGQRMKWSTELNEFIIRSYYRITKLETDMTMYRTRLHQEFIAAFPHLAHLSVQRIADQRRIIINNKRITEEQLNKIKQEIATEISMSQNNSTEQEENNTLHTPLETLTNNTDTENHDVRYTIDSRDYISDAQNSLTLNKSRSSYLNTTDTSNNIEENPEIDNTFQESLNYYIDTEPMNRHFIPKQKCSKRFSKIVHYINTVTIPKQINTDTDFKTLQTVIYCAAWTAAKANGGKLTIPPKENSQQNRLTKKPRWMIRLERKIEDLRVKIGRLTQFIAGNKSSKLQQKVKDIIEHYKIHSIHEEDNSELPHFLDTLKQKLKVASSRLKRYKKCTLRKTQNKQFNMNEKQFYRSLKIDNTIPLNSSNHNTNTLPSAQELRSFWASIWENPVKHNSETDWINGEKEKYNSIEDMQFEEISQEIFHSVVCKLQNWKAPGSDNIHNYWYKKFTSVHPYLVAYINKFIKNPNLMPEYITEGITYMIPKNGINNDPGKFRPITCLQTMYKIITSCLAHCIYKHIDINGILAEEQKGSRKLSQGCKEQLIIDSVIINQVKQKKKDLFTMYIDYQKAYDSVPHSWLIEILHIYKIHPQVINFLENIMANWYTSLKLLTSNKTIVSDKLKIQRGIFQGDTLSPLWFCLALNPLSNILNSTKVGYSLQYYNHGEQFKSKQETTVSHLLYMDDIKLYAETQDDLCKLADLTERFSDDICMKFGVDKCKVNSVIAGQLHKHSYLMKTGEYITPLEENDAYKYLGYYQSRCIHHREVKSSLTKQFAARITSILKTELNSKNITKAVNSFAVPILTYSFGIVSWTKTELKNLQRIINTSLTKNRKHHPRSCVQRMTLPRCEGGRGFLDIVNLHNRQVKRLRDFFHDYTLTSILHKAITQNDIRFTPLNLHNKETQKNEVTTDNQSKILDWSRKPLHGRHRLDLCQPNVDKIASNEWLKFGQLFPETEGFITAIQDQVIETRNYQKHIMKIPIPTDMCRRCHSSSETIQHITSACKSIAQTDYKYRHDQVAKIIHQKLAKKSNLLIPPVKPYYDYNPETILESNKYKLYYDRALLTDRTIHFNRPDLTFLDKQNKTVYLIDIAVPNSHNVQSTISEKLAKYNDLKDEIVRMWHLKKAVVVPIVISATGIIPTSLKQSLKVLDLPLHTSITLQKAIILNTCRIVRKFLQYNDK

SEQ ID NO: 26014 - protein, 1386 aa, Pyrgus malvae
MRLRSRVIPQAGTRKGESRPGPSSSGSPAYSGVGTASHLTTQPQSAVVSKPSSLTTSSPSSPVSSSNSLFQSPCSSPQSYTFHHSSSRSTTISPVSSHTEQETLSNSSVQCNSRLLRDVVQETNSVTNPVPILSKTFKRNKWSSKMNEFILRTYLELTKIESENTTSYLPALHSKFLSTFPQMKVSRQRVGDQRRAIIRNKLLTQQVINKIYQEVRNSLQLGTHTLNYTPTINVGHRMSWTNELNEAIIRSYYRVTKLETDMTMYRTSIHKDFITSFPHLAHISVQRIADQRRVIINNKRIPEERLLQIKQEVADEIQMAQVNTSTIAYNCNDTPQSNKRSTDSQVHIHNNIDGGLTNNIALLDDTENNELEDTFRTAFDFYINTNATDRHYIPKQKSSKKLSKIVQYINVTIIPKYVSLGTDFNTLQTVIYCAAWTAAKSNGAKLMIPPKEISNQKTLTRKPKWMIRLERKVEDLRVKIGRVTQFAKGNRNFKIQKQVDMIMRQHKIHTTHEEPNTQISHFLDTLKQKLTVASSRLKRYKACTLRKTQNKQFFTNEKQFYRTLRNGDNRQINTHNTDTSFTTEKLHKFWAAIWENPVTHNAEADWIKREESDSKQISEMVFQKITDQTFKSVVDNLQNWKSPGSDNIHNFWYKKLSNVHQCLIHHINNFIQNPHLLPKYVTVGITYMIPKSNDHQDPSKYRPITCLQNIYKIITSCLAQCIYEHVTTTNPILAEEQKGCRKMSQGCKEQLTIDSIIMKQVQKNRKDLCSMYIDYRKAYDSVPHSWLLHILHIYKIHPQIINFLQNIVPNWLTQLKVVTSNESLNTNIIKIQRGIFQGDTLSPLWFCLALNPLSNILNSTEVGYRFNFKSKADTQETTQQRTLNHLLYMDDIKLYANTEEDLNHLANLTEQFSRDICMQFGVDKCKINSVVKGQVHKHSYEIYTGEIIQPLGENETYKYLGYSQSKYLLSKEIKGTLTQQFKNRINSILKSELNGKNITKAINSFAIPILTYSFGIIHWNKTELKNLQRIINTSMTKHRKHHPRSCVQRLVLPRREGGRGFIDISNLHNRQIKNLRAFFHSKITTSSLHTAVTQNDIRLTPLNLQSKETQANEIEVENHSKILEWAGKSLHGRHRQELCQPNVDKGASNEWLRIGRLFPETEGFIMAIQDQVIETRNYQRHIMKIPIPTDTCRRCHSASETIQHITGACKTIAQTDYKYRHDQAAKIIHQKLARKCNLLKNRIQPYYNYNPDIVLESNTHKLYFDRAILTDKTTHYNRPDITLLDKENKSVYLIDIAVPNSHNLQSTISEKLSKYNELKDEITRMWHLKKATIVPIVLSTTGIVPTNLKQSLQTLGLPTQTTVELQKSIILNTCRIVRKFLQVENN

SEQ ID NO: 26015 - protein, 1386 aa, Heliopetes sublinea
MRCDLETDKYPRRVPRRENPAPGLRVRAALRILGGGNVSHLTTQPQPAVVSKPSSLTSSFPSTSISSPHSLFQSPCSSPQSYTFHQSSSRSTTISPVSCSDHETQFNHSAQSNNRVLRNVVQETDLVSNPVPILSKTYKRNKWSNEMNEFILRTYLEITKIETEHITSYLPVLHSKFLTRFPEMKVSRQRVGDQRRAIIRNRLLTQQDINKIYQEVKINLQVGTQTQNHTPSITVGQRMSWTNELNEAIMRSYYRVTKLETDMTMYRTLLHNEFIISYPHLAQMSIQRIADQRRVIMNSKRISEERLLQIKQEVAAEIQITQSNTVTSFNNEDSQINTMTTDSDAYTHDNTDTNLNNNSHPSDDTENTELENTFKMAFDFYNNINATDRHYIPKQKTSRKLSKIVQYINSTIIPKYVDSGTDFNTLQTVIYCAAWAAAKSNGAKLTIPPKERLNRNTLIKKPKWMIRLERKVEDLRIKIGRVTQFTKGNRSIKIKKQIDTIMRQQKIHTTHEEPNTQIIHFLDTLKQKLTVASSRLKRYKACTLRKTQNRQFFTNEKQFYRTLRNNDTRSNQINTHSNLMDASAEEIYNYWTKIWENPVNHNTEAEWIKKEESNNNHIPEMIFQKINDQTFKSVVDNLQNWKSPGSDNIHNYWYKKLTNVHQCLIHHINNFIQNPHLVPKYVTVGVTYMIPKSNDYQDPSKYRPITCLQNIYKIITSCLAQCIYSHINTNQILAEEQKGCRKMSQGCKEQLTIDSVVMKHVQKNKKDLCTMYIDYRKAYDSVPHSWLLHILHIYKIHPQIINFLRNVMLNWLTQLKLVTPSQTLNTNSIKIQRGIFQGDTLSPLWFCLALNPLSNILNSSKAGYKLNFKSEADPLKTTHQNVLNHLLYMDDIKLYANTEEELHQLAKLTELFSRDICMQFGVDKCKINSVVKGTVHKHSYQIHTGEIIQPLEENETYKYLGYSQSKYLHTKEIKYTLTQQFKSRINSVLKSELNAKNITKAINTFAIPILTYSFGIIHWNKTELKNLQRIINTSMTKYRKHHPRSCMQRLVLPRKEGGRGFIDISNLHNRQIKNLRTFFHSKIDTSSLHNAITQNDIRLTPLNLHSREAQANEIEVENHSKILEWTRKSLHGRHRQDLCQPNVDKDASNDWLRIGQLFPETEGFIIAIQDQVIETRNYQKYIMKIPTPTDTCRRCHSASETIQHVTGACKTIAQTDYKYRHDQVAKIIHQKLAHKCNLLKHPILPYYNYNPDIVLESNTHKLYFDRAILTDKTTHYNRPDITLLDKENKSAYLIDVAVPNSHNLQSTISEKLSKYNELKEEIIRMWHLKKATIVPIVISTTGIIPKNLKQSLKTLGLPSQTSIALQKAIILCTCRIVRKFMQAEND

SEQ ID NO: 26016 - protein, 1384 aa, Pyrgus malvae
MRLRSRVIPQAGTREGESRPGPSSSGSPSYSGVGTASHLTTQSQPAVVSKPLSPTTSSPSSPISSLFQSPCSSPQSFTFHQTSSRSTTHSPVSSHTELETQTYSSAQNNSRLLRNVVQETNSVTNPVPIRSKTFKRNKWSNEMNEFILRSYLELTKIETENTTSYLPALHSIFLTKFPQIKVSRQRVGDQRRAIIRNQLLTQQDINRIYQEVKNSLQLGTHTLNYTPTITVGQRMSWTNELNEAIMRSYYRITKLETDMTTYRALLHKDFITSFPHLAHISVQRIADQRRVIINNKRISEERLSQIKQEVGGEIQMAQVNNTNTVAHSSNETLQRNTKLTDSEVHTHNIIDTSFTNNIDLLGDTENTELENTFRMAFDFYINTNATNRHYIPKQKSSRKLSKIIQYINMTIIPKYVNLSTDFNTVQTVIYCAAWTAAKSNGTKLTIPPKEIPNQNTLARKPKWMIRLERKVEDLRVKIGRVTQFTKGNRNIKIQKQVDAIMRQHKIHTTHEEPNTQIAHFLDTLKQKLTVASSRLKRYKACTLRKTQNKQFFTNEKQFYRTLRSSDNRQINTHGTDTSITADEVHKFWATIWENPVTHNTEADWIKKEESDNNNISEMVFQKITDQTFKNVVHNLQNWKSPGSDNVHNFWYKKLTNVHQCLIHHINNFIQNPHLVPKYVTVGVTYMIPKSKHHQDPSKYRPITCLQNIYKIITSCLAQCIYEHVTTKNQILAEEQKGCRKMSQGCKEQLTIDSIIMKQVQKNKKDLFSMYIDYQKAYDSVPHSWLLHILHMYKIHPQIINFLQNIMPHWLTQLKLVTSNETMNTNSIKIQRGIFQGDTLSPLWFCLALNPLSKILNSTKIGYRFNFKNEADPQETMQQRTLNHLLYMDDIKLYANTEEDLNHLANITEQFSRDICMQFGVDKCKINSVIKGQVHKHSYQICTGEVIQPLEENETYKYLGYSQSKYLLAKEIKSTLTQQFKNRINLILKSELNGKNITKAVNSFAIPILTYSFGIIHWNKTELKNLQRIINTSMTKHRKHHPRSCVQRLVLPRREGGRGFIDIGNLHNRQIKNLRAFFHSKSTTSSLHNAIAQNDISLTPLNLQSKDAQANETEVENNSKILEWTRKSLHGRHRQELCQPNVDKGASNDWLRIGQLFPETEGFIMAIQDQVIETRNYQRHIMKISIPTDTCRRCHSASETIQHITGACKTIAQTDYKYRHDQVTKIIHQKLAHKCKLLKHPIQPYYNYNPDIVLESNTHKLYFDRAILTDKTIHYNRPDITLLDKENKSAYLIDIAVPNSHNLQSTISEKLAKYNELKDEITRMWRLKKATIVPIVISTTGIIPTNLNQSLKALGLPTQTRIALQKAIILNTCRIVRKFLQTENN

SEQ ID NO: 26017 - protein, 1378 aa, Atarnes sallei
MRLRNRTIPQAGTREGESRPGPSGSGSPAYSGEGNVSHMTAQSCNVAVNKQPPLITSNPLSPSSSTENSFNSLNSSPFSSQLLHSSSESSTSTSSPTLIRNRLLENAVRETTPVRNPIPITSKIFKRNKWSDDMNKHILRTYLKITKLETDDNVRYLTILHSKFIEKFPHMEVSRQRLGDQRRAIIRNKLITQSEIDRIYREVKEELSKNTSGTYKSEQSQSLSVVQRIKWGNELNEYIIRSYYKITNLETDMTMYRTKLHNNFVTKFPHLAHISVQRVADQRRIIIANKRISDERLKAIKLEVASEIEKSQNNTTDHTFTKTNECNNLETPDNPEMENNDDTNTINISTPANITLHDIDTTLAIDNTFQESLKFYTNTDPTRRHFIPRQKPSKKFSKIVNYINTTVIPKNINADTDFKTLQTIIYSAAWTAAKMNGAKITIPPKTDNNWNTTNKPKWMIRLENKVENLRIKIGRLTQYIKGNRSYKLYKHVQDIIKQYKIHTIHEEPNNELTHFLDTLKQKLIVTSSRLKRYKICTIRKTQNKQFNTNEKHFYRLMKISKNSLQNTSSLSENTVPSEKELHSFWANLWENPVSHNSQSDWINNEVGKVSTVTDMTFDEISIQILKNTIDKLHNWKAPGSDYIHNYWYKKFTNIHSNLIKHINMFIKNPHLIPEYITVGITYMIPKGNDLKNPEKYRPITCLQTIYKIITSCLAYHIYNHVDENKILAEEQKGSTKRSQGCKEQLTIDSVIMKQVQQKRKDLYTMYIDYQKAYDSVPHTWLLEILRIYKIHPQIINFLQKIMLSWNTRLKLIRNNKTIETHKIKIQRGIFQGDTLSPLWFCLALNPLSNILNSTNSGYKLTYCDVDAPKQDKTINHLLYMDDIKLYAKTQDELNNLAMLSEQFSQDICMQFGVDKCKINSVVAGKPHKHSYQMQTGEQIVPLEENDAYKYLGYNQSQCIHSKEVKQLLSREFKHRVGYILKSHLNARNTTKAVNSFGVPILTYSFGIINWTKAELIKLQRIINTCMTKNRKHHPRSCIQRVTLPRSDGGRGFLDLVNLHNRQIKNLRNFFHNKSSTSILHRAVSQNDVKLTPLNLHNEKIQNNETVVNKDSKILDWTRKSLHGRHRNDLSQPYVDLAASNEWLKHGQLFPETEGFIMAIQDQVIETRNYQKYIIKMPIPTDMCRRCHSSSETIQHITGACKSIAQTDYKYRHDQVAKIIHQKLTQKFNLTSKPNKPYYNYVPNAVVEDDKYKIYFDRAILTDKTIHYNRPDITLLDKKNKTAFLIDIAVPNSHNIQSTTSEKLSKYNDLKDEIIRMWQLKRVIIVPIVISSTGIIPTSLQQSLKLLDLPLHTRTTLQKSVILNTCRLVRKFLQNNSNI

SEQ ID NO: 26018 - protein, 1378 aa, Charidia lucaria
MRLRNRTIPQAGTREGESRPGSSGSGSPTYSGVGNVSHMTAQSCNVAVNKQPSLVTLDLLSPSSSTQSPFNSPNSSHFTSQVLHLSSVSSTRTCSPILTRNRLLENVVRATTPVNKPVPIPSKTFKRNKWSDDMNKHILRTYLKITKMETDDNVRYLTILHSKFLEKFPHMEVSRQRVGDQRRAILRNKLIPQSEIDKIYREVKEELRELRNNTSCTHESQDPQLTVGQRIKWGNELNEYIIRSFYKITKLETDMTMYRTKLHNDFITKFPLLAHISVQRVADQRRIIINNKRISDQRLKAIKLEVASEISTSQNNNAERNCILDKEVNSLESPDNPETEYNDDTNTINISTPTNMILHDMDTTLAIDNTFHETLKYYTNTDPIDRHFIPRQRPSKKFSKIVNYINTTVIPKNINADTDFNRLQTVIYSAAWTAAKMNGAKITIPPKTDLNRNTRKKPKWMIRLEKRVENLRLKIGRLTQYINGNKSFKLQKHVQDILRQHKTHTIHEEPNTELTHFLDTLKQKLTVTSSRLKRYKICTTRKTQNKQFNTNEKHFYRLMKNSNNTHTSILSENAIPSENELHRFWANLWENPVSHNSQADWINNEIVKVDTVIDMKFEEISIEIFKNTIDKLHNWKAPGSDYIHNYWYKKFTSIHSNLIKHINIFIKNPHLIPEYITVGITYMIPKGSDLINPGKYRPITCLQTIYKIITSCLAHHIYNHVNENKILAEEQKGSRKLSQGCKEQLIIDSVIMKQVQQKRKDLYTMYIDYQKAYDSVPHTWLLEVLHIYKIHPQIINFLQKIMLNWNTRLKLTTNNKTIETQKIKIQRGIFQGDALSPLWFCLALNPLSNILNSTNSGYKLTYCNIGATKQVKTINHLLYMDDIKLYANSQNELNCLATLSEQFSQDICMQFGVDKCKTNSVIAGKLHRHFYQMQTGEQIVPLEENDAYKYLGYNQSQCINSKEVKNTLTKEFKHRVNNILKSNLNARNTTKAVNSFGVPILTYSFGIINWTKAELIKLQRIINTCMTKNRKHHPRSCIQRVTLPRSDGGRGFLDLVNLHNRQIKNLRNFFHNKSYTSVLHKAVSQNDIKLTPLNLHNEKIQNNETVVNKDNKILEWARKSLHGRHRNDLSQPYVDLKASNEWLKHGQLFPETEGFIMAIQDQVIETRNYQKHIIKMSIPTDMCRRCHSSSETIQHITGACKSIAQTDYKYRHDQVAKIIHQKLAQKFNLTPKPNKPYYNYIPNAVLEDNKYKIYFDRAILTDKTIHYNRPDITLLDKISKTVFLIDIAVPNSHNIQSTISEKLSKYNDLKDEVIRMWQLRRAIVVPIVISSTGIIPTSLQQSLKLLDLPLHTRTTLQKAVILNTCRLVRKFLQNNSNV

SEQ ID NO: 26019 - protein, 1264 aa, Milanion marciana
MRLRNRTIPQAGTREGESRPGPSSSGSPAYSGEGNVSHMTVQSCNVAVNKQPSLVTSDPLSPSSSTQSPFNSPNSSSFSSHLLHSSLESSTSTSSPIPTRNRLLQNVVRETTPVRNPIPISSKISKRNKWSDDMNKHILRTYLKITKFETDDNIRYLTILHSKFVEKFPHMEVSRQRLGDQRRAIIRNKLITQSEIDRIYREVKEELSNNTSDTYKSEQSQPLNVGRVKWGNELNEYIIRSFYKITKLETDMTMYRTKLHNDFITKFPHLAHISVQRVADQRRIIINNKRISDQRLNAIKLEVASEISTSQNNTTDRNSTKTNECNNLGSPDNPEIEYNNNTNTIDISIPTNITLHDIDTTLSIDNTFQETLKFYTNTDPTERHFIPRQKSSKKLSKIVNYINTTVIPKNINADTNFKTLQTVIYCAAWTAAKMNGAKITLPPKIDKNWNTTSKPKWMIRLEKKVENLRIKIGRLTQYIKGIRSYKLHKHVQDIIKQYKIHTIHEEPNNQLTHFLDTLKQKLIVTSSRLKRYKICTVRKTQNKQFNTNEKHFYRLMKSSNNSIQNTTSLSENTIPSEKELHSFWANLWENPVSHNSQSDWINNEIAKVNTVTDMTFDEISIQVFKNIIDKLHNWKAPGSDYIHNYWYKKFTNVHSNLIKHINIFIKNPHLTPEYITVGTTYMIPKGTDLKNPEKYRPITCLQTIYKIITSCLAYHIYNHVDKNKILAEEQKGSTKRSQGCKEQLIIDSVIMKQVQQKRKDLYTMYIDYQKAYDSVPHTWLLEILRIYKINPQIINFLQKIMLSWNTHLKLVTNNKTIETHKIKIQRGIFQGDTLSPLWFCLALNPLSSILNSTNSGYKLTYCDIGATKLDKTINHLLYMDDIKLYANTQDDLNKLAMLSEQFSQDICMQFGVDKCKINSVVAGKPHKHSYQMQTGDQIVSLEENDAYKYLGYNQSQCIHSKEVKHILTKEFKRRIGYILKSHLNARNTTKAVNSFGVPILTYSFGIINWTKAELIKLQRTINTCMTKNRKHHPRSCIQRVTLPRSDGGRGFLDLVNLHNRQIKNLRNFFHIKSSISILHRAVSQNDVKLTPLNLHSEKIQNNETIVNNDSKILDWTRKSLHGRHRNDLCQPYVDLVASNEWLKLGQLFPETEGFIMAIQDQVIETRNYQKYIIKMPIPTDMCRRCHSSSETIQHITGACKSIAQTDYKYRHDQVAKIIHQKLAQKFNLTSKPNKQYYNYVPNAVVEDDKYKIYFDRAILTDKTL

SEQ ID NO: 26020 - protein, 1385 aa, Eburuncus unifasciata
MRLRNRTIPQAGTREGESRPGPSGSGCPAYSGEGNVSHMTAQSCNVAVNKQPSLVTSDTLSPSSSTQSPFNSPNSSPFSSHLLHSSLESSASTSSPILISNRLLQNVVRETTPVRNPIPISSKVFKRNKWSDDMNKHILRTYLKITKLETDDIRYLTILHSKFVEKFPHMEVSRQRLGDQRRAIIRNKLITQSEIDRIYREVKEELSNNTSGTYKSEQSQSLSVGQRVKWGNELNEYIIRSFYKITKLETDMTMYRTKLHNDFITKFPHLAHISVQRVADQRRIIINNKRISDQRLKAIKLEVASEIGTSQNNTAERNLTNNNATECTNTSECNNLRSPDNSEIEYNSNTSTIDISIPTYITLHDIDTTLSIDNTFQETLKFYTNTDPTERHFIPRQKPSKKLSKIVNYINTTVIPKNINADTDFKTLQTVIYCAAWTAAKMNGAKITLPPKTDKNCNTTNKPKWMIRLENKVENLRIKIGRLTQYIKGNRSYKLHKHVQDIIKQYKTHTIHEEPNNELSHFLDTLKQKLIVTSSRLKRYKICTIRKTQNKQFNTNEKHFYRLMKSSNNSLQNTSSHSENTIPSEKELHSFWANLWENPVSHNSQSDWINNEIAKVNTVTDMTFDEISIQIFKNIIDKLHNWKAPGSDYIHNYWYKKFTNIHSNLIKHINIFIKKPHLTPEYITVGITYMIPKGTDLKNPEKYRPITCLQTIYKIITSCLAYHIYNHVDKNKIVAEEQKGSTKRSQGCKEQLIIDSVIMKQVQKKRKDLYTMYIDYQKAYDSVPHTWLLEILRIYKIHPQIINFLQKIMLSWNTHLKLVTNNKTVETQKIKIQRGIFQGDTLSPLWFCLALNPLSSILNSTNSGYKLAYCDIGATKLDKTINHLLYMDDIKLYANTQDDLNKLAMLSEQFSQDICMQFGVDKCKINSVVAGKPYKHSYQMQTGDQIVSLEEDDAYKYLGYNQSQCIHSKEVKHILTKEFKHRIGYILKSHLNARNTTKAVNSFGVPILTYSFGIINWTKAELIKLQRIINTCMTKNRKHHPRSCIQRVTLPRSDGGRGFLDLVNLHNRQIKNLRNFFQIKSSISMLHRAVSQNDIKLTPLNLHSEKIQNNETIVNKDSKILDWTKKSLHGRHRNDLSQPYVDLAASNEWLKLGQLFPETEGFIMAIQDQVIETRNYQKYIIKMPIPTDMCRRCNSSSETIQHITGACKSIAQTDYKYRHDQVAKIIHQKLAQKFNLTSKPNKPYYNYVPNAVVEDDKYKIYFDRAILTDKTIHYNRPDITLLDKKSKTVFLIDIAVPNSHNIQSTTSEKLSKYNDLKDEIIRMWQLKRVIIVPIVISSTGIIPTSLQHSLKLLDLPLHTRITLQKAVILNTCRLVRKFLQNNSNI

SEQ ID NO: 26021 - protein, 1416 aa, Agara belti
MRLRSRIIPQAGTPRRGESRPEPSSSGSPAYSGGGTASHRTVQTCTVAADTTSSYIISNASSTSSLSSSPSKHSLFHSPSSSSHSYQSLNCLSTSTTTSPSSISRNSVLLEDVVRETDPVSKPVPIASKTFKRNKWSQDMNKYILRTYLELTNIDTDHNVRYLPILHSKFIDKFPQMKVSQQRIGDQRRAIMRNKLISQEDIDKIYLDVRNEQQVETHRPEYTQSLKTGQRMKWSNELNESIMRSYYRVTKSETEMTMYRSNLHQDFITTYPHLAHVSIQRVADQRRIIINNKRISEERLNSIKEEIATELGVILNNDAEHNRDSEIHENNNLDTQLHTCNNTEISHYNDTKIVNIGNPKTNKRRDTQYIHTLNNTQSSCCTDTNNMSNNIERDSEMENTFQEALNYYNNTNPTERHCIPKQTSSRKFSKIVQYINTNIIPNHVKSDTDFKTLQTVIYCAAWTAAKRNGAKITIPPKENSNRNIVTKKPKWMVRLEKKVEDLRVKIGRLTQVIKGNKSLKLHKQVNTILKHYKIHSIHEEPNFQLTHFLDTLKQKLIVASSRLKRYTACTLRKTQNRQFNINEKQFYRSLKSTNINQTNTGNHSINNVPSAEEFHGFWSRIWESPITHNTEADWIENEKLKNHSVSDMMFDGVSEEIFKNIVHKLQNWKAPGSDYIHNYWYKKFTSLHPYLIVHINNFIKNPNLIPEYITVGITYMIPKDNDQINPGKYRPITCLQTVYKIITSCLAHCIYKHINLNNILAEEQKGSKKLSQGCKEQLIIDSVILKQVQQKRKDLFTMYIDYQKAYDSVPHSWLLEILHIYKIHPQIIYFLQNIMHNWCTQLKLITQNATIDTNKIKIQRGIFQGDTLSPLWFCLALNPLSNMLNSTDTDIGYILQYSNKEDELLTTKRQKTINHLLYMDDIKLYANTQDDLNKLANLTERFSKDICMQFGVDKCKINSVLAGQLHKHLYQMQTGELILPLEENGAYKYLGYYQSQYIHHKEVKFTLTNQFKQRITSILRSKLNSKNTTKAVNSFAIPILTYSFGIIKWTTTELKNLQRIINTQMTANRKHHPRSCTQRVTLPRIEGGRGFIDINNLHNKQIKNLRKYFHDHSYTSILHRAIIQNDIKYTPLNLHSEEIQSNEIEVDKDRKILAWTQKSLHGRHRHDLCQPYVDKIASNEWLKLGELFPETEGFIIAIQDQIIETRNYQKHIMKIPIPNDMCRRCHSAPETIQHITGACKSIAQTDYKYRHDQVAKIIHQKLAQKCNLLEQPIKPYYKYNADIIQENSNFKLYFDRAILTDRTIHFNRPDITFLDKENKIVYLIDIAVPNSHNLQNTISEKLSKYNELKEEIVRMWHLKKAVVVPIVISSTGIVPNSLKQSLNVLNLPLHTRLTMQKAIILNTCRIVRKFLQDTVA

SEQ ID NO: 26022 - protein, 1412 aa, Myscelus epimachia
MRLRSRIVPQAGTPRRGESRPEPSSSGSPAYSGGGTASHRTAQTCTVAVDTTSSFIISNPTSTSSSSSSPSPSKHSLFYSPSSSSHSYQSLNSLSTSTIISPSSISRNSVLLEDVVRETDPVSKPVPIASKTFKRNKWSQDMNKYILRTYLELTNVDTDHSVRYLPILHSKFIDKFPQMKVSQQRIGDQRRAIMRNKLISQEDIDKIYLDVRNEQQVESHRPEYTQSLKTGQRMKWSNELNESIMRSYYRVTKSETEMTMYRSNLHQDFITTHPHLAHISIQRIADQRRIIINNKRISEERLNSIKEEVATELGVILNNDAEHNVNSEIHENNNLDTQLHTCNNTEISHYNDTKIVNIRNPKTNKRRDTQYIHTLNNTQSNCCTDTNNISNDNGRNSEMENTFQEALNYYNNTNPTERHYIPKQTSSRKFSNIVQYINTNIIPKYVKSDTDFKTLQTVIYCAAWTAAKRNGAKITIPPKENSNRNIVTKKPKWMVRLEKKVEDLRVKIGRLTQVIKGNKSLKLQKQVNTILKHYKIHSIHEEPNFQLTHFLDTLKQKLIVASSRLKRYTACTLRKTQNSQFNFNEKQFYRSLKSTNTNQTNTGNHSINTLPSAEEFHGFWSRIWESPITHNTEADWIENEKLKNHSVPDMMFDGVSEEIFKNIVDKLQNWKAPGSDYIHNYWYKKFTSLHSYLIVHINNFIKNPNLIPEYITVGITYMIPKDKDQINPGKYRPITCLQTLYKIITSCLAHCIYKHINLNNILAEEQKGSKKLSQGCKEQLIIDSVILKQVQQKRKDLFTMYIDYQKAYDSVPHSWLLEILHIYKIHPQVIYFLQNIMHNWCTQLKLITQNATIDTNKIKIQRGIFQGDTLSPLWFCLALNPLSNMLNSTDTDIGYILQYSNKEDELLITKRQKTINHLLYMDDIKLYANTQDDLNKLANLTERFSKDICMQFGVDKCKINSVLAGQLHKHSYQMQTGERILPLEENGAYKYLGYYQSQYIHHKEVKFTLTNQFKQRITSILRSKLNSKNTTKAVNSFAIPILTYSFGIIKWTMTELKNIQRIINTHMTANRKHHPRSCTQRVTLPRIEGGRGFLDINNLHNKQIKNLRKYFHDHSYTSILHRAITQNDIKYTPLNLHSEEIQSNEIEVDKDRKILAWTQKSLHGRHRQDLCQPYVDKIASNEWLKLGELFPETEGFIIAIQDQIIETRNYQKHIMKIPIPNDMCRRCHSASETIQHITGACKSIAQTDYKYRHDQVAKIIHQKLAQKCNLLVQPIKPYYKYNADVILENSNFKLYFDRAILTDRTIHFNRPDITFLDKENKIVYLIDIAVPNSHNLQNTISEKLSKYNELKEEIVRMWHLKKAVVVPIVISTTGIVPNSLKQSLNILNLPLHTRFTMQKSIILNTCRIVRKF

SEQ ID NO: 26023 - protein, 1415 aa, Myscelus amystis
MRLRSRIVPQAGTSERGESRPEPSGSGSPAYSGGGTASHSTAQTCTVAADSTSSFISPNPSAISSSSSSPSKPSLSLSPNSSSSSYQPLNSLSTSATTSPSSVTRDSVLLEDVVRETDPVSKPVPTASKIFKRNKWSQDMNKYILRTYLELTNLDTDHNVRYLPILHSKFIDKFPQMKVGQQRIGDQRRAIMRNKLISQEDIDKIYLDVRNEQQVDTHRPEHTQSLKTGQRMKWSNELNESIIRSYYRVTKLETEMTMYRPNLHQDFITTYPHLAHISIQRVADQRRIIINNKRIPEERLNLIKEEIATELGVTLNNDVEHNRNSEIHENNDPETQLHTCNNTEIAHYNDTKIVNITNPKTNKRRDKQFINTLNNTQPSCFTDTNNISNDTERNAVMENTFQEALKYYNNTNPTERHSIPKQAPSRRFSKIVQYININIIPNLVKPDTDFKTLQTVIYCAAWTAAKTNGANIIIPPKENSNRNILNKKPKWMVRLEKKVENLRIKIGRLTQVIKGNKSLKLQNQVNTILKHYKIHSTHEEHNYQPSHFLDTLKQKLIVASSRLKRYTACTLRKTQNKQFNLNEKQFYRSLKSTHTNQTNTANHSINTLPSAEEFHGFWSKIWESPISHNTEADWIKNEKLNNDSVADMMFDGVSEEIFKNIIDKLQNWKAPGSDFIHNYWYKKFTSLHPYLIDHINNFIKNPDLIPEYITAGITYMIPKDNDQINPGKYRPITCLQTLYKIITSCLAHCIYKHINLNNILAEEQKGSKKLSQGCKEQLIIDSVILKQVQQKRKDLFTMYIDYQKAYDSVPHSWLLEILRIYKIHPEIIHCLQNMMHNWCTQLKLITQNATIDTNKIKIQRGIFQGDTLSPLWFCLALNPLSNMLNSTGTDIGYILQYSNKEDDLLTTKRQKTINHLLYMDDIKLYANTQDDLDKLANLTEVFSKDICMQFGVDKCKINSVLAGQLHKHSYQMQTGEKILPLEENDAYKYLGYYQSQCIHYKEVKATLTNQFKHRITSILRSKLNSKNTTKAVNSFAIPILTYSFGIIKWTNTELKNLQRIINTHMTANRKHHPRSCSQRVTLPRIEGGRGFLDITNLHNKQINNLRKYFHNQSYTSILHRAITQNDIKYTPLNLHSEEIQINEIGVDKDKKLLAWTQKSLHGRHRHDLCLPYVDKIASNEWLKVGELFPETEGFIIAIQDQIIETRNYQKHIMKIPIATDMCRRCHSAPETIQHITGACKSIAQTDYKYRHDQVAKIIHQKLAQKCNLLVQPIKPYYKYNADIILENSNFKLYFDRAILTDRTIHFNRPDITLLDKENKIVYLIDIAVPNSHNLQNTTSEKLSKYNELKDEIVRMWHLKKAVIVPIVISTTGIVPNSLKQSLNVLNLPLHTRLTMQKAIILNTCRIVRKFLQDTA

SEQ ID NO: 26024 - protein, 1418 aa, Agara michaeli
MRLRSRIVPQAGTPCRGESRPEPSSSGSPAYSGGGTASHRTAQTCTVAADTTSSFITSNPTSTSSSSSLPSPSKHSLFYSPSSSSHSYRSLNSVSTSTIISPSSISRNSVLLEDVVRETDPVSKPVPIASKTFKRNKWSQDMNKYILRTYLELTNVDTDHNVRYLPILHSKFIDKFPQMKVSQQRIGDQRRAIMRNKLISQEDIDKIYLDVRNEQQVESHRPEYTQSLKTGQRMKWSNELNESIMRSYYRVTKSETEMTMYRSNLHHDFITTHPHLAHISIQRIADQRRIIINNKRISEERLNSIKEEVATELGVILNNDAEHNRNSEIHENNNLDTQLHTCNNTEISQYNDTKIVNIRNPKTNKRRDTQYIHTLNNTQSSCCTDTNNISYDIGRNSEMENTFQEALNYYNNTNPTERHYIPKQTSSRKFSKIVQYINTNIIPNYVKSDTDFKTLQTVIYCAAWTAAKRNGANITIPPKENSNRNIVTKKPKWMVRLEKKVEDLRVKIGRLTQVIKGNKSLKLQKQVNTILKHYKIHSIHEEPNFQLTHFLDTLKQKLIVASSRLKRYTACTLRKTQNRQFNFNEKQFYRSLKSTNTNQTNTGNHSINTLPSAEELHGFWSRIWESPITHNTDADWIENEKLKNHSVSDMMFDGVSEEIFKNIVDKLQNWKAPGSDYIHNYWYKKFTSLHSYLIDHINNFIKNPNLIPEYITVGITYMIPKDKDQINPGKYRPITCLQTLYKIITSCLAHCIYKHINLNNILAEEQKGSKKLSQGCKEQLIIDSVILKQVQQKRKDLFTMYIDYQKAYDSVPHSWLLEILHIYKIHPQIIYFLQNIMHNWCTQLKLITQNATIDTNKIKIERGIFQGDTLSPLWFCLALNPLSNMLNSTDTDIGYILQYSNKEDELLTTKQQKTINHLLYMDDIKLYANTQDDLNKLANLTERFSKDICMQFGVDKCKINSVLAGQLHKHSYQMQTGELILPLEENGAYKYLGYYQSQYIHHKEVKLTLTNQFKQRITSILRSKLNSKNTTKAVNSFAIPILTYSFGIIKWTMTELKKLQRIINTHMTANRKHHPRSCTQRVTLPRIEGGRGFLDINNLHNKQIKNLRKYFHDHSYTSILHRAITQNDIKYTPLNLHSEEIQSNETEVDKDRKILAWTQKSLHGRHRQDLCQPYVDKIASNEWLKLGELFPETEGFLIAIQDQIIETRNYQKHIMKIPIPNDMCRRCHSASETIQHITGACKSIAQTDYKYRHDQVAKIIHQKLAQKCNLLVQPSKPYYKYNADTILENSNFKLYFDRAILTDRTIHFNRPDITFLDKENKIVYLIDIAVPNSHNLQNTISEKISKYNELKEEIVRMWHLKKAVVVPIVISTTGIVPNSLKQSLNALNLPLHTRFTMQKAIILNTCRIVRKFLQDTIA

SEQ ID NO: 26025 - protein, 1396 aa, Quadrus cerialis
MRLRNRVIPQAGTRKGESRPEPSSSGCPTYSGEGNDPHMTAQSRTAAVSIQSSDADLPSSSVSSPRSLFRSPSSSPRSYQLSIPSSRSSTMTPSPTSTNNMLLDDVAQETSQVTDSVPIASTKCKRNKWSDEMNKYILRTYLELTKLETDDSVRYLSILHSKFSERFPQMVVSRQRIGDQRRAIIRNKLIPQHEIDRIYQDVKDRLGNETISAHTQSLAVGQRMKWSNEINESLIRSYYRITKLETDMTIYRTKLHQDFIATFPNLAHISVQRIADQRRVIVNNKRISDQRLNAIKVEIAKEIGMTPDNVTEHNSVTESNENRNLEINFDSPNNEANCNNIQNTNTRDTQYTHTDITINNTASNSPDDSSTLNMLNDITETYEIKNTFQESLNHYSKINPTKRDFIPKQKPSRKFSKIVHYINTYVIPDYINSNTDFNTLQTVIYCAAWTAAKSNGAKITIPLQGNANRNSSARKPKWMIRLEKKVESLRIKIGRLSQYILGNRKSKLKKQIDTILQQYKKHTVHEEPNTDLTHFLDTLKQKLAVTSSRLKRYKACTLRKTQNKQFNNNEKYFYRTLKNTTCSQTNLQTNTSPSAGELHSYWASIWENPVTHNDNSDWIKNETLKSNSVTDMTFDTISQQTFKNSIYKLQNWKAPGSDNIHNFWYKKFTNTHLNLLNHINNFIKHPHAIPKYITEGITYMIPKGNDLKHPAKYRPITCLQTVYKIITSCLTESIYKHINTHNILAEEQKGSRKLSRGCKEQLIIDSVIMRQVQKNQKDLHTMYIDYQKAYDSVPHSWLLQVLHIYKIHPQIINFLKNIMLSWYTRIKLMTPNETIETQTIKIQRGIFQGDTLSPLWFCLALNPLSNILNSTNFGYNLEYYKKDLPETKTEKTINHLLYMDDIKLYANSEIHLNELANLTEQFSQDICMQFGVDKCKINSVIAGKLHKHSYQMQSGDHIISLGINETYKYLGYNQSQYIHHKEVKQTLTKLFKQRINCIFKSSLNSKNTTKAVNSFAVPILTYSFGIINWTKTDLRNLQRTINTCMTKHRKHHPRSCVQRVTLPRIEGGRGFIDITDLHNRQIKNLRNFFQNKSTLSILHRAVTQNDTKLTPLNLHTEVEQPNEIEVDTQSKIRDWTQKTLHGRHRHDLCQPYVDKVASNEWLKFGELFPETEGFIIAIQDQVIETRNYQKHIIKMTIPTDMCRRCHSSSETIQHITGACKSIAQTDYKYRHDQVAKIIHQKLAQKCYLITHPTQPYYKYSPHIVLESNKYKLYFDRAILTDKTIHFNRPDITFLDKENKIVYLIDIAVPNSHNLQSTVSEKLSKYNELKDEVVRMWNLKQAIVVPIVISTTGIVPNSLKKSLKTLDLPLNTRITIQKSVILNTCRIVRKFLQYTDS

SEQ ID NO: 26026 - protein, 1397 aa, Ouleus salvina
MRLRNRVLPQAGTHEGESRPEPSSSGCPTYSGVGNDSHMIAQYRTVAVNTQSSHTDADVPLSPVSSPQSLFHSPSSSPQSYQLSIPTSRSSTTTPSPAVTNNILLDYVVRQTNQVTNSVPITSRRCKRNKWSDDMNKYILRTYFEITKIETDDSIRYLPILHSKFSERFPEMIVSRQRIGDQRRAIIRNKLIPQHDIDRIYQEVKDELRKESLSTHSHTQSLAVGQRMKWSNELNESLIRSYYRITKLETDMTVYRIKLHQDFIATFPNFAHISVQRIADQRRFIINSKRISDQRLNAIKLEVATEIGITPDDVTERNNYSESNENRNLEINLDKPPNNTNFINIQSTNTCNSQYPHSHNNTASNCTDDSNTINMLNDITETYEITNTFREALKYYSNINPTKRDFIPKQKPSKKFSKIVHYINIYVIPQHIDSNTDFNTLQTVIYCAAWTAAKSNGAKIDIPLQGNSNRDTSTRKPKWMIRLEKKVDCLRLKIGRLSQYLLGNRNSKLKQQIDTILQQYKMHTVHEEPNTDLTHFLDTLKQKLAVTSSRLKRYKACTLRKTQNKQFNTNEKYFYRTLVNTTNSQENLQNKSTPSAEELHRYWTAIWESPVTHNDNANWIKNETLRNNSVTDMTFEIISHQTFKNCINKLQNWKAPGSDNIHNFWYKKFTNIHLNLLSHINNFIKHPHLIPKYITEGITYMIPKGNSDLKNPAKYRPITCLQTVYKIITSCLADYIYKHIDTHNILAEEQKGSRKLSQGCKEQLIIDSVIMRQVQKKQKDLHTMYIDYQKAYDSVPHSWLLQILHIYKIHPQIISFLKTIMLSWFTRIKLITPNETIETETIKIQRGIFQGDTLSPLWFCLALNPLSNILNSTNSGYILEYNEDQLDTKQEKTINHLLYMDDIKLYANSEINLNALANLTEQFSQDICMHFGVDKCKINSVVAGRLHKHSYQMQSGNHIISLGGNETYKYLGYNQSQYIHHKEVKQTLTKQFKQRINCIFKSALNSKNTTKAVNSFAVPILTYSFGIINWTKTELKNLQRTINTCMTKHRKHHPRSCVQRVTLPRIEGGRGFLDIADLHNRQIKNLRNFFHNKSTLSIFHRAVTQNDTKLTPLNLHSRVEQPNEIEIDPESKIRDWTQKALHGRHRHDLCQPYVDKTASNEWLKFGDLFPETEGFIMAIQDQVIETRNYQKHIIKLAIPTDMCRRCHSSSETIQHITGACKSIAQTDYKYRHDQVAKIIHQKLAQKCNLIVQPTQPYYKYSPHIVLESKKYKLYFDRAILTDKTIHFNRPDLTFLDKENKIVYLIDIAVPNSHNLQNTVSEKLSKYNELKDEIVRMWNLKRAIVVPIVISTTGIVPNSLKESLKTLGLPLNTCITIQKSVILNTCRIVRKFLQHTGS

SEQ ID NO: 26027 - protein, 1260 aa, Cycloglypha thrasibulus
MNEYILRTYLELTKMETDNTPCLPLLHTKFLNKFPHMNVSRQRVGDQRRAIIRNRLISQQDIDRIHQEVKDQLQLTLHTPDSTQALTTGQRMKWGNELNEAIMRSYYRVTKLETDMTMYRVNLHQDFILTFPHLSHLSIQRISDQRRIIINNKRIPNKRLCEIKQEITTELNMPLTNESTTINTASPINIGTASYNNTNPSNTEHVVNNDLETQHTRTLTNIDTTCLNDNVTVTNEPEVNLELDTLFLETLNYYINTKPTERHFIPKQKPSRKFSKIVQYINKTILPKHVNADTDFETLQTIIYCAAWTAAKRNGAKIFIPPKQMINKNAFLRKPKWMLRLEKKVEDLRKKIGRLTQYLNGARSPKLEHQINIILKQYKTHSIHEEPNTQITHFLDTLKQKLTVVSSRLKRYKTCTLRKTQNQQFASNEKQFYRLLKSTGTNEIHTSSSHTQCNTSLSMQEIHEYWASKWENPVVHNNKAEWIKDEKLKSNSLTDMAFENISEGIFKNTIDKLQNWKAPGPDFIHNYWYKKFTTLHPYLLNHINKFINDPSLVPDFITTGITYLIPKDNNDPHNPGKYRPITCLQTIYKIMSACIAQCIYKHLDTNDIITEEQKGCRKMSQGCKEQLIIDSVIMKQVQKCKKNLYTMYIDYEKAYDSVPHSWLLEVLHIYRIHPQIISFLQNTMPKWLTRLKLTIDNETICDTDAIKIQRGIFQGDTLSPLLFCLALNPLSNILNSTHTGYVLEYEDNQFITTQHKIINHLLYMDDIKLYANTQDNLNNLAILSEQFSRDICMQFGVDKCKINAVVAGQLHKHSYEMQTGERIDSLEENSAYKYLGYYQSKNIHHKEIKCTLTKEFKHRINLILKTELNGRNVTKAINSFAVPILTYSFGIISWTKTEIKNLQRLVSTSMTKHRKHHPRSCVQRMTLPRAEGGRGFIDISNLHNRQIKNLRNFFQNKSTTSNLHKSISYNDNKCTPLNLKNRETQSNEIETDSKSKILEWSRKSLHGRHHHDLCQPYVDKIASNEWLKFGQLFPETEGFITAIQDQVIETRNYQKFIMKLPIPTDMCRRCHGSSETIQHITGACKSIAQTDYKHRHDQVAKIIHQKLAQKYNLLTQSPKPYYSYNPDVVLDNNRYKLYYDRAILTDKTIHFNRPDITLLDKDTKVAYIIDIAVPNSHNLQSTISEKLSKYTELKDEIVRMWQLKKAIVVPIVISTTGIIPTNLKQSLNILDLPLNTRFYLQKAIILNTCRIVRKFLQDTS

SEQ ID NO: 26028 - protein, 1393 aa, Charidia lucaria
MTNGALVLGKYAMRLRNRTIPQAGTHKGESRPGSSGSGSPAYSGEGNVLHMTAQSCIVAVNKQPSPATSHSLSPASYITSPFNSPSSSSLSYHPSHSSSESTTRKPSAIQVNNRLLGNVVQETTPVSQPVPIPSKIFKRNKWSDDMNKYILRTYLEITKVETDNNVRYLTLLHSKFLEKFPHMEVSQQRVGDQRRAIIRNKLITQTEIDKIYREVKEDFIKNTSCTYEPAHAQPSTAGLRIKWGNELNEYIMRSFYKLTKLETDMTTYRPHLHSDFITKFPHLAHISIQRIADQRRIIINNKRISDERLQAIKMEVALEIGMFQNGTAENNNNECSNLETDIEQPHNLGTEHDKNTNVININNLTTISLNDADIMLAIDNTFLETFKYYVDTDPIERHFIPRQKPSKNFHKILNYINTKIIPENVNEDTDFKTLQTIIYCAAWTAAKINGAKITIPPKAELNRHTKNKPKWMIRLERKVENLRLKIGRLTQYINGNKSYKLQKHVQAIIKQYKTHTIHEEPNSELTHFLDTLKQKVTVASSRLRRYKICTARKTQNKQFNANEKHFYRFIKNSDSSLYNTSTLSENAVPSEKEFHSFWANLWENPVSHNNQSDWLKNEIAKNTAVTDMTFETISIEVFKSVVDKLQNWKTPGSDYIHNYWYKKFTNIHLNLIKHINTFITEPHLIPEYITVGTTYMISKGNDFKNPAKYRPITCLQTIYKIITSCLAHHIYKHVEENKILAEEQKGARKLSQGCKEQLIIDSVIMKQVQQKRKDLYTMYIDYQKAYDSVPHTYLLEILRIYKIHPQIINFLKNMMLNWSTRLKLITHNKTIETQKIKIQRGIFQGDTLSPLWFCLALNPLSNILNVIDAGYTLKYCDKRDQLRTKREKINHLLYMDDIKLYATTHDDLYNLATLTEQFSQDICMQFGVDKCKINSVITGKLHKHSYQMQTGEQIVSLEENDTYKYLGYIQSQYIHNKEIKCILAKEFKHRITLILKSHLNARNTTKAINSFGIPILTYSFGVINWTKAELTKLQRTINTCMTKNRKHHPRSSIQRLTLPRKDGGRGLLDLINLHNKQIKNLRKFFHNKSATSNLHNAVSQNDTRFTPLNLYSEKTQSNETLTNKQNKILDWAQKSLHGRHRNDLSQPYVDMQASNEWLKLGQLFPETEGFIMAIQDQVIETRNYQKHIIKRYIPTDMCRRCHSSSETIQHITGACKSIAQTDYKYRHDQVAKIIHQKLAKKVNLITQPSEPYYNYIPDTILEDEKYKLYFDRAILTDKTIHYNRPDVTLLDKKSKTVFLIDIAVPNSHNLQSTISEKLSKYNDLKDEIIRMWQLKRAIVVPIVISTTGIIPFSLQQSLKVLDLPLHTRIIIQKAVILNTCRIVRKLLQNQNNI

SEQ ID NO: 26029 - protein, 1395 aa, Paramimus stigma
MTNGALVSVKYAMRLRNRTIPQAGTHEGESRPGSSSSGSPAYSGVGNVLHMTAQSCIVAVNKQPSSANSHSLSLASYITSPFNSPSSSPLPYHPSHSSSESTTGTPSPTQVSNTLLGNVVQKTNSVSQPVPIPSKIFKRNKWSDDMNKYILRTYLEITKVETDNNVRYLTLLHSKFLEKFPHMEVSRQRVGDQRRAIIRNKLITQTEIDKIYREVKEEFSKNTSCTYEPGHLQPSTAGQRIKWGNELNEYIMRSFYKITKLETDMTTYRTKLHNDFITKFPHLAHISVQRIADQRRIIINNKRISDERLQAIKMEVTLEIGIPQNCTTENNNNLDNNNCNNLETDLERPHDLKTGHDENTITTNINNPTSISLNDADITLAIDNTFRETLKYYVDTDPIERNIIPRQKPSKTFYKIVNYINTKIIPENVNADTDFKTLQTIIYCAAWTAAKINGAKITIPPKTYLNRNTTNKPKWMIRLEKKVENLRLKIGRLTQYINGNKSYKLQKHIQAIIKQYKIHTIHEEPNTELTHFLDTLKQKLTVASSRLKRYKVCTARKNHNKQFNANEKHFYRFIKNLDNGNTPTLSENTVPSEKEFHSFWTKLWDNPVSHNNQSDWLKNEIAKNTAVRDMPFESISKEVFKNVVDKLQNWKTPGSDYIHNYWYKKFTNIHSDLIKHINIFITQPHMIPKYFTIGTTYMVPKNSDFKNPGKYRPITCLQTIYKIITSCLAHHIYKHVQENSILAEEQKGARKQSQGCKEQLIIDSVIMRQVQQKRKELYTMYIDYQKAYDSVPHTYLIEILRIYKIHPQIINFLKNIILNWNTRLKLITHEKFIETPKIKIQRGIFQGDTLSPLWFCLALNPLSNILNTTDAGYILKYSDKRDQLTTNQEKINHLMYMDDIKLYATTQDDLYKLATLTEQFSQDICMQFGVDKCKINSVIAGKLHKHSYQMQTGEEIVSLEENDTYKYLGYNQSKYIHNKEIKTTLAKEFKHRITCILKSHLNARNTTKAVNSFGIPILTYSFGVINWTKAELTKLQRIINTCMTKNRKHHPRSCIQRLTLPRNEGGRGFLALIDLHNRQIKNLRNFFHGKSSTSNLHRAISQNDTRLTPLNLCSEKIQSNETITNKQNKILEWAQKSLHGRHHNDLSQPYVDMKASNEWLKLGQLFPETEGFIMAIQDQVIETRNYQKHIIKRSIPTDMCRRCHSSSETIQHITGACKSIAQTDYKYRHDQVAKIIHQKLAKKFNLIIQPSTPYYNYIPDTILEDEKYKLYFDRAILTDKTIHYNRPDVTLLDKKNKTVYLIDIAVPNSHNIQNTISEKLSKYNDLKDEIVRMWQLRRAVVVPIVISTTGIIPITLQQSLKVLDLPLNTRISIQKAVILNTCRIVRKFLQNQSNI

SEQ ID NO: 26030 - protein, 1060 aa, Udranomia orcinus
MISEERLSEIKQEVAAEIEISGVAQNEPNETRQEENSNNIEVENLHIENNIHIHNSSHSNHHYDTVTSTQFLENEINMDIENTFKYTLNYYSDTNPTKRNYIPKQKPSKKLRKIVNYINTSILPNYINVDTDFNRLQTIIYCAAWTAAKINGSKITIPPKNESYQSMLNRKPKWMLRLERKRDDLRKDIGRLTHYTLGNRSNKIQRHVNIIFSKYKIHTIHEEPNNQLTHFLDTLKQKLIVVSSRLKRYKSCTLRKTQNKQFIANEKQFYRSLRNTDTSSQSNTLNTPTQRLHRVNELHTFWAKIWENPVCHNNNADWIRREKENNLCTQEMMFEQISEETFNTVINKLQNWKAPGSDYIHNFWYKSFKYTHPHLLRHINIFIKLPHLTPEYITEGITYMIPKDIERQNPAKYRPITCLQTIYKIITSCLTQCIYEHIDKNNILSEEQKGCKKQSQGCKEQLIIDSVILKQVQQKKKDLFSMYIDYQKAYDSVPHSWLLEVLHIYKINPIIISFLQTVMSNWFTRLRLTTSNDTLETQNIKIQRGTFQGDALSPLWFCLALNPLSNILNSTKLGYILEYSDNEDTLNIKQQKTLNHLLYMDDIKLYANTQDHLYSLAHLTEIFSDDICMQFGVEKCKINSVMAGQLHMHSYEMQTGEIIECLNEKEAYKYLSYQQSKYLHHKEIKINLSKQFKHRVNVILKSELNAKNITKAVNTFAIPILTYSFGIIRWTQTELRSLQRIINTSMTKHRKHHPRSCIQRVTLPRSEGGRGFIDIINLHNRQIKKLRTYFSIYATSSILHKAVRQNDKSLTPLNLHNTHPQKNEEQTDKQSKILEWTRKSLHGRHRQELCHPNVDKIASNEWLQLGQLFPETEGFIMAIQDQVIETRNYQRHIMKISIPTDMCRRCHSASETIQHVTGACKAIVQTDYKYRHDQVAKIIHQKLAYKYNLVTQPIKPYYDYNPEIVLESNNHKLYFDRAILTDKTIHYNRPDLTLLDKNNKTAYLIDIAVPNSHNLQSTISEKLSKYNELKFEIIRMWRLEKAIVVPIVISTTGVIPTNLK

SEQ ID NO: 26031 - protein, 1283 aa, Telegonus cellus
MSIDDVVQETVSVNRPAPISSQTFKRSRWSNDMNEYILRTYLALTKLETLNILYLPTLHDIFLAKFSQMQVSRQRIGDQRRAIVRNKLISQQDIDRINKEVREYLELGEAHKSTSVIGPLVSVGKRMRWTNELNEAIIRSYFRVTKLETDITMYRTNLHQDFIATFPQLAHISIQRIADQRRVIINNRLILEERISIIKQKIAAEIEIIQTDNVERHENISPPLDNNNFNIHVQNETHLHNNENNNFNESSTSNLSTSIEINLEIENTFQDTLKYYANTDAIERNYIPKQKPSKRFNKIINYINTCVIPKHVNADTDYKTLQTIIYCAAWTAAKSNGARITIPPKHNSYSNTLKHKPKWMIRLERKVTDLRMKIGRLTQFTLGNRSNRLQKQVNMIIEQYKIHTIHEEPNTQIAHFLDTLKQKLVVISSRLKRYKACTLRKTQNKQFNSNEKQFYRSLKNAGTSQVNKAYTLPTASELHKFWSSIWENPAVHNDQAEWIIKEESNKTSTPEMIFQKISIETFKTAINKLQNWKSPGSDYIHNFWYKSFTHIHPYLLDHINNFIKHPHLVPEYFTAGITYMLPKDSDQQNPANYRPITCLQTIYKIITSCVAQHIYDHIDSNHVLTEEQKGCRKRSQGCKEQLIIDSVIMKQVQHKKKNLYTMYIDYQKAYDSVPHSWLIKVLKLYKVNSVIINFLKSIMSNWLTRLILRTPNNTIETDNIRIRRGLFQGDTLSLLWFCLALNPLSNILNSTNAGYLLQYRDSENDLSSVPQQQVLNHLLYMDDIKLYANTHDDLNNLAYLTETFSKDICMQFGVDKCKVNSVVGGKLHKHSYQMQTGEQIDSLDEEKGYKYLGYYQSKYLHHKEIKSTLTKNFKHRITSILKSQLNATNITKAVNTFAIPILTYSFGIINWTQSELKHLQRIIHTSLTRHRKHHPRSCVQRVTLPRMEGGRGFIDIVNLHNKQVKNLRTFFHNSATSTILHKAITQNDKKLTPLNLSNNEAQKNEVQVDRQSKILEWSRKSLHGRHRHDLCLPDVDKAASNEWLRRGQLFPETEGFLIAIQDQVIETRNYQKHIMKISISTDICRRCHSSPETIQHITGACKAIVQTDYKYRHDQVAKIIHQKLAQKYKLLTQPIKPYYDYNPEIVLENKRCKLYFDRAILTDKTIHYNRPDITILDKDNKIGYLIDIAVPNSHNLQSTIAEKLSKYTELKDEITRMWQLKKAIVVPIVISTTGIIPKNLKFSLKTLDLPLHISSNLQKAIILNTCRIVRKFLQIKKDITDIN

SEQ ID NO: 26032 - protein, 1358 aa, Cecropterus evenus
MSMNMNQIKHKYNLRSISKGHKNMDSRVIQNENEQENMEDIGLSSPASLSSKSCSLNISSASASQSSLMSTSSISLENVVQETSLVHEPVPISSQTFKRNKWSKDMNEYILRTYLELTKLETLNISYLPTLHEKFVVKFPQMQVSRQRIGDQRRAIIRNRLISQQDIDRIHKEVEENLKVGVVNHNTRVISPVGTVGKRMRWSNELNEAIMRSYFRVTKLETDMTMYRMNMHLDFITTFPHLTHISIQRIADQRRVIINNRLISEERISAIKQAIASEIEITPTGSDEQHDNLSNSLEGNDNFNIQVDSGKHMHDNEGTNNFNKTNTINFSTDIAINVDIDNTFQETLNYYLNTNATARNYIPKQKPSKKLSKIVHYINNLVLPKYINADIDFKTLHTIIYCAAWTAAKNNGARITIPPTENSHSNTQHKPKWMIRLERKVTDLRIKIGRLTQYTLDNRSNKLQKQVNLIIEQYKVHTIHEEPNTQTAHFLDTLKQKLGVISSRLKRYKACTLRKTQNKQFNSNEKQFYRSLRNACNMRDNNTPAHTLPTATELHRFWSTIWENPTLHNDNAEWIKREEFNKTSMSEMSFQKISLDTLKTVINKLQNWKAPGSDNIHNFWYKAFTYIHPYLLDHINNFIVNPQLTPEYFTAGITYLLPKDSDQHNPANYRPITCLQTIYKIITSCLAQYIYEHIDSNQILAEEQKGCRKGSQGCKEQLVIDSVILKQVQNKKNDLYTMYIDYQKAYDSVPHSWLIKVLNLYKIHPLIINFLKILMSNWFTRLRLTTSNNIIETDNIRIRRGIFQGDALSPLWFCLALNPLSNILNSTNTGYILKYYDIEDKSLSVTKGHILNHLLYMDDIKLYANTQDDLNNLAYLTERFSQDICMQFGVDKCKVNSVVAGKLHKHSYQMQTGDQIDSLDEEKAYKYLGYHQSKYLHHKEIKSTLTKNFKHRITSILKSELNAINITKAVNTFAVPLLTYSFGIICWSQSELKNLQRIIHTSLTKHRKHHPRSCVQRVTLPRIEGGRGFIDIVNLHNKQVKNLRNFFHNKAISSNLHTAIIQNDKNKTPLNLYNNKPQKNEVQVDIKSKILEWTRKSLHGRHRHDLSLPNVDKNASNEWLRRGQLFPETEGFLLAIQDQVIETRNYQKHIMKISIPSDICRRCHSSSETIQHITGACKAIVQTDYKYRHDQVAKIIHQKLAEKYNLLTQAIKPYYDYNPEVVLENKKYKLYFDRAILTDKTIHFNRPDITILDKDNKTGYLIDIAVPNSHNLQSTIAEKLSKYTELRDEITRMWQLKKAIVVPIVISTTGIIPHNLKFSLKTLDLPLYIISNLQKAIILNTCRIVRKFLQIEKDTTDI

SEQ ID NO: 26033 - protein, 1328 aa, Cecropterus toxeus
MPIRPIMRMNKIKHKYNLRSSSRAQRDTYTDINEDESRNEDDIGSLSPTLSTSKSCSLSSLVSSPQSSSISNNSMLEYVVQETDTVIEPAPMSSKTSKTFKRNKWSKDMNEHILRTYLEVTKLETVNTPYLPVLHELFLAKFPHMQVSRQRIGDQRRAILRNKLISQKDIERIYKEVKESLQLGNTHTSTSSVSPVKTIGKRMRWSNELNEAIIRSYFKVTKLETDMTMYRTTLHQDFITTFPHLSYISVQRIADQRRIITNNKLISEERFSAIKQEVAAEIEMLLTDTVEHHDNTSTSLETDNFDTDTRIHLRSNEDTNYSNHPSIVNSSNDIEINVEIENTFLETLKYYTDTYPTDRNFIPRQKPSKRLSKIIHYINTFVIPKYVNTETDFKSLQTIIYCAAWTAAKRNGARISIPPRETLHINTLKQKPKWMIRLERKVTDLRIKIGRLTQFTLGNRSDKLQKQVNVIIKQYKIHTIHEEPNKQISHFLDTLKQKLVVISSRLKRYKACTLRKTQNKQFISNEKQFYRSFKDSNSSQSNKSNTPKRSLPAASELHKFWSTLWENPSIHNNTAEWIKKEELNQMSKPEMIFQKISEETLKTVITKLQNWKAPGSDYIHNFWYKAFTNIHPYLLAHINNFIENPHLVPEYITAGITYMLPKSNDHQNPANFRPITCLQTIYKIMTSCLAQYIYEHIETNQILAEEQKGCRKRSQGCKEQLIIDSVIMKQVQCKKKDLYTMYIDYQKAYDSVPHSWLLQVLKLYKVHPIIVNFLKSLMMNWFTRLRLKTVNNVIETDTIRIRRGIFQGDALSPLWFCLALNPLSNILNSTKTGYHLQYSENENDLLFAPQQHVLNHLLYMDDIKLYANTQNDLNNLANLTEKFSQDICMQFGVDKCKVNAVVAGKLHKHTYELRTGEKIESLDEATAYKYLGFYQSKYLHHKEIKTILTKNFKHRIVSVLKSELNAINITKAVNTFAIPILTYSFGIISWNQSDLKKLQRIINTSLSKYRKHHPRSCVQRITLPRIEGGRAFIDIVNLHNKQIINLRTFFHNNSTASILHKAIMQNDKKFTPLNLYSNESQKNEVQVDTQSKILEWTRKSLHGRHRQDLCQPNVDKVASNEWLRRGQLFPETEGFLIAIQDQVIETRNYQKHIMKISIPTDVCRRCQSSSETIQHITGACKAIVQTDYKHRHDQVAKIIHQKLAQKYDLLTQPIKPYYDYNPEVVLENKRYKLYFDRAILTDKTIHYNRPDITLLDKHNKTSYLIDIAVPNSHNLQSTIAEKLSKYTDLKDEITRMWQLRKAVVVPIVISTTGIIPTNLKLSLKTLDL

SEQ ID NO: 26034 - protein, 1136 aa, Astraptes naxos
MTMYRTNMYQDFIATFPHLAHISIQRIADQRRVIINNRLISEERISIIKQEIAAEIDIIQTDNIDCHENISAPLENINISIHLDTEIHLHNNEDNEDTNNFNESSISNLSTSIEINLEIENTFQDALTYYANTDATERNYIPKQRPSKRFSKIIHYVNTRVIPKHVNADTDYKTLQTIIYCAAWTAAKRNGARITIPPKDNAHSNTIKHKPKWMIRLERKVTDLRMKIGRLTQFTLGNRSNRLQKQVHMIMEQYKIHTMHEEPNTQIAHFLDTLKQKLVVISSRLKRYKACTLRKTQNKQFNSNEKQFYRSLRNTGTSQANKALTLPTASELHRFWSSIWENPAAHNEQAEWIMKEESNKTSTPEMIFQKISIETFKTAINKLQNWKAPGSDYIHNFWYKALTYIHPYLLDHINNFIENPHLVPEYFTSGITYMLPKDSDQQNPANYRPITCLQTIYKIITSCLAQHIYNHIDSNQILTEEQKGCRKRSQGCKEQLIIDSVIMKQVQQKKKNLYTMYIDYQKAYDSVPHSWLIKVLELYKVNSLIINFLKSIMSNWLTRLTLITPNNTIETDNIRIRRGMFQGDALSPLWFCLALNPLSNILNSTNIGYLLQYTDHEDGLSSVTQKQVLNHLLYMDDIKLYANTQDELNNLAYLTETFSKDICMQFGVDKCKVNSVVAGKLHKHSYEMQTGEQIDSLDVEKGYKYLGYYQSKYLHYKEIKSTLTKHFKHRITSILKSQLNATNITKAVNTFAIPILTYSFGIINWTQSELKNLQRIIHTSLTRHRKHHPRSCVQRVTLPRIEGGRGFIDVVNLHNKQVKNLRTFFHNNAISSSLHKAITQNDKKLTPLNLSNKETQKNEVQVDRRSKILEWTRKSLHGRHRHDLCLPDVDKTASNEWLRRGQLFPETEGFLIAIQDQVIETRNYQKHIMKISIPTDICRRCHSSPETIQHITGACKTIVQTDYKYRHDQVAKIIHQKLAHKYNLLADPIKPYYNYNPEVVLENKRYKLYFDRAILTDKTIHYNRPDITVLDKDNKIGYLIDIAVPNSHNLQSTIAEKLSKYTDLKDEITRMWQLKKAIVVPIVISTTGIIPTNLKSSLKTLDLPLHISSHLQKAIILNTCRIVRKFLQIETDITDK

SEQ ID NO: 26035 - protein, 1356 aa, Lobocla liliana
MGPIMRMNKDKTKHKYNLRSLSRTQQNIDTDFAEREPENIEDLGSLSPTSSSNSCSINTLPFSSPQSSSLSNNSTSLENVVQEAALGYESAPITSKICKRIKWSRDMNEYIMRTYLELTKLETLNTPYLSILHDKFIAMFPQMQVSRQRIGDQRRAIIRNKFFSQQDIDRIYEEVKEKLQLGKAHTSRAVTTPLVLIGKRMRWNSELNEAIIRSYFRVTKLETDMTMYRNALYKDFTNTFPQLAHISVQRIADQRRVILNNKMISEERIAEIKQEIAAEIGSPETIEQHENSGTPLENDNFDIHTRIQLLNNENTSNDPNTINLSTETETNFDIENTFQETLRYYTDTSPIERNYIPRQKPSKRFSKIIHYINTLIIPKHVNADTDYKTLQTIIYCAAWTAAKRNGAKIAIPQKENTHRNIQKHKPKWMIRLERKVADLRIKIGRLTQFILGNRSNKLQKQVNMIVKEYKIHTIHEEPNTQIAHFLDTLKQKLTVTSSRLKRYKTCTLRKTQNNQFISNEKLFYRSLKNNGTTQTHTLNTASHTLSAANELHRFWSTIWENPSIHNDNADWIKTEEGNKTSLQEMIFQKIPIETFKIAINKLQNWKAPGSDHIHNFWYKAFTYIHPYLLEHINNFIKNPHIVPEYITAGITYMVPKGSDQQNPANYRPITCLQTIYKIITSCLAQCIYEHIDSNKILAEEQKGCRKGSQGCKEQLTIDSVIMKQVQHQKKDLYTMYIDYQKAYDSVPHSWLIRVLNLYKIHPLIISFLKSIMSKWLTRLRLTTSNDTVETDSIRIRRGIFQGDALSPLWFCLAINPLSNILNSTNTGYLLQYYDNEEESIRTPQQKILNHLLYMDDIKLYANTQNDLNKLAYLTEIFSQDICMQFGVDKCKVNSVVTGKLHKHSYQMQTGEQIDSLDEDKAYKYLGYYQSKYLHHKEIKNTLIKQFKHRITSILKSELNAANITKAVNTFAISTLTYSFGIISWTQSELKNLQRIIHTSLTKHRKHHPRSCIQRITLPRIEGGRGFIDVVNLHNKQIKNLRIFFHNNANISILHKAIVQNDKKFTPLNLHNNESQKNEVQVDRQHKILEWACKSLHGRHRHDLCLPNVDKIASNEWLRRGQLFPETEGFLIAIQDQVIETRNYQKHIMKISIPTDMCRRCHSSPETIQHITGACKAIVQTDYKYRHDQVAKIIHQKIAQKYDLLAHTIKPYYDYNPEIVLENKRYKLYFDRAILTDKTIHYNRPDITILDKSNKTGYLIDIAVPNSHNLQTTIAEKLSKYTELKQEITRMWQLRKAIVVPIVISTTGVIPTNLKLSLKTLDMPLHIIGNLQKAIILNTCRIVRKFLQIGKDATDSN

SEQ ID NO: 26036 - protein, 887 aa, Lobotractus valeriana
MIRLERKVADLRIKIGRLTQFKLGNTSNKLQKQVNMILKEYKIHTIHEEPNTEIDHFLDTLKQKLRVVSSRLKRYKTCTLRKTQNKQFMSNEKLFYRSLKNIGTSQTNNLNTPSRALAAANELHKFWSTIWENPSIHNNNTDWIKKEEVNNTSLQKMIFQNISIETFKTAINKLQNWKAPGSDCIHNFWYKAFTYIHPHLLAHINNFIKNPHILPEYITEGITYMIPKDSDLQNPANYRPITCLQTIYKIITSCLAQCIYEHIDTNQIFADEQKGCRKGSQGCKEQLTIDSVIMKQVQHKKKHLYTMYIDYQKAYDSVPHSWLIQVLNLYKIHPLIITFLQSIMSNWFTRLRLTTSKDSVETDSIRIRRGIFQGDALSPLWFCLAINPLSNILNSTNTGYLLQYCDNDKESIRTPQKKVLNHLLYMDDIKLYANTQSDLNNLAYLTEIFSRDICMQFGVDKCKVNSVVAGKLHKHSYQMQTGEQIDSLDEDRAYKYLGYYQSKYLHHKEIKNTLTKQFKHRVISILKSELNAKNITKAVNTFAVPILTYSFGIINWTQSELKSIQRIINTSLTKHRKHHPRSCVQRVTLPRIEGGRGFIDVLNLHNKQIKNLRNFFHTKASTSILHKAIAQNDKKFTPLNLQNNESQINEVQVDRQCKLLEWTRKSLHGRHRQDLCQPNVDKIASNEWLRRGQLFPETEGFLIAIQDQVIETRNYQKHIMKISIPTDMCRRCHSSPETIQHITGACKAIVQTDYKYRHDQVAKIIHQTLAQKYDLLTQPIKPYYDYNPEVVLENERYKLYFDRAILTDKTIHYNRPDITILDKNNKIGYLFNRYCSPNGYYPHENRCCLTNIQLLLMNKYFILINIMSWRIKLQHFNFINNSFAVVY

SEQ ID NO: 26037 - protein, 1327 aa, Astraptes enotrus
MRMNKNKIKHKYNLRSLATAQRNTDRNTAEHEPESTKDTGSLSPTLSSSKACSINTSLVSSFQSSLISDSSILLEGVVQETVLDTEPAPTSSKMSKRNKWSKDMNEYILRTYLELTKLDTLNTPYLQILHDKFLAKFPQMQVSRQRIGDQRRAIFRNKLVSQQDIDRIHKEVKETLQLEKADTNTSGTLLTIGKRMRWNNELNEAIIRSYFRVTKLETDMTMYRSNLHQDFVTTFPHLAHISIQRIADQRRVIINSRLISEERISEIKQEISAEVKITHTDIVEHDENISAARDNGSYDIDTRIHTSNNEDIYFNQLSTINTPNDTEINLDIENTFQETLKYYADTTPTERNYIPKQKPSKRLSKIIHYMNTIVIPKYVNADTDYKTLQTIMYCAAWTVAKGNGARISLPPRQNSQPNSLKHKPKWMIRLESKVTDLRIKIGRLTQFTLGNRSNKLQKQVNIIIKQYKIHTIHEEPNTQITHFLDTLKQKLVVISSRLKRYKACTLRKSQNKQFNSNEKQFYRCLKNAGTSQDNKSNTPTHTLSTANELHRFWSTIWENPCAHNDNADWIKKEICNKTPTPEMFFQKISVDTFNIVINKLQNWKAPGSDYIHNYWYKAFTSIHPYLLAHINNFIKNPHLLPEYITAGITYMLPKDTNKQNPANYRPITCLQTIYKIITSCLAQYIYEHIDSNQILAEEQKGCRKRSQGCKEQLIIDSVIMKQVQHANKDLYTMYIDYQKAFDSVPHSWLIQVLNLYKVHPLITNFLKSIMSNWFTRLRLTTSHNTIYTDSIRIRRGLFQGDALSPLWFCLALNPLSNILNSTNTGYLLKYCDNEDDLVNIPKQKVLNHLLYMDDIKLYANRQDDLNNLAYLTELFSQDICMQFGVDKCKVNSVVAGKILKHSYQLQTGEQIDSLDEEKAYKYLGYYQSKYIHHKEIKTTLTKNFKHRIISILKSELNAINVTKAVNTFAIPILTYSFGIINWTQSELKNLQRLINTSLTKHRKHHPRSCVQRITLPRIEGGRGFIDIVNLHNRQIKNLRTFFQNNATTSILHKAITQNDKKLTPLNLHNNNPQKNEVQVDRQSKILEWTRKSLHGRHRQDICLNNVDKIASNEWLRRGQLFPETEGFLIAIQDQVIETRNYQKHIMKLSIPTDMCRRCHSSSETIQHITGACKAIVQTDYKYRHDQVAKIVHQKLAHKYDLITQPIKPYYDYNPEVVLENKNYKMYFDRAILTDKTIHYNRPDITILDKHNKTGYLIDIAVPNSHNLQSTIAEKLSKYTELKDEITRMWHLKKAVVVPIVISTTGIIPANLKFSLKTQSLIIYQHHI

SEQ ID NO: 26038 - protein, 1354 aa, Telegonus anausis
MKMNKNKTKHKYNLRSLSKNQQYTDNAQHESEQENIEDIGLLSPALSSSKSCSINTSPVSSLQSSFLSNSSNMLLDDVVQETVPVNNSAPISSQKFKRNKWSNDMNEYILRTYLELTKLETLNIPYLPALHDKFVAKFPQMQVSRQRIGDQRRAIVRNKLIPQQDIDRINKEVREYCELGEAHKITSDIGPLVTVGKRMRWTNELNEAIIRSYFRVTKLETDMTMYRSNLHQDFIATFPHLAHISIQRIADQRRVIINNRLILEERISIIKQEIAAEIEIIQSDNVEHHVNRSAPLENNNFNINVDAETHLHNNEDNNLNESSTSNLSTNIEINLEIENMFQDTLKYYTNTDATERNYIPKQKSSKKFRKIIHYINTLVIPKHVNADTDYKTLQTIIYCAAWTAAKKNGARITIPPKDKSYSNTQKYKPKWMIRLERKVTDLRMKIGRLTQFSLGNRSYRLQKQVNMIIEQYKIHTIHEEPNTQINHFLDTLKQKLAAISSRLKRYKACTLRKTQNEQFNSNEKQFYRSLKNAGTSQLNKAQTVPTASELHKFWSSIWENPAVHNDHAEWIKIEEANKTSTSEMIFQKISIETFKTAINKLQNWKAPGSDYIHNFWYKAFTYIHPYLLDHINNFIKNPHLVPEYFTAGITYMLSKDTDQQNPANYRPITCLQTIYKIITSCVAQYIYDHLESNQILTEEQKGCRKGSQGCKEQLIIDSVIMKQVQQEKKNLHTMYIDYQKAYDSVPHSWLIKVLKLYKVNSLIINFLKSIMSNWLTRLTLRTPNNTIETDNIRIRRGMFQGDALSPLWFCLALNPLSNILNTTNTGYLLQYTNSERDLSSAPQQQVLNHLLYMDDIKLYANTEDDLNNLAYLTETFSKDICMQFGVDKCKVNSVVAGKLHKHSYQMQSGEQIDSLDDEKGYKYLGYYQSKYLHHKEIKSTLIKKFKHRITSILKSQLNAFNITKAVNTFAIPILTYSFGIINWNQSELKNLQRIIHTSLTRHRKHHPRSCVQRVTLPRIEGGRGFIDICNLHNKQIKNLRTFFHNNATTTILHKAITQNDKKLTPLNLFNYEAQKNEVQVDRQSKILEWTRKSLHGRHRHDLCLPDVDKVASNEWLRRGQLFPETEGFLIAIQDQVVETRNYQKHIMKISIPTDICRRCHSSPETIQHITGACKAIVQTDYKYRHDQVAKIIHQKLAQKYNLLTQPIKPYYDYNPEIVLENKRCKLYFDRAILTDKTIHYNRPDITILDKDNKIGYLIDIAVPNSHNLQSTIAEKLSKYTELKDEITRMWQLKKAIIVPIVLSTTGIIPKNLNFSLKTLDLPLYISSNLQKATILNTCRIVRKFLQIDKDITDI

SEQ ID NO: 26039 - protein, 1260 aa, Dyscophellus porcius
MRIKWSKDMNEYILRTYLELTELETLNRPYLSTLHDKFLSKFPHMQVSRQRIGDQRRAIMRNKFLSQQDLDRIYKEVEDTLQLQKTHTDRTAVSQSVTIGKRMRWNNDLNEAIIRSYFRVTKLETDMTMYRTYLHRDFITTFPHLAHISVQRIADQRRVIMNNIMIAEERIIVIKNEIANEIETTRNDTVKQHVDINTGALVTSDNIESDNFTQPNNNINTNGLINTNNLNGSTDAVTNLEIYNTFQETLNYYTDISPTKRNYIPKQRPSKRFRKIVHYINTSIILKYVNEETDYKTLQTVIYCAAWTAAKINGARISIPPRQNVQQNIQRKPKWMIKLGKKVEDLRAKIGRLTQFTLGNRSKKLQSQVNIILKQYKVHTIHEEPNSQISHFLDTLKQKLTVISSRLKRYKACTLRKTQNKQFICNEKQFYRTLKNTDDNQNRSQNVRSHEMPSANELHRFWSTIWENPVTHNTNADWIKKEEFSSNSWQEMPFQQISAEIFKITIHKLQNWKAPGSDCIHNFWYKAFTYIHPYLLAHINNFIKNPHLVPEYITAGITFMIPKDTDNRNPSKYRPITCLQTVYKIITSCLAECIYEHINNNQILAEEQKGCRRLSQGCKEQLIIDSVIMKQVQQKKKDLYTMYIDYQKAYDSVPHTWLLKVLHLYKIHPIVISFLNTVMSKWVTQLRLTSSTNTIETNHIRIQRGIFQGDALSPLWFCLALNPLSTILNSTNTGYILQYSDNADHLLEKQQKTLNHLLYMDDIKLYANTQNELNNLAYLTERFSQDICMQFGVDKCKVNAIVSGQLHKHSYQMETGERIDPLDESKPYKYLGYIQSKCLHNKEIKTSLTKQFRNRINVILKSELNAINITKAVNTFAIPILTYSFGIISWTQSDLKSLQRIISTSLTKYRKHHPRSCIQRVTLPRAEGGRGFIDIINLHNKQIKNLRTYFHTCANTSVLHKAIAQNDKKITPLNLKSNQTQKNELHVDKQTKILQWSQKALHGRHRHDLCQPNVDKIASNEWLRRGQLFPETEGFIIAIQDQVIETRNYQKHIMKIAIPTEMCRRCQSSSETIQHKTGACKALAQSDYKHRHDQIAKIIHQKLAQKHDLLVNPIKPYYEYNPEIVLESNRYKLYFDRAILTDKTVHYNRPDLTLLDKENKTAYLIDIAVPNSHNLQSTITEKLSKYTELKEEIIRMWHLRKAIIVPIVISTTGVIPTNLKLSLKILNLPINISNHLQKAIILNTCRIVRKFLQIDYDSIN

SEQ ID NO: 26040 - protein, 1405 aa, Morvina fissimacula
MTNGAIVSTKYAMRLRNRKIPQVGTREGESRPESSGSGCLTYSGGGNVSHRTTQPSAVAVNKPSSSISSDSTTSYTSTHSPFTSPNSSPHSYLSTKSSSPHTATGSSPGSVSRMPLDDVVQETHLGVDPVPISSRTSKRNKWSDDMNKYIMRTYLEITKLETDDTVRYLPILHSKFLARFPQMHVSSQRIGDQRRAIIRNKLISQQDIDKIHEEVRSNLQLRTHSQVNTHTVTIGQRMKWTNELNESIIRSYYKVTKLETDMTMYRTNLHQEFIAQFPHLSHISIQRISDQRRIIINNKRISEERLNEIKQEVANESGMTQCNTRNSNINTHENTVLPTQIDTDVNVRLGQCNVANNTGISFSLNNIEPTCLNDTNTYVVPNDSDMNPEIENAFQETMNYFINTNPTERQFIPKQKPSKRFSKIVHYINTTIIPKYVTVDTDFKTLQTVLYCAAYTAAKRNGAKIHLPPKENSSRNITSKKPKWMIRMEKKIKDLRKKIGRLTQFIKGNRSLKLQQQVNIIITQYKIHSIHEEHNSQLTHFLDTLKQKLTVASSRLKRYKICTLRKIQNKQFNANEKQFYRSLKSTNANQISNNSPSKNSLPSAKDLYSFWANIWENPVGHNNEADWIKEEKIKSNSVSDMVFESIKEETFKTTIDKLQNWKAPGSDYIHNYWYKKFTCIHLCLMNHINNFIRNPNLMPEYITAGITYMIPKDNDFLNPAKYRPITCLQTVYKIITSCLAHCVYKHIDTNKVLAEEQKGSRKLSQGCKEQLIIDSVIMKQVQQKRKDLHTMYIDFQKAYDSVPHTWLIEILHIYKIHPQIINFLQKTMHNWYTQLKLTTQTETVHTNKIKIQRGIFQGDTLSPLWFCLALNPLSNMLNSSNSGYILHYYNDEEELRNKHQKIISHLLYMDDIKLYANTEDKLHTLANLTDRFSQDINMKFGVDKCKINSVLAGQLHKHSYQMQTGEQIVSLEENGAYKYLGYYQSRYIHHKEVKASLTKQFKERITSILKTKLNAKNTTKAVNSFAVPILTYSFGIINWSKTELKCLQRIINTSMTRNRKHHPRSCIQRVTLPRVEGGRGFLDVINLHNRQIKNLRNFFHYNSSTSILHKAVTQNDIKFTPLNLHNKDIQNNEKEIEKQRKILDWSQKSLHGRHYHDLCQPYVDKIASNEWLKYGQLFPETEGFIVAIQDQIIETRNYQKHIMKIPIPTDLCRRCHGMSETIQHITGACKSIAQTDYKYRHDQVAKVIHQKLAQNYKLSIQPNKPYYSYNPDVILENDTYKLYFDRAILTDKTIHYNRPDLTFLDKENKTVYLIDIAVPNSHNIQTTVSEKLSKYNELKGEIIRMWHLRKAVIVPIVISTTGIIPNSLNQSLKILGIPIHTRITLQKAVILNTCRIVRKFLQEPN

SEQ ID NO: 26041 - protein, 1204 aa, Epargyreus clarus
MSMNKNKIKHKYNLRSLSYTNTQRNIETHIDEREPGDMEDIVSLSPTLSSRKSWSINTSPVSSSQSSLLSNSSMLLEDVVQETGLVTDPAPIPSKTFKRNKWSIDMNEYILRTYLELTKLETLKTPYLPILHEKFLAKFPQMQVSRQRIGDQRRAILRNKLISQQDIDRIHREVEETLRLGNSQTSTSVVCPLVTSGKRMKWDNELNEAIIRSYFKVTKLETNMTMYRTTLHQDFISTFPHLSHISIQRIADQRRVIINNRLISEERVSEIKREIAAEIEFTPSDTVGHYENISAQFENDNFEIDTRIHSHDNEATNIFIQTNDNNVSNNIETDIEIENTFQETLKYYTNTNPTERNYIPKQKPSRRLSKIVHYINTILLPKYLKVDNDFKTLQTIIYCAAWTAAKINGARIHIPPRENSYLNSSKHKPKWMTRLERRVTDLRIKIGRLTQYTLGNRSNKLQKQVSKIIEQYKIHTIHEEPNSQISHFLDTLKQKLVVISSRLKRYKACTLRKTQNKQFISNEKQFYRSLKNTSTTQANKTNIPTHTLSTANELHKFWSRIWENPSTHNDKAEWIKKEEYHKASMPEMIFQKISVDTLKTSINKLQNWKAPGSDFIHNFWYKAFTYIHPYLLTHINNFIENPNLVPEYITAGITYMLPKDNDHQNPANYRPITCLQTIYKIITSCLAQCIYEHIDRNQILAEEQKGCRKRSQGCKEQLTIDSVIMKQVQHKKKDLYTMYIDYQKAFDSVPHSWLIQVLNLYKVHPLITNFLKSIMSNWFTRLRLTSSNNTIDTDCIRIRRGIFQGDALSPLWFCLALNPLSNILNSTDTGYILHYSDNEDNVVSVPQEKEKVLNHLLYMDDIKLYANTQDELNNLAYLTEMFSKDICMQFGVDKCKVNSIVAGKLHKHSYQMQTGEQIDSIDEENAYKYLGYYQSKYLHNKEIKTTLTKQFKHRVTSILKSELNAIPILTYSFGIISWTQTELKNLQRIINTSLTKHRKHHPRSCVQRMTLPRIEGGRGFVDIVNLHNKQIQNLRTFFHTHATTSILHKAITQNDKKLTPLNLYNIESQKNEVQVDRQSKILEWTRKSLHGRHRQDLCLPKVDKVASNEWLRRGQLFPETEGFIIAIQDQVIETRNYQKHIMKTPIPTDICRRCHSSSETIQHITGACKAIVQTDYKYRHDQVAKIIHQKLAQKYDLLTQPIKP

SEQ ID NO: 26042 - protein, 1420 aa, Erynnis tages
MRLRNRDIPQAGTGAHCTGESGPEPTNSGCPTYSGGGNVSRLTAQLTTAVAENNSSSSSPSSSRNFIQSSSPISSTQSLFNSPSSSPQSYQAHSSSSSRSTTTSPLSFKSRLLEDAVQEVDVIESVPTTSRIFKRNKWSKDMNEYILRTYLQLTKLESDNTPCLPLLHTKFLNKFPQMQVSRQRIGDQRRAIVRNKLISQQDIDRIYQEVKEQLQLTSHTPEYTHTEYTHTKATGQRMKWGNELNEAIMRSYYRVTKLETDMTMYRVNLHQDFVSRFPHLAHISVQRIADQRRVITNNKRVPEERLNIIRQEIAIEINMPQMNTTKDKTCKINENAITDTQIQQQCHTNTTSYNNRITLNTNYPENDDSEMHNSQSINDIDARCFNDNTVTNETEINLDIENTFQDALNYYINTDPTERHYIPKQKPSRKLGKIVHYINKTIIPKHVNTDTDFKTLQTIIYCAAWTAAKSNGAKINVPPKQSSNNKILVRKPKWMIRLEKKVEDLRKKIGRLTQFMRGNRSPKLQQQINMITKQYKIHSIHEAPNTKNNHFLDTLKQKLTVASSRLRRYKTCTLRKTQNKQFITNEKQFYRSLKTTGTNQINTSCKSHIQPTTSPSMQEIHKYWVSKWQDPVSHNNEAEWIKNEKLKSNLLTDMDFENISEETFKSTIDKLQNWKAPGSDYIQNYWYKKFTTLHTYLIDHINKFIRNPSLLPEYITAGITYLIPKDHRDYQNPGKYRPITCLQTIYKIIPSCLAQCIYKHLDNNSIIAEEQKGCRKLSQGCKEQLTIDSVIMKQVEKYKKNLYTMYIDYQKAYDSVPHSWLLEVLHIYKIHPQIISFLKNTMLKWVTRLKLTIENEIVHNTDTIKIQRGIFQGDTLSPLWFCLALNPLSNILNSTNSGYVLQYEEKDNLLITTQQRIINHLLYMDDIKLYANTQDNLNNLANITEKFSQDICMQFGIDKCKTNSVVAGQLYKHSYEMQNGEMIDSIEESGAYKYLGYHQSKLIHHKEIKCTLTKQFKQRINHILKSELNARNVTKAINSFAVPVLTYSFGVINWTKIELKNLQRLINTSMTKHRKHHPRSCVQRMTLPRTEGGRGFIDIANLHNKQIKNLRNLFHTKSNTSTLHKAISHNDEKCTPLNLKDKNIQKNEVETDSQSKILEWARKSLHGRHHHDLCQPNVDKNASNEWLKFGQLFPETEGFIIAIQDQVIETRNYQKYVMKLSIPTDMCRRCHCSSETIQHITGACKSIAQTDYKHRHDQVAKIIHQKLAQKCKLLAQPLQPYYNYSPEISIENNKYKIYYDRAIFTDKTIHFNRPDITFLDKENKIAYLIDIAVPNSHNLQSTIAEKLSKYNDLKGEVVRMWRLRKAIVVPIVISTTGIIPINLKHSLDTLDLPFYTRTILQKAVILNTCRIVRKFLQDNS

SEQ ID NO: 26043 - protein, 1420 aa, Erynnis tages
MRLRNRDIPQAGTGAHCTGESGPEPTNSGCPTYSGGGNVSRLTAQLTTAAAENNSSSSSPSSSRNFIQSSSPISSTQSLFNSPSSSPQSYQAHSSSSSRSTTTSPLSFKSRLLEDAVQEVDVIESVPTTSRIFKRNKWSKDMNEYILRTYLQLTKLESDNTPCLPLLHTKFLNKFPQMQVSRQRIGDQRRAIVRNKLISQQDIDRIYQEVKEQLQLTSHTPEYTHTEYTHTKATGQRMKWGNELNEAIMRSYYRVTKLETDMTMYRVNLHQDFVSRFPHLAHISVQRIADQRRVITNNKRVPEERLNIIRQEIAIEINMPQMNTTKDKTCKINENAITDTQIQQQCHTNTTSYNNRITLNTNYPENDDSEMHNSQSINDIDARCFNDNTVTNETEINLDIENTFQDALNYYINTDPTERHYIPKQKPSRKFGKIVHYINKTIIPKHVNTDTDFKTLQTIIYCAAWTAAKSNGAKINVPPKQSSNNKILVRKPKWMIRLEKKVEDLRKKIGRLTQFMRGNRSPKLQQQINMITKQYKIHSIHEAPNTKNNHFLDTLKQKLTVASSRLRRYKTCTLRKTQNKQFITNEKQFYRSLKTTGTNQINTSCKSHIQPTTSPSMQEIHKYWVSKWQDPVSHNNEAEWIKNEKLKSNLLTDMDFENISEETFKSTIDKLQNWKAPGSDYIQNYWYKKFTTLHTYLIDHINKFIRNPSLLPEYITAGITYLIPKDHRDYQNPGKYRPITCLQTIYKIITSCLAQCIYKHLDNNSIIAEEQKGCRKLSQGCKEQLTIDSVIMKQVEKYKKNLYTMYIDYQKAYDSVPHSWLLEVLHIYKIHPQIISFLKNTMLKWVTRLKLTIENEIVHNTDTIKIQRGIFQGDTLSPLWFCLALNPLSNILNSTNSGYVLQYEEKDNLLITTQQRIINHLLYMDDIKLYANTQDNLNNLANITEKFSQDICMQFGIDKCKTNSVVAGQLYKHSYEMQNGEMIDSIEESGAYKYLGYHQSKLIHHKEIKCTLTKQFKQRINHILKSELNARNVTKAINSFAVPVLTYSFGVINWTKIELKNLQRLINTSMTKHRKHHPRSCVQRMTLPRTEGGRGFIDIANLHNKQIKNLRNFFHTKSNTSTLHKAISHNDEKCTPLNLKDKNIQKNEVETDSQSKILEWARKSLHGRHHHDLCQPNVDKNASNEWLKFGQLFPETEGFIIAIQDQVIETRNYQKYVMKLSIPTDMCRRCHCSSETIQHITGACKSIAQTDYKHRHDQVAKIIHQKLAQKCKLLAQPLQPYYNYSPEISIENNKYKIYYDRAIFTDKTIHFNRPDITFLDKENKIAYLIDIAVPNSHNLQSTIAEKLSKYNDLKGEVVRMWRLRKAIVVPIVISTTGIIPINLKHSLDTLDLPFYTRTILQKAVILNTCRIVRKFLQDNS

SEQ ID NO: 26044 - protein, 1231 aa, Nicephellus nicephorus
MSMNTNKTKHKHKYNLRSLSRAQQNIDRTWSVRTKKEAMERQAVTEYEPENTDNVGTLSSTLSASDSCSLDTSPFPSPLSSSLSMDSIVLENVVQETSVVSEPVPITSKTFKRIKWSKYMNEYILRTYLELTKLETLNIPYLSILHDRFLIKFPQMQVSRQRVGDQRRAIIRNKLISQQDIDRIHEEVKEKLQLENTHASASVIRQPVTVAKRMRWDNELNEAIIRSYFRVTKLETDLTMYRASLHKDIMTKYPHLAHISIQRIADQRRVIINNRMISEERISVIKQEIAAEIGMTHTDNIREHVNHPLEIENCEINNSTHLHENMETNDTNNTNTLDLSTNIEINLEIENTFQETLNYYIDTSPTERNYIPKQKPSKRFSKIVHYINVHVLPKYVNVDTDYKTLQTVIYCAAWTAAKRNGTRITIPPRENSQQNILKHKPKWMIRLERKVEDLRIKIGRLTQFTLGNRSNRLQRQVNIIMQQYKVHTIHEEPNTQIAHFLDTLKQKLIVISSRLKRYKACTLRKTQNKQFISNEKQFYRSFNNVDNNKTNNFNTTPHTLSTANKLHRFWTTIWENPTIHNANADWIKKEVLSNEPKQDMMFEQISIQTFNTAINKLQNWKAPGSDYIHNYWYKVFTYIHPYILNHINNFIKNPHLVPEYITAGITFMIPKDSDHQDPSKYRPITCLQTIYKIITSCLAQCIYEHIDSKQILAKEQKGCKKLSQGCKEQLIIDSVIMKQVQQKRKDLYTMYIDYQKAYDSVPHSWLLQVLNLYKIHPAIISFLKTVMSNWSTQIRLTASNDTIETNNIRIQRGIFQGDALSPLWFCLALNPLSNILNSTNIGYTLQYLDNEDDIQEKTLNHLLYMDDIKLYANTQDDLNKLAHLTETFSQDICMEFGVDKCKVNSVVAGQLHKHSYQLQTGEQIDPLDGNEAYKYLGYHQSKCLHHKEIKASLTKQFKYRINSILKSELNAKNITKAVNTFAIPIMTYSFGIINWTQSDLKSLQRIINTSLTKHRKHHPKSCVQRITLPRSEGGRGFIDITNLHNKQIKNLRTFFHLNAPTSILHKAITQNDKKCTPLNLHSNQPQKNEVQVDRHTKIAEWSRKSLHGRHRQDLCQPNVDKIASNEWLRCGQLFPETEGFIIAIQDQVIETRNYQKYIMKITIPTDMCRRCHSSSETIQHITGACKAIVQTDYKYRHDQVAKIIHQKLAQKHDLLDKPIKPYYDYILIEPY

SEQ ID NO: 26045 - protein, 1354 aa, Epargyreus clarus
MSMNKNKIKHKYNLRSLSYTNTQRNIETHIDEREPGDMEDIVSLSPTLSSRKSWSINTSPVSSSQSSLLSNSSMLLEDVVQETGLVTDPAPIPSKTFKRNKWSIDMNEYILRTYLELTKLETLKTPYLPILHEKFLAKFPQMQVSRQRIGDQRRAILRNKLISQQDIDRIHREVEETLRLGNSQTSTSVVCPLVTSGKRMKWDNELNEAIIRSYFKVTKLETNMTMYRTTLHQDFISTFPHLSHISIQRIADQRRVIINNRLISEERISEIKREIAAEIEFTPNDTVGHYENISAQFENDNFEIDTRIHSHDNEATNIFIQTNDNNVSNNIETDIEIENTFQETLKYYTNTNPTERNYIPKQKPSRRLSKIVHYINTILLPKYLKVDNDFKTLQTIIYCAAWTAAKINGARIHIPPRENSYLNSSKHKPKWMTRLERRVTDLRIKIGRLTQYTLGNRSNKLQKQVSKIIEQYKIHTIHEEPNSQISHFLDTLKQKLVVISSRLKRYKACTLRKTQNKQFISNEKQFYRSLKNTSTTQANKTNIPTHTLSTANELHKFWSTIWENPSTHNDKAEWIKKEEYHKASMPEMIFQKISVDTLKTSINKLQNWKAPGSDFIHNFWYKAFTYIHPYLLTHINNFIENPNLVPEYITAGITYMLPKDNDHQNPANYRPITCLQTIYKIITSCLAQCIYEHIDRNQILAEEQKGCRKRSQGCKEQLTIDSVIMKQVQHKKKDLYTMYIDYQKAFDSVPHSWLIQVLNLYKVHPLITNFLKFIMSNWFTRLRLTSSNNTIDTDCIRIRRGIFQGDALSPLWFCLALNPLSNILKSTDTGYILHYSDNEDNVVSVPQEKEKVLNHLLYMDDIKLYANTQDELNNLAYLTEMFSKDICMQFGVDKCKVNSIVAGKLHKHSYQMQTGEQIDSIDEENAYKYLGYYQSKYLHNKEIKTTLTKQFKHRVTSILKSELNAINITKAINTFAIPILTYSFGIISWTQTELKNLQRIINTSLTKHRKHHPRSCVQRMTLPRIEGGRGFVDIVNLHNKQIQNLRTFFHTHATTSILHKAITQNDKKLTPLNLYNIEPQKNEVQVDRQSKILEWTRKSLHGRHRQDLCLPNVDKVASNEWLRRGQLFPETEGFIIAIQDQVIETRNYQKHIMKTPIPTDICRRCHSSSETIQHITGACKEIVQTDYKYRHDQVAKIIHQKLAQKYDLLTQPIKPYYDYNPEIVLENKRYKMYFDRAILTDKTIHYNRPDICILDKHNKTGYLIDIAVPNSHNLQSTIAEKLSKYTELKDEITRMWQLRKAVVVPIVISTTGVVPVNLKLSLQTLDLPLYISSNLQKAIILNTCRIVRKFLQVE

SEQ ID NO: 26046 - protein, 1367 aa, Cephise aelius
MKMNIENKKHKYNLRSLSRAQQNTGNAWSVRKQKEAEEKQDTAENEPENTDDVESLSPTLCSSKSWSKNSSPISSRQSSSLSINSLMLENVVQEAAQATEPVPITSKVFKRIKWSKDMNEYIMRTYLELTKLGTLNIPYLPKLHERFLTKFPQIQVSRQRLGDQRRAIIRNKFISQEDIDRIHKEVNENLQLRKTQTNTSEVIKSGTVGKRMRWNDELNEAIIRSYFRVTKLEKDMTMYRTSLHQDFIATFPHLEHISVQRIADQRRVIINNKMISEERISLIKQEIAAEIQVTDINTLTQHVNISTPIETENSIVDNSIHLYDNIDINNSNDINTNNLVPELEIDTEIENIFQETLNYYANTNPTNRNYIPKQRLSKRFNKIVHYINTRIIPKHVNTDTDYKTLQTVIYCAAWTAAKRNGARITIPPVERLQQNILKYKPKWMIRLERKVEDLRVKIGRLTQFTLGNRSSKLQKQVNIIIEQYKIHTIHEEPNTQIAHFLDTLKQKLTLISSRLKRYKACTLRKTQNRQFISNEKQFYRSLKNAGTSQTSVPIDALAGANDLHRFWSKIWDNPSSHNGNAHWIEKEVDNNVSTQEMIFQKVSVETFKTVINKLQNWKAPGSDHIHNFWYKAFTYIHPYLLDHINRFIENPNLVPEYITTGITYLIPKNSDHQNPSNYRPITCLQTIYKIITSCLAQCIYKHIDSNHILAEEQKGCRKLSQGCKEQLTIDSVIMKQVQRNKKDLYTMYIDYQKAYDSVPHSWLLHVLKLYKIHPTIIIFLKTLMGNWFTLLRLPISNNTIETGTIKIQRGIFQGDALSPLWFCLALNPLSTMLNSTNIGYQLNYFENGDDSLQTTKQTRLNHLLYMDDIKLYANTRNDLNKLAYLTEIFSQDICMQFCVDKCKVNCIVAGQIHKHSYKMQTGAQIDPLDENQAYKYLGYNQSKYLHHKEIKVSLTKQFKHRVNLILKSKLNAINTTKAVNTFAIPILTYSFGIISWTQSELKSLQRIINTSLTKHRKHHPRSCIQRVTLPRSEGGRGFIDVTNLHNKQIKNLRTFFHKNVSISILHKAIAQNDKKFTPLNLHDDKSQKNEILTDRQTKILEWTRKSLHGRHHQELCKPNVDKTTSNEWLKNGQLFPETEGFITAIQDQVIETRNYQKYIMKTSIPTDLCRRCHSTSETIQHITGACKAIVQTDYKYRHDQVAKIIHQKLAQKYHLIVQPIKPYYNYHPEIVLESNRYKLYFDRAILTDKTIHYNRPDITVLDKNNKTCYLIDIAVPNSHNLQTTITEKLSKYTELKDEITRMWKLKKAMVIPIVISSTGVVPSNLKLSLKTLDLPLNTANYLQKSIILNTCRLVRKFLQIENDGDNS

SEQ ID NO: 26047 - protein, 1358 aa, Astraptes hopfferi
MSMNINKIKHKYNLRSSSRVQRNTDTIEDELENIDGTVTNMWSLSPTLSSSKSCSITSPFSSIQSSSISNNSLLLEDVVQETVLVTDSAPISSKTFKRNKWSKDMNEFILRTYLELTKLETLNTPYLQILHDSFLKQFPQMQVSRQRIGDQRRAILRNKLISQHDIDRIHKEVKESLQLGNTHTSTSVINSLETIGKRMRWNNELNEAIIRSYFKVTKLETDMTMYRTTLHQDFITTFPHLSHISIQRIADQRRVIINNRLISEERMSELRQEIAAEIEMTHIDNVEQCENRSSPQETRNFHIDTRIHSHSNEDNNYLNQPSNITTSNDNDVNIELENTFRETLQYYTDTDPTKRHFIPKQKPSKRLSKIIYYINNFLIPKHINADTDFEKFQTLVYCAAWTAAKRNGAKISIPPKEYTHSNTLKHRPKWMLRLERKVADLRVKIGRLTQYSLGNRSNKLQAQVNIIIKQYKVHTIHEEPNTQIAHFIDTLKQKLGVISSRLKRYKACTLRKTQNQQFVSNEKQFYRSLKGAGSSQTNKSNTSTHTLSTANEIHRFWSKLWENPSVHNNNAEWIKKEELKKLTTPEMIFEEISIETLKSVINKLQNWKAPGSDYIHNFWYKAFHYIHPYLLTHINNFIKNPHLVPEYITSGITYMLPKDSDNQNPANYRPITCLQTMYKIITSCLAQYIYEHIDSNQILAQEQKGCRKRSQGCKEQLIIDSVIMKQVQHKKKDLYTMYIDYQKAYDSVPHSWLIQVLNLYKVNPTIVNFLNSIMSNWITRLRLTTTSNMIETDIIRIRRGIFQGDALSPLWFCLALNPLSNILNSTNTGYLLQYSDSEDDLVTVPQQQVLNHLLYMDDIKLYANTQDDLNNLAYLTENFSQDICMQFGVDKCKVNSVVAGKLHKHSYQMRTGEQIDSLDEENAYKYLGYYQSKYLHHKEIKTTLTKNFKNRIASILKSELNSINITKAVNTFAIPILTYSFGVIRWTKSELINLQRIINTSLTKHRKHHPRSCIQRMTLPRNEGGRGFIDIGNLHNKQIKNLRTFFHSNTTTSSLHKAIVQNDKTFTPLNLCNKKSQKNEIQVDRQSKILEWTRKSLHGRHRQDLCLPNVDKIASNDWLKRGVLFPETEGFMIAIQDQVIETRNYQKHIMKIAIPTDICRRCHSSPETIQHITGACKAIVQTDYKYRHDQVAKIIHQKLAQKYDLLTEPCKPYYDYSPEVVLENKRYKLYFDRAILTDKTIHYNRPDITILDKHNKTSYLIDIAVPNSHNLQNTIAEKLSKYTELKDEITRMWQLRKAVVVPIVISTTGIIPTNLKLSLKTLDLPLHISTNLQKAIILNTCRIVRKFLQIEKDTATNI

SEQ ID NO: 26048 - protein, 1360 aa, Urbanus velinus
MRLRSGYKLPQAGTGANRKGESRPEHSNSGCPTYSGGDTGSQTSAQSNTAADHHHDLESVVSFPAIPSTNPCSFSPTGPTTIDKNVEDEVSSSPTLSSSKSCSISSPASFTESSLISNNSMLLEGVVQETVLVTKSAPISSKTFTRNKWSKDMNEYILRTYLEITKLETLNTPYLQILHHNFLTKFPHMQVSRQRVGDQRRAILRNKLIPQHDVDRIHKEVKESLQLGNTQISTSAINSLDIVGKRMRWNNELNEAIIRSYYKVTKLETDMTMYRTNLHQDFITTFPHLSHISTQRIADQRRVIINNRLISEERISIIKQEVAAEIEITHNDIVEHHDNIDATRETSNFNTDSSIHTHSNEDTNFPNQTSTVATDIEVNLELEHMFGETLQYYTDTDPLKRHFIPKQKSSKKFKKIIHYINTSLIPKYVTADTDFKSLQTIIYCAAWTAAKSNGARISIPPKEKSYLYATKFKPKWMLRLERKVTDLRAKIGRLSQFSLGNRSNKLQAQVNLIIKQYKTHTIHEEPNTQIAHFIDTLKQKLVVISSRLKRYKACTLRKTQNNQFISNEKQFYRTLKNAGNSQTNTPTHTLCTANELHRFWSTLWENPSVHNNNAEWIKKEELNKMSTPEMIFREISIDTLKTTINKLQNWKAPGSDYIHNFWYKAFTYIHPYILTHINNFIKNPNLVPEYITSGITYMLPKNGDNQNPANFRPITCLQTIYKIITSCLTQYIYEHIDSNRILAEEQKGCRKRSQGCKEQLIIDSVIMKQVQRKKQDLYTMYIDYQKAYDSVPHSWLIHVLNLYKVNPIIVNFLNSVMSNWLTRLRLTTSNNTIETETIRIRRGIFQGDALSPLWFCLALNPLSNILNSTNTGHILQYCDSEEDLVTGTQQQVLNHLLYMDDIKLYANTHDDLNNLAFLTEIFSQDICMQFGIDKCKINSVVAGKLHKHSYQLQTGEQIDSLDEEKAYKYLGYYQSKYLHHKEIKTTLSKNFKHRVISILKSELNAKNITKAVNTFAIPILTYSFGIISWTKSDLINLQRIINTSLTKHRKHHPRSCVQRMTLPRIEGGRGFIDIGNLHNKQIKNLRTFFHNNAISSILHKAIVQNDKKFTPLNLCSYQSQKNEVQVDRQSKILEWTRKSLHGRHRQDLCLPNVDKVASNEWLRRGALFPETEGFLMAIQDQVVETRNYQKHIMKIPIPTDMCRRCHSSPETIQHITGACKAIVQTDYKYRHDQVAKIIHQKLAQKYDLLTQPIKPYYDYNPEVVLENKKYKLYYDRAILTDKTIHYNRPDITVLDKHNKTSYLIDIAVPNSHNLQNTIAEKLSKYTELKDEITRMWQLRKAIVVPIVISTTGIIPTHLKL

SEQ ID NO: 26049 - protein, 1406 aa, Urbanus proteus
MRLRSGYKLPQAGTGANRNGESRPEPSNSGCPTYSGGDTGSQTSAQSNTAADYHHCLESVVSFPAISATNPCSFSPTSPPTTDKNVEDRVSSSPTLSSSKSCSISSPASSTKSSLIFNNSMLLEGVVQETVLVNESAPISSKTFKRNKWSNDMNEYILRTYLEVTKLETLNTPYLQILHDKFLTKFPHMQVSRQRVGDQRRAILRNKLIPQHDVDRIHKEVKESLQLGNTQISTSAVNSLDIVGKRMRWNNELNEAIIRSYYKVTKLETDMTMYRTNLHQDFITTFPHLSHISAQRIADQRRVIINNRLISEERISIIKQEVAADIEITHNDIVEHHDNIDATRETNNLNTDFSIHLHSNEETNYPNQTITAETSSDIEVNLELEHTFRETLQYYMDTDPLKRHFIPKQKSSKKFRKIIHYINTSLIPKHVTADTDFKSLQTIIYCAAWTAAKINGARISIPPKENSYLNATKLKPKWMLRLERKVTDLRAKIGRLTQFELGNRSNKLQTQVNLIIKQYKIHTIHEEPNTQIAHFIDTLKQKLVVISSRLKRYKACTLRKTQNNQFILNEKQFYRTLKNTGNSQTNKSNTSTHTLCTANELHRFWSTLWEKPSFHNNSAEWIKKEELNKMSTPEMIFREISIDTFKTIINKLQNWKAPGSDYIHNFWYKAFTYIHPHILTHINNFIKNPNLVPEYITSGITYMLPKNGDNQNPANFRPITCLQTIYKIITSCLTQYIYEHIDSNNILAEEQKGCRKRSQGCKEQLIIDSVIMKQVQHKKKDLYTMYIDYQKAYDSVPHSWLIHVLNLYKVNPIIVNFLNSVMSNWLTRLRLTTANNTIETETIRIRRGIFQGDALSPLWFCLALNPLSNILNSTNTGNILQYCDSEEDLVTGTQQQVINHLLYMDDIKLYANTHDDLNNLAFLTEIFSQDICMQFGIDKCKINSVVAGKLHKHSYQLQTGEQIDSLDEDKAYKYLGYYQSKYLHHKEIKTTLSKNFKHRVISILKSELNAINITKAVNTFAIPILTYSFGIISWTKSDLINLQRIINTSLTKHRKHHPRSCVQRMTLPRIEGGRGFIDIGNLHNKQIKNLRTFFHNNAISSTLHKAIVQNDKKFTPLNLCSYQSQKNEVQVDRQTKMLEWTRKSLHGRHRQDLCLPNVDKVASNEWLRRGVLFPETEGFLMAIQDQVVETRNYQKHIMKIPIPTDMCRRCHSSPETIQHITGACKAIVQTDYKYRHDQVAKIIHQKLAQKYDLLTQPIKPYYDYNPEIVLENKKYKLYFDRAILTDKTIHYNRPDITVLDKHNKTSYLIDIAVPNSHNLQNTIAEKLAKYTELKDEITRMWQLRKAIVVPIVISTTGIIPTHLKLSLKTLDLPLHITHTLQKAIILNTCRVVRKFLQIEKDTLPHI

SEQ ID NO: 26050 - protein, 1174 aa, Urbanus evona
MSTSAINSLDIVGKRMRWNNELNEAIIRSYFKVTKLETDMTMYRTNLHQDFITTFPHLSHISTQRIADQRRVIINNRLISEDRIYMIKQEVAAEIEMTHNDIVERHDNVDATHETNNFNTDTSIHIHSNEDTNNPNQPNTAATSNDTEVNLELENTFRETLQYYMDTDPIKRHFIPKQKPSKNFRKIIHYINTSLIPKYVNAETDFKSLQTIIYCAAWTAAKRNGARISIPPKENSYLNTTKLKPRWMLRLERKVTDLRAKIGRLTQFSLGNRSNKLQTQVNQIMKQYRTHTIHEEPNTQIAHFIDTLKQKLVVISSRLKRYKACTLRKTQNNQFISNEKQFYRALKDGTSQTNKSNTPTHTFCTANELHRFWSTLWENPSVHNNTAEWIKKEELNKMSTPEMIFQEISIDTLKTVINKLQNWKAPGSDYIHNFWYKAFTYIHPYILTHINNFIKSPNLVPEYITSGITYMLPKDGDNQNPANFRPITCLQTMYKIITSCLAQYIYEHIDNNQILAEEQKGCRKRSQGCKEQLIIDSVIMRQVQQKKKDLYTMYIDYQKAYDSVPHSWLIHVLNLYKVHPIIVNFLNSIMSNWLTRLRLTTLNNTIETDTIRIRRGIFQGDALSPLWFCLALNPLSNILNSTNTGYLLQYCDTEDDLVSGSQQQVLNHLLYMDDIKLYANTHDDLNNLAFLTEIFSQDICMQFGIDKCKINSVMAGKLHKHSYQLQTGEQIDSLDEEKAYKYLGYYQSKYLHHKEIKTTLSKNFKHRVVSILKSELNARNTTKAVNTFAIPILTYSFGIISWTRSDLINLQRIINTSLTKHRKHHPRSCVQRMTLPRIEGGRGFIDIGNLHNKQIKNLRTFFHNNATSSILHKAIVQNDKKFTPLNLCSYISQKNEVQVDRQSKILDWTRKSLHGRHRQDLCLPNVDKVASNEWLRRGVLFPETEGFLIAIQDQVVETRNYQKHIMKIPISTDMCRRCHSSPETIQHITGACKAIVQTDYKYRHDQVAKIIHQNLAQKYDLLTQPIKPYYDYNPEVVLENKRYKLYFDRAILTDKTIHYNRPDITVLDKHNKISYIIDIAVPNSHNLQNTIAEKLSKYTELKDEITRMWQLKKAIVVPIVISTTGIIPTHLKLSLKTLDLPLHIIHNLQKAIILNTCRVVRKFLQIDKDTVNNS

SEQ ID NO: 26051 - protein, 1354 aa, Telegonus anausis
MSMNKNKIKHKYNLRSSSRTQRNTDTIENEPENIDDIGSLSPTLSSSKSCSIPSPISSIQSSLISNNSLLLEDVVQETVLVTDSAPISSKTFKRNKWSKDMNEFILRTYLELTKLETLNTPYLQILHDNFLKQFPHMQVSRQRIGDQRRAILRNKLISQYDIDRIHKEVKESLQLGKTHPSTSVISSLETVGKRMRWNNELNEAIIRSYFKVTKLETDMTMYRTTLHQDFIATFPHLSHISIQRIADQRRVIINNRLISEERIYELKQEIAAEIEMTHTDNIEQCENSCSPQETHNLQIDTRIHTHSNEDTNNFDQPSSATTSNDNDINIELENTFRETLQYYTDTDPTKRHFIPKQKPSKRLSKIIYYINNVLIPKHINADIDFKKFQTIIYCAAWTAAKRNGAKISIPPKEYTHSNTLKLRPKWMLRLERKVADLRVKIGRLTQYSLGNRSNKLQTQVNIIIKQYKIHTIHEEPNTQIAHFLDTLKQKLGVISSRLKRYKACTLRKTQNQQFISNEKQFYRSLKGAGTSQTNKSNTSTHTLSTANEIHKFWSKLWENPSIHNNNAVWIKKEEFNKLTTPEMVFEKISIETLKSVINKLQNWKAPGSDYIHNFWYKAFTYLHPYLLTHINSFIKNPHLVPEYITSGITYMLPKDSDHQNPANYRPITCLQTMYKIITSCLAQYIYEHIDSNQILADEQKGCRKRSQGCKEQLIIDSIIMNQVQKKKKDLYTMYIDYQKAYDSVPHSWLIQVLNLYKVNPIIVNFLNSIMSNWLTRLRLSTSNNMIETDIIRIRRGIFQGDALSPLWFCLALNPLSNILNSTNTGYLLQYSDSEDDLLTVPQQQVLNHLLYMDDIKLYANTQDDLNNLAYLTEIFSQDICMQFGVDKCKVNSVVAGKLHKHSYKMKTGEQIDSLDEDNAYKYLGYYQSKYLHHKEIKTTLTKTFKNRIASILKSELNSINITKAVNTFAIPILTYSFGIIRWTKSELINLQRIINTTLTKHRKHHPRSCVQRMTLPRNEGGRGFIDIGNLHNKQIKNLRTFFHNNATTSNLHKALVQNDKTFTPLNLYNKKSQKNEIQVDRQSKILEWTRKSLHGRYRQDLCLPNVDKIASNEWLKRGVLFPETEGFMIAIQDQVIETRNYQKYIMKIAIPTDICRRCHSSPETIQHITGACKAIVQTDYKYRHDQVAKIIHQKLAQKYDLLTQPSKPYYDYSPEVVLENKRYKLYFDRAILTDKTIHYNRPDITILDKHNKTSYLIDIAVPNSHNLQNTIAEKLSKYTELKDEITRMWQLRKAVIVPIVISTTGIIPTNLKLSLKTLDLPLHISTNLQKAIILNTCRIVRKFLQIECDTVTNI

SEQ ID NO: 26052 - protein, 1353 aa, Quadrus cerialis
MTAQSRTVVVNIQSSPENADPPSSPASTTRSLFRSPSSSPRSYHLSNPSSRSTSITPSPTSLNNMLLEDVVRETNEVTKPVPISSKIFKRNKWTEDMNKHILRTYLQLTKMETDDSIRYLPILHSKFLEKFPQMVVSRQRIGDQRRAIIRNRLISKQDIDSIYREVKDQLSNETVNKNLDTQTLTVGQRMKWSNDLNESIMRSYYRVTKLETDMTLYRTNMHQEFINTFPHLAHISIQRIADQRRIIINNKKISDERLNDIKLEIAIEIGMPHDNTTEANDLSEADENVNAITRSKRNDNVDINSRNISCVNNNIFSTSHIDNNTVNILNDESITCQIDNTFQESFSYYHGINPTERDFIPKQKPSKKFSKIVHYINTILIPKHVTINTDFGTLQAIIYCAAWTAAKINGAKITIPSTGNSNRRTPIKKPKWMIRLEKKIENLRIKIGRLTQYIAGNRRFKLTQQIFTILKQYKIHTVHEDPNTDLTHFLDTLKQKLAVASSRLKRYKACTLRKTQNKQFNINEKQFYRSLNTVDDNVQTNTTLQTDTPSAKELHYYWATLWENPIRHNNEPEWVKNETFQNNALPEMVFETISQQTFKDTLNKLQNWKAPGSDNIHNYWYKKFTNTHSNLLDHINNFIQNPHLIPKYITAGVTYMIPKTNDLKNPGKYRPITCLQTVYKIITSCLAHYIYKHVDTNKILAEEQKGSRKLSQGCKEQLIIDSVIMKQVQQKRKDLHTMYIDYQKAYDSVPHSWLLQILQIYKIHPQIINFLQNVMLNWYTQIKLITQNNTIETQTIKIQRGIFQGDTLSPLWFCLALNPLSNILNSSKSGYTLEHFNNEDQFKTKQDKTINHLLYMDDIKLYANSEKDLNELAKLTEQFSRDICMQFGIDKCKINSVIAGKLHIHSYQIHTGEHITSLGENETYKYLGYNQSQYIHHKEAKLTLTNQFKQRISRIFKSALDSKNTTKAINTFAIPVLTYSFGIIHWTKTELKNLQRTINTCMTRHRKHHPRSCVQRVTLPRIEGGRGFLDITNLHNRQIKNLRNFFHNKSSSSILHRAVTQNDIKLTPLNLHSVEEQGNETEIDTQSKIRDWTQKSLHGRHRHDLCQSHVDKRASNEWLKYGQLFPETEGFIIAIQDQVIETRNYQKHIIKMAIPTDMCRRCHSSSETIQHITGACKSIAQTDYKHRHDQVAKIIHQKLAQKCNLIAQPNKPYYEYSPHIILENNKYKLYFDRAILTDKTVHFNRPDLTFLDKGNKIAYLIDIAVPNSHNLQSTTSEKLSKYNELKDEIVRMWHLKQAIVVPIVISTTGIVPNSLKQSLKTLDLPLNTRITIQKSVILNTCRIVRKFLQHTML

SEQ ID NO: 26053 - protein, 1385 aa, Urbanus evona
MRLRSGYKLPQAGTGANRNGESRPEPSNSGCPTYSGGDTVSQNSAQSNAAADYHHDSESVVTFPSVPYTNPYSYSPTSSTIIDKNVEEIGSSSPTLSSSKSYSISSPASSTESSLLSNNNILLEGVVQKTVLVTESAPISSKTFRRNKWSKDMNEYILRTYLELTKLETLNIPYLPTLHDKFLAKFPHIQVSRQRIGDQRRAIVRNKLISQQDIDRINKEVKEYLQIGVAHQNISAINPLITVGQRMRWSNELNEAIIRSYFKVTKLETDMTMYRTNLHQDFIATFPHLAHISIQRIADQRRVIINNRLISEERIAVIKQEIAAEIEIIETVDVGHREVDTETHLHNNEDTNSFNETNTINLITSIEINHEIEDTFQDTLKYYTNTHPTERNYIPKQKTSKKLSKIVHYINTRVLPEHLNADTDYKTLQTIMYCAAWTAAKINGARITIPPKDNSRSNTQKYKPKWMIRLERKVADLRIKIGRLTQFTLGNRSNKLQKQVNMIIEQYKIHTIHEEPNTQIAHFLDTLKQKLVVISSRLKRYKACTLRKTQNKQFNLNEKQFYRSLKNAGSSQANKTQEPALPTANELHRFWSSIWENPAVHNDNAEWIVKEESNNTSTPEMIFQNISIETFKIAINKLQNWKAPGSDYIHNFWYKAFTYTHAYLLDHINNFIKNPNLVPEYFTVGITYMLPKDSDQQNPANYRPITCLQTIYKIITSCLAQYIYDHIDNNQILTEEQKGCRKRSQGCKEQLIIDSVIMKQVQNKKRDLYTMYIDYQKAYDSVPHSWLIKVLNLYKVNPLIINFLKSIMSNWLTRLTLTTSNNTIETDYIRIQRGIFQGDALSPLWFCLALNPLSNFLNSTNTGYILQYTDSEDDLSNAPHQQVLNHLLYMDDIKLYANTQDDLNNLAYLTETFSQDICMQFGVDKCKVNSVVTGKLHKHSYQMQTGEQIDSLDDEKGYKYLGYYQSKCLHHKEIKSTLTKSFKHRINSILKSQLNAINITKSVNTFAIPILTYSFGIISWTQSELKSLQRTIHTSLTKHRKHHPRSCVQRITLPRIEGGRGFIDIVNLHNKQITNLRTFFHNNATSSILHKAIVQNDKKLTPLNLSSNASQKNEVQIDRQSKILEWTRKSLHGRHRQDLCLPNVDKVASNEWLRYGQLFPETEGFIIAIQDQVIETRNYQKHIMKIPIPSDMCRRCHSSPETIQHITGACKAIVQTDYKYRHDQVAKIIHQKLAQKYNLLTQSPKPYYDYNPDIVLENKRYKLYFDRAILTDKTIHYNRPDITILDKDNKMGYLIDIAVPNSHNLQSTIAEKLSKYTELKDEITRMWQLKKAIVVPIVISTTGIIPTNLKCSLKTLDLPLHISSYLQKAIILNTCRIVRKFLQIE

SEQ ID NO: 26054 - protein, 1286 aa, Urbanus proteus
MLLEDVVQDTVLVTRSAPIPSKTFKRNKWSKDMNEYILRTYLELTKLDTLNIPYLPILHDKFLAKFPHMQVSRQRIGDQRRAIVRNKLISQQDIDRINKEVKENLEAGVAHKNISAISPIMTVGKRMRWDNELNEAIIRSYFKVTKLETDMTMYRTNLHQDFITIFPHLAHISIQRVADQRRVIINNRLISEERISVIKQEIAAEIDIIQTVDVEHRRNVNVPLENNNANIHVDTETHLHNNEDTNIFNEANTINLSTSSEINHAIEDTFRDTLKYYTNTHATERNYIPKQKTSKKFSKIVHYINTRVIPEYLNADTDYKTLQTIMYCAAWTAAKINGARITIPPKDNSPSNTLKHKPRWMIRLERKVADLRIKIGRLTQFTLGNRSNKLQKQVNMIIEQYKIHTIHEEPNSQIAHFLDTLKQKLVVISSRLKRYKACTLRKTQNKQFNLNEKQFYRSLKNAGSSQANKTQAPSLPTANELHRFWSSIWENPAVHNDNSEWIIMEESNNTSTPEMTFQNISMETFKTTINKLQNWKAPGSDYIHNFWYKTFTSTHTYLLDHINNFIKNPHLVPKYFTVGITYMLPKDNDQQNPANYRPITCLQTIYKIITSCLAQYIYDHIDSNQILTEEQKGCRKRSQGCKEQLIVDSVIMKQVQNKKKNLYTMYIDYQKAYDSVPHSWLIKVLKLYKVNPLIINFLKSIMSHWLTRLTLTTPNNKIETDSIRIQRGIFQGDALSPLWFCLALNPLSNFLNSTNIGYILQYTDSIDDLSNAPHQQVLNHLLYMDDIKLYANTQDDLNKLAYLTEIFSHDICMQFGVDKCKVNSVVAGKLHKHSYQMQTGEQIDSLDDEKGYKYLGYYQSKCLHHKEIKVTLTKNFKHRITSILKSQLNAINITKAINTFAIPILTYSFGIISWTQSELKRLQRTIHTSLTKQRKHHPRSCVQRITLPRIEGGRGFIDIVNLHNKQVKNLRTFFHNYATSSSLHKAIAQNDKKLTPLNLANNASQKNEVQVDRQSKILQWTRKSLHGRHRQDLCLPNVDKVASNEWLRRGQLFPETEGFIIAIQDQVIETRNYQKHIMKIPIPTDICRRCHSSPETIQHITGACKAIVQTDYKYRHDQVAKIIHQNLAQKYNLLTQPLKPYYDYNPDIVLENKRYKLYFDRAILTDKTIHYNRPDITILDKENKVGYLIDIAVPNSHNLQSTIAEKLSKYTELKEEITRMWQLKKASVVPIVISTTGIIPTHLKCSLKTHDLSLYISSNLQKAIILNTCRIVRNFLQIDKDTTDIN

SEQ ID NO: 26055 - protein, 1368 aa, Autochton zarex
MTNGALVLTKYAMRLRSRQIPQAGTREGESRPGPSGSGCPAYSGGGTASHRTAQTRAVVVHNSPINSHKSPSTSSLVTSPQSSLSSDNSMLEDVVQETVLVTEPVPTSSKTLKRNKWSKEMNELILRTYLEVTKLETINTSYLPILHETFVSKFPHMQVSRQRIGDQRRAILRNKLISQQDIDRIHKEVKESLQLGNTRTSISDISSFEITGKRMRWNNELNEAVIRSYFKVTKLETDMTTYRTTLHQDFITTFPHLSHISVQRIADQRRVIINNRLISEERIFAIRQEIAAEIEMTLTDTVEHHDNIRTPLETDNLDINTRTHLHSNEDTNNFNHPSTINTSNDSEINLEIENTFLETLKYYTDIYPTDRNFIPKQKPSKRFREIIHYINTVVLPNYVNAETDFKSLQTVIYCAAWTAAKTNGARISIPPRETSHVNTFKHKPKWMIRLERKVTDLRTKIGRLTQFILGNRSNKLQKEVNIIIQQYKIHTIHEEPNNQISHFLDTLKQKLVVISSRLKRYKACTLRKTQNKQFITNEKQFYRSLKDTNTSQVNKSHTSKHSLVQANEAHKFWSTLWENPCTHNNTAEWIKNEEFKQKSTPEMIFQKISEETLISVINKLQNWKAPGTDYIHNFWYKAFTYIHPYLLAHINIFIENPHLVPDYITAGITYMLPKSNEHQNPANFRPITCLQTVYKIMTSCLAQYIYEHIETNQILAEEQKGCRKRSQGCKEQLIIDSVIMRQVQYKKKDLYTMYIDYQKAYDSVPHSWLLQVLKLYKVHPIIVNFLKSIMSNWLTRLRLKTENNMIETDNIRIRRGIFQGDALSPLWFCLALNPLSNILNSTHIGYQLQYSEDENDLLFASQQQVLNHLLYMDDIKLYANTQDDLNNLANLTEIFSQDICMQFGIDKCKVNSVMAGKLHKHSYQMRTGEKIDSLNEATAYKYLGFYQSKYLHHKEIKTILTKNFKHRVVSILKSELNAINITRAVNTFAIPILTYSFGIISWNQSDLKNLQRMLHTSLTKHRKHHPRSCVQRVTLPRTEGGRAFIDIVNLHNKQIKSLRTFFHNNSSTSILHKAIIQNDKKFTPLNLYNTQSQKNEIQADRHSKILEWTRKSLHGRHRQDLCLSNVDKVASNEWLRRGRLFPETEGFLIAIQDQVIETRNYQKYIMKKAISTDMCRRCHSASETIQHITGACKAIVQSDYKHRHDQVAKIIHQKLAQKYDLLTQPNKPYYDYNPEVVLENKRYKLYFDRAILTDKTIHYNRPDITVLDKHNKISYLIDIAVPNSHNLQNTIAEKLSKYTDLKDEITRMWQLRKAIVVPIVISTTGIIPINLKMSLKTLDLPVHIISNLQKAIILNTCRIVRNFLQIEN

SEQ ID NO: 26056 - protein, 1367 aa, Autochton longipennis
MTNGALEFTKYAMRLRSRQLPQAGTQLGESRPGPSSSGCPTYSGGGNASHRTTQTCTVVVHNSSIDTHESSSISPLGSSSHSSLISNNSVLEDVVQETVVVTEPVPISSKKRNKWTKEMNEHILRTYLQLTQLETLNTPYLSVLHEMFLSKFPHMQVSRQRIGDQRRAIMRNKLISQQDIDRIQKEIKESLQLGNTHTNTSGITSCETIGKRMRWNNELNEAIIRSYFKVTKLETDMTTYRTTLHQEFITTFPHLSHISVQRIADQRRVIINNKLISEERISAIKQEIAAEIEVTLTDTTIENHENIRTPLEIDNCHIDTVIYSRSNEDISSFNHPSTVKSSNDIVINLEIENTFLETLKHYTDIYPTHRNFIPKQKPSKKFREIIHYINTVVIPNYVNAETDYKSLQTIIYCAAWTAAKSNGARISIPPKETSHLNSLKHKPKWMIRLERKVTDLRIKIGRLTQFTLGNRSNKLQKQVNTIIEQYKIHTIHEEPNNEISHFLDTLKQRLVVISSRLKRYKACTLRKTQNEKFISNEKQFYRSLKGASTSQATKSHTEKHTLPAVNEIHQFWSTLWENPSTHNSTAEWIKNEEYQRKSTPEMSFQKISEETLKTVINKLQNWKATGSDYIHNFWYKAFTYIHPYLLAHINNFIENPHLVPEYITAGITYMLPKSNEHQNPANFRPITCLQTVYKIMTSCLTHYIYDHIENNQILAEEQKGCRKRSQGCKEQLIIDSVILKQVQHKKIDLYTMYIDYQKAYDSIPHSWLLQVLDLYKIHPIIVNFLKSVMSNWFTRLRLKTENNMIETENIRIRRGIFQGDALSPLWFCLALNPLSNILNSTNTGYHLQYSENENDLFFASQQHVLNHLLYMDDIKLYANTQDDLNNLANLTEIFSQDICMQFGVDKCKVNSIVAGNLHKHSYQMRTGEKIDSLDEATVYKYLGFYQSKHLHHKEIKTILTKSFKHRIVSLLKSELNSINMTRAVNTFAIPILTYSFGIISWNQSDLKNLQRIIHTSLTKYRKHHPRSCVQRVTLPRIEGGRAFIDIVNLHNKQIKNLRTFFHTNSTTSILHKAIMQNDKRFTPLNLYNTQSQKNEVQVDRQNKILEWTRKSLHGRHRQDLCLPNVDKFASNEWLRRGQLFPETEGFLIAIQDQIIETRNYQKHIMKKAIPTDKCRRCHSSSETIQHITGACKAIVQTDYKHRHDQVAKIIHQKLAHKHDLLTQPNKPYYDYNPEVVLENKRYKLYFDRAILTDKTIHYNRPDITLLDKHNKTCYLIDIAVPNSHNLQSTIAEKLSKYSDLKDEVTRMWQLRKAIVVPIVISTTGIIPTNLKLSLKTLDLPLHISSNLQKAIILNTCRIVRKFLQIEN

SEQ ID NO: 26057 - protein, 1376 aa, Typhedanus ampyx
MRGSAEVDSLDPLLKPVAPLVGPSMNMNNTNKITYNLRSLSRAQQDTSDAWSLRMLNKKTMQNAEQSEKTLTKGPTPALTTSKSSSINVSQFNASQSLTVKMLGHVVQETTVVNDPVPITSKTLKRNKWSKDMNEYILRTYLELTKLETEDIPYLHTIHEIFLVKFPEMQVSRQRIGDQRRAIIRNKLIPQSDIDRIYEEVKTQLQSRRTQISLEDNRDTMTSQKRMKWNNELNEAIIRSYYRVTRLETDMTMYRNSMHQDFVTTFPHMAHISIQRIADQRRAIMNNRMVSDKRMCEIKQEIAAEIQMIHNNGNSDNTENHNLETDANVNMCSDVNTDDINNSNIVSLSTETDQYVDLGNTFQEALNYYINSRPTERDYIPKQKSSKKFMKIVSYINTTILPKYININTDFNTLQTIIYCAAWTAARKNGANITIPPKEKNDQTKLKSKPKWMIRLEKKVEDLRMKIGRLTQYIRGNRSNKLLRQVHIISTQYKIHSIHEEHNSQLPHFLDTLKQKLLVISSRLKRYKICTLRKTQNKQFNCNEKQFYRNLKNSDIRTNSSNTPTAQEFREFWSKIWENPINHNTNADWIKYEEAKNQSTQEMIFQDISAETFESTIKKLQNWKAPGSDYIHNFWYKSFTNIHSHLLKHINNFIKHPHLVPDYFTTGTTYMIPKNSDCQTPEKYRPITCLQTIYKIVTSCLAQCLYEHIYKNNILAEEQKGCRKLSQGCKEQLIIDSVIMKQVQYKKKDLYTMYIDYQKAYDSVPHSWLLQVLHLYKVNPLIISFLKTMMLKWSTRLALITSNDITQTNNIRIQRGIFQGDALSPLWFCLALNPLSNILNSTHTGYPLPYSNNDNEILKDTRQKLLNHLLYMDDIKLFATTQDNLERLAYLTETFSKDIGMQFGIDKCKVNSVIAGKFYKHSYQIHTGEQIESLEENTTYKYLGYHQSNCLHHKEIKTTLTKQFQHRINLVLKSELNAKNITKAVNTFAIPILTYSFGIINWTQTELKSLQRKINTSLTKHRKHHPRSCVQRVTLPRDEGGRGFIDIGNLHNNQIINLRNFFHCNADISTLHKAIAQNDLKYTPLNLHDKKQQKNEVQIDRQCKILEWTQKVLHGRHRQDLCLPNVDKKMSNEWLRLGQLFPETEGFIIAIQDQVIETRNYQKYIMKLSLPTDACRRCNSSSETIQHITGACKTIAQTDYKYRHDQVAKIIHQKLAQKYNLITKPAKRYYEYNPDIVLESNKHKLYYDRAILTDKTIHYNRPDITLLDKENKIGYIIDIAVPNSHNLQNTIAEKLTKYTDLKDEMARMWQLRKVKIVPIVISTTGVVPTNLKQSLKTLDLPPHISIHLQKAVILNTCRIVRKFLQTDLDTTNCNMR

SEQ ID NO: 26058 - protein, 1356 aa, Cecropterus takuta
MPIRPSMRVNKIKHKYNLRSSSKAQRDTYAGINEDESGNVDDIGSLSPTLSTSKSCSLSSLISSPQSSSISNNSMLEDVVQETGTVTEPAPMSSKTSKTFKRNKWSKDMNEHILRTYFEVTKLETVNTPFLPVLHEIFLSKFPHMQVSRQRIGDQRRAILRNKLISQNDIDRIYKEVKESLQLGNTHTSTPRVSPVKTIGKRMRWSNELNEAIIRSYFKVTKLETDMTMYRTTLHQNFITTFPHLSHISVQRIADQRRVIINNKLISEERFSAIKQEVAAEIEMSLTDTVEHHDNICTSLETDNFDIDTRTHLRSNEDTNYSNHPSIVNSSNDTEINVEIENTFLETLKYYIDTYPTDRNFIPKQKPSKRLSKIIHYINSFVIPKYVNAETDFKSLQTIIYCAAWTAAKRNGARISIPPRETLHVNTLKHKPKWMIRLERKVTDLRIKIGRLTQFTLGNRSDKLQKQVNVIIKQYKIHTIHEEPNKQISHFLDTLKQKLVVISSRLKRYKACTLRKTQNKQFILNEKQLYRSFKDSNTSQSNKSNTPEHTLPAANELHKFWSTLWENPSIHNNTAEWIKKEELNQMSKPEMIFQKISEVTLKTVITKLQNWKAPGSDYIHNFWYKAFTYTHPYLLAHINNFIENPHLVPEYITAGITYMLPKSNEHQNPANFRPITCLQTIYKIMTSCLAQYIYEHIETNQILAEEQKGCRKRSQGCKEQLIIDSVIMKQVQYKKKDLFTMYIDYQKAYDSVPHSWLLQVLKLYKVHPIIVNFLKSLMMNWFTRLRLKTENNTIETDNIRIRRGIFQGDALSPLWFCLALNPLSNILNSTKTGYHLQYSENENDLLFAPQQHVLNHLLYMDDIKLYANTQNDLNNLANLTEKFSQDICMQFGVDKCKVNAVVAGKLHKHTYEMRTGEKIDSLDEATAYKYLGFYQSKYLHHKEIKTILTKNFKHRIVSVLKSELNSINITKAVNTFAIPILTYSFGIISWNQSDLKKLQRTINTSLSKYRKHHPRSCVQRITLPRIEGGRAFIDIVNLHNKQIKNLRTFFHNISTASILHKAIMQNDKKFTPLNLYNNQAQKNEVQVDTQSKIMEWTRKSLHGRHRQDLCLPNVDKVASNEWLRRGQLFPETEGFLIAIQDQVIETRNYQKHIMKISIPTDVCRRCQSSSETIQHITGACKAIVQTDYKHRHDQVAKIIHQKLAQKYDLLTQPIKPYYDYNPEVVLENKRYKLYFDRAILTDKTIHYNRPDITILDKHNKTSYLIDIAVPNSHNLQSTIAEKLSKYTDLKDEITRMWQLRKAIVVPIVISTTGIIPTNLKLSLKTLDLPLHIISNLQKAIILNTCRIVRKFLQTEN

SEQ ID NO: 26059 - protein, 1407 aa, Chiomara georgina
MRLRNRVIPQAGTSPNGEEESGPGPSSSGCPTYSGGGNVSHLTAQLPSAVAVSSSSTSSSPSSSSQNIVIQSSSPLSSTHSLFNTPSSSPRSYQSHSSLSQSSCSSKMLGDVVQEVNLTRPVPTTSKIFKRNKWSKDMNEYILRTYLELTKMETDNSPCLPSLHTKFLNKFPQMQVSRQRIGDQRRAIIRNKLIPQQDIDRIYQEVKQQLQFPTEVLQSTQMDTAGQRMKWGNDLNEAIMRSYYRVTKLETDMTMYRVNLHQDFISKFPHLAHISVQRIADQRRVIVNSRRISEVRLNVIRQEVSTELNLTHKGINSNKSNETLENVGTRSNSPLHSNENTPYDNRNTLNTECLENGHEPNSHFLNNIDITCLHDTNTRTNDSEINIEIENIFQDSLTYYINTNPTERHFIPRQKPSRKFFKIVDYINKRVLPKHVNTDTDFKTLQTVIYCAAWTAAKSNGAKITLPPNQVSNKSRFLQKPKWMIRLEKKVEDLRQKIGRLTQYLHGNRSLKLEHQVNIITKQYKIHSVHEEPNNQLTHFLDTLKQKLTVVSSRLKRYKTCTLRKTQNKQFTTNEKQFYRFLRSKSTNDINIPNSNTQFKNLPSEQELHEFWASKWENSVSHNKNAEWINDERLKHNSLSDMVFENISEQIFKNALDKLQNWKAPGSDYIQNFWYKKFTALHPHLIYHINKFISNPSLVPNYITEGITYLVPKDDNDFVNPGKYRPITCLQTIYKIITSCLAQCIYKHIDNNGILAEEQKGCRKMSQGCKEQLTIDSVIMKQVQKYKKNLFTMYIDYQKAYDSVPHSWLLEVLHIYKIHPQIIKFLEISMQKWATRLKLTISNETVCDVDTIKIQRGIFQGDSLSPLLFCLALNPLSNILNSTHVGYVLEYEHQGNQLITPYQEILNHLLYMDDIKLYANSEDTLNILASLTEQFSQDICMQFGIDKCKINSVIAGKVHTHSYEIQTGEQIHSLGENDAYKYLGYYQSKHIHHKEIKDSLSKQFKHRINLILKTELNARNVTKAINSFAVPILTYSFGIISWTKTEIKNLQRLLNTSMTKYRKHHPRACVQRTTLPRTEGGRGFIDISNLHSRQIKNLRNFFHNKSTTSTLHKAITYNDKKYTPLNLNDLEIQSNEIENDNKNKIVEWSRKTLHGRHYHDLCQPNVDKNASNEWLKFGQLFPETEGFIIAIQDQVIETRNYQKYIMKIHIPTDMCRRCHTSSETIQHITGACKSIAQTDYKYRHDQVAKIIHQKIVQKCKLLRRPPKPYYNYDPEIILENSRFKLYYDRAILTDKTIHFNRPDITFLDKDNRIAYIIDIAVPNSHNLQSTISEKLSKYTELKDEIVRMWHLKKAIVVPIVISTTGIIPTHLKQSLKILDLPDNTHIALQKAVILNTCRIVRKFLQDT

SEQ ID NO: 26060 - protein, 1349 aa, Cycloglypha thrasibulus
MQSSSPISSTHSLFNTPSSSPQSYQTQPFSSRSTTISPLSHSNTLLEDVVQKVSLTRPVPTTSKIFKRNKWSKDMNEYILRTYLELTKIETDNTPYLPLLHSKFLNKFPHMQVSRQRVGDQRRAIIRNKLISLQDIDRIYQEVKDHLHFTIHTPEYTQTDTSTQRMKWGNDLNEALMRSYYRVTRLETDMTMYRVNLHRDFISTFPHLAHISVQRISDQRRIIINNKRISEERLNMIRQEVATEIELPLINTTSKEAYDVRNNATTESRNFLHNNTDKITHDNVNSFNVKHTENDALDMQNTQLLSNIDANCLNDTNTHARTNELEIHFEIENIFHDSFNFYINTNPIERHFIPRQKPSRKLSKIVQYINNTILPKHVNNETDFKTLQTIIYCAAWTAAKSNGAKISLPPKQIVNRNISPRKPKWMIRLENKVEDLRKKIGRLTQYLLGNRSLKLENEVNNITKQYKIHSIHEEPNTKITQFLDTLKQKLIVVSSRLKRYKTCTLRKTQNKQFTSNEKQFYRFLKSTGSNEVNASKNTQFNTLPSEQELHRFWASKWENPVNHNEKSEWINNEKLKYNLLTDMVFENISEHEFKCTVDELKNWKAPGLDYIQNYWYKKFTTLHPHLLNYVNKFISNPTLMPEYITAGITYLIPKDSNDYKNPGKYRPITCLQTIYKIITSCLAKCIYKHIDNNFILAEEQKGCRKMSQGCKEQLTIDSVIMQQVQKYKKNLYTMYIDYQKAYDSVPHSWLLEILHIYKIHPQIINFLQDTMQRWVTRLKLTIGNKTVCDVNTIKIQRGIFQGDTLSPLLFCLALNPLSNILNSTQTGYALEYENMDNHLTTTHLKIVNHLLYMDDIKLYANTQDDLNNLASLSEQFSKDICMQFGVDKCKINSVVAGQVHKHSYEMQTGEQINSIEENGAYKYLGYYQSKYLHHKEIKTTLTKQFKHRLNLILKTELNSRNITKAINSFAVPILTYSFGVISWTKTEIKNLQRLVNTSMTKHRKHHPRSCIQRMTLPRIEGGRGLIDISNLHNRQVKNLRNFFHNRSTSSTLHKAISHNDDKHTPLNLKNQEQQRNEIEIDNKSKTLEWSRKSLHGRHHHDLCQTNVDKNASNEWLKFGQLFPETEGFIIAIQDQVIETRNYQKYIMKLTIPTDTCRRCHSSSETIQHITGACKSIVQTDYKHRHDQVAKIIHQKLAQKCKLLTQPSKPYYNYNPEIILENSRYKLYYDRAILTDKTIHFNRPDITFLDKDNKVAYIIDIAVPNTHNLQNTISEKLSKYTDLKDEIIRMWHLKKATVVPIVISTTGIIPNNLKQSLNTLDLPLHTRLSLQKAIILNTCRIVRKFLQDTC

SEQ ID NO: 26061 - protein, 1404 aa, Potamanaxas melicertes
MRLRNREIPQAGTRKGESSPGPSSSGSPTYSGGGNVSHLTAQLPSAVAAQNSNSPSSSSSPRILIHSSSPTSSTHSLFNTPSSSTQSYQSQPSSSRSTSISPLSCNIRLLGDVVQEVNVTRPVPITSKIFKRNKWSNDMNEYILRTYLELTKMETDNTPCLPKLHTKFLDKFPHMQVSRQRVGDQRRAIVRNKLISQQNMDRIYQEVKDQLELITPTQEYTQIVTAGQRMKWGNELNEAIMRSYYRVTKLGTDMTMYRVNLHQDFISTFPHLSHISIQRTADQRRVILNNKRISEERLNEIKQEIAKEINMPQINVTSIDSYRIIENTITDTQRLTETNIDTAPYDNRNTERPEANNLDTQHIRSLHNIDTQCLHDTITDTDGTEKNFVLENMFQDTFDYFIDTNPTERHFIPKQKPSRRFGKIVQYINKSILPKYVNTDIDFKTLQTVIYCAAWTAAKSNGAKITIPPKQIPHKNSFLRKPKWMIRLEKKVEDLRRKIGRLTQYLHGNRSVKLQHEVRTITKHYKIHSIHEEPNTQITHFLDTLKQKLTVVSSRLKRYKTCTLRKTQNKQYTSNEKQFYRSLRTTGTNKINTSNSHTQPNTLPSVQELHEFWASKWENSVIHNNKADWINNEKLKGNLLQDMIFENISEQIFKSTIDKLQNWKAPGSDYIHNYWYKKLTTLHPYLLDHINKFISNPNLVPEYIMAGITYLIPKDNNNYQNPSKYRPITCLQTIYKIITSCLAQSIYKHIEFNSIIAEEQKGCRKMSQGCKEQLTIDSVIMKQVQKYKKNLYSMYIDYQKAYDSVPHSWLLEVLHIYKIHPQIIRFLQNSMLKWVTKLKLTVGNETVCDTETIKIQRGIFQGDTLSPLWFCLALNPLSNILNSTQTGYVLDYEETHKQQRIINHLLYMDDIKLYANDQDQLNNLANLSEQFSQDICMQFGVDKCKINAVVAGQLHNHSYEMQTGEQIDSIEENGAYKYLGYYQSKHIHHKEIKCTLTKQFKHRINNILKTELNARNITKAVNSFAIPILTYSFGIISWTKTELKNLQRLLNTSMTKYRKHHPRSCVQRMTLPRVEGGRGFIDINNLHNRQIKNLRNFFHNRSTTSALHRAISYNDDKSTPLNLKNNEIQSNEIEIDSKSKILEWSRKSLHGRHRHDLCQPNVDKNASNEWLKFGQLFPETEGFIMAIQDQVIETRNYQKFIMKTPIPTDMCRRCHSSSETIQHITGACKSIAQTDYKHRHDQVAKIIHQKLVQKCNLLAQPLKPYYSYNPDVVLENNRYKLYYDRAILTDKTIHFNRPDITFLDKESKIAYIIDIAVPNSHNLQSTISEKLSKYTELKDEIVRMWQLRKAIVVPIVLSTTGIIPINLKQSLNILDLPHYTRISLQKATILNTCRIVRKFLQDTC

SEQ ID NO: 26062 - protein, 1273 aa, Chiomara georgina
MNEYILRTYLELTKMETDNTPCLPLLHTKFMDKFPHMKVSRQRIGDQRRAILRNKLISQQDIDRIYQEVKDQLQLSTHMSYTNTEYLQTLTTGQRMKWGNELNEAIMRSYYRVTKLETDMTSYRVNLHKDFILTFPHLAHISIQRIADQRRIILNNKRISDERLNAIKQEIATELNMPVTSNNNNSICESAVTNTPIVNDINTPSYDNRNISNTEHPVNDDLVIQHTQSLMNINTTCLSDTVTITQEREVNLEIDNIFLETFNYYINTEPTERHVIPKQKPSRKFSKIVHYINKTILPKHINENTNFETLLTVTYCAAWTAAASNGAKISIPPKHLVNKNNFLRKPKWMNRLEKKVEDLRKKIGRLTQYLNGVRSSKLENQINIIKKQHKIHSIHEEPNTHIKHFLDTLKQKLTVVSSRLKRYKKCTLRKTQNKQFTTNEKQFYRSLKFTGTNQINTLSSNTQSNTLPPMQEIHEYWASKWENPVCHNDKSEWIYNEKLKNNSLTDMVFENISEDVFRNTLDKLHNWKAPGPDFIHNYWYKKFTTLHPYLINYINKFINDPSLIPDYVTTGITYLIPKDSHDLQSAGKYRPITCLQTIYKIITSCLAQCIYKHIDNNNILAEEQKGCRKMSQGCKEQLVIDSVILNQVQKYKKNLYTMYIDYQKAYDSVPHSWLLEILHIYKIHPQIISFLRMTMTKWVTRLKLTIGSETVCDTEAIKIQRGIFQGDILSPFLFCLALNPLSNILNSTDTGYVLNYENKDGQLITTQQKTINHLLYMDDIKLYANTQDNLNNLANLTEQFSQDICMQFGVDKCKINSVVKGQLHMHTYEMITGEQIHSIEDNGSYKYLGYCQSKHIHHKETKLTLTKQFKHRINNILKTELNGRNVTKAVNSFAIPILTYSFGIISWTKTETKNLQRLINTSMTKHRKHHPRSCIQRMTLARAEGGRGFIDINNLHNRQIKNLRNFFHNKSTTSNLHKAISHNDDKLTPLNLKNPETQSNEVEIDNKSKILEWSRKSLHGRYYHDLCQPNVDKNASNEWLKFGQLFPETEGFIIAIQDQVIETRNYQKYIMKLPIPTDMCRRCHSSPETIQHITGACKSIAQTDYKYRHDQVAKIIHQKLALKCNLLTQPHKPYYNYNPDVILENNRYKLYYDRAILTDKTIHFNRPDITFLDRTTKVAYIIDIAVPNSHNLQSTISEKLSKYSELKDEMVRMWHLKKAIIVPIVISTTGIIPVNLKQSLNLLDLPLHTRFSLQKAIILNTCRIVRKFLQDTC

SEQ ID NO: 26063 - protein, 1409 aa, Sostrata bifasciata
MRLRNREIPQAGTPLSSEGESGPGPLNSGSPTYSGGGNVSHLTAQLPSAAAAQNSSSSSRIFIHSSSPISSTHSLFNTPSSSPQSYQALPSSSRSTSISPLSCCSNLLGDVVQEVNVTRPVPTTSRIFKRNKWSNDMNEYILRTYLELTKMETDNTPCLPLLHTKFLNKFPHMQVSRQRVGDQRRAIIRNKLISQQDIDRIYQEVKDQIQLTTPTQEHTQIVTTGQRMKWGNELNEAIMRCYYRVTKLETDMTMYRVNLHQDFISTFPHLAHISIQRTADQRRIILNNRRISEERLNEIKQEVAKEINMPQINIQSNDYYESLENTITDTDRLTRTNLDTTSYDNRNTTNTERYEVDDLEMQHVHSLYNIDTQCLSDNVIGTLGVEINFELENMFQNTFDYFINTNPTERHYIPKQKPSRKFSKLVNYINKTLLPKHVNKDTDFKTLQTIIYCAAWTAAKSNGAKITIPPKSSLNNKFSRKPKWMIRLEKKVEDLRKKIGRLTQYLHGNRSLKLQHEVNIITKQYKIHSIHEEPNTQITHFLDTLKQKLTVVSSRLKRYKTCTLRKTQNKQFTSNEKQFYRFLKTTRTDQINTCNSSHTQSNTLPSVQEIHEFWASKWENPVSHNNKAEWINNEKLKGNLLKDMVFENVSEQIFKNTIDKLQNWKAPGSDYIHNYWYKKLTTLHPYLINHINKFISNPSLVPEYITTGITYLLPKDDNDYKNPSKYRPITCLQTIYKIITSCLAQCIYKHIENNNIVAEEQKGCRKMSQGCKEQLTIDSVIMKQVQKYRKNLYTMYVDYQKAYDSVPHSWLLEILHIYKIHPQIISFLQNTMLKWVTNLNLTIGNEIICDSDAIKIQRGIFQGDTLSPLWFCLALNPLSNILNSTHIGYLLEYKETADLLTKQQRTINHLLYMDDIKLYANNQDNLNILATLLEQFSQDICMQFGVDKCKINSVVGGQLHKHSYEMQTGEQIDSIEENGAYKYLGYYQSKYIHHKEIKFTLTKQFKRRINNILKTELNARNITKAINSFAVPLLTYSFGVISWTKTELKNLQRLVNTSMTKYRKHHPRSCVQRMTLPRAEGGRGFIDISNLHNRQIKNLRHFFHNRSTTSILHKAISYNDDKCTPLNLKEEQTQSNEIETDNKSKIVEWSRKSLHGRHRHDLCQPNVDKSASNEWLKFGQLFPETEGFIIAIQDQVIETRNYQKYIMKIPIPTDMCRRCHSSSETIQHITGACKSIAQTDYKYRHDQVAKIIHQKLAQKCNLLVQPPKPYYTYNPDVILENNRYKLYYDRAILTDKTIHFNRPDITFLDKETKIAYIIDIAVPNSHNLQNTISEKLSKYTELKEEIVRMWHLRKAIVVPIVISTTGIVPISLKQSLNILDLPLHTRISLQKAVILNTCRVVRKFLQDTV

SEQ ID NO: 26064 - protein, 1185 aa, Ebrietas anacreon
MKWGNDLNEAIMRSYYRVTRLETDMTMYRVHLHRDFIATFPHLSHVSVQRIADQRRTIINNKRISEERLNMIRQEIATEIDLPHINTTSKESYDVHHSRVKLDSHTLMHSNTETIKYNYGNSFNDERPANDVLDIQNTHLLNNIDTNCLNDTNAHAQTNEVEINFEVENTFHDSFNFYINTNPIERHFIPRQKPSRKLSKIVQYINNTILPKHVNTDTDFKTLQTIIYCAAWTAAKSNGAKIFLPPKQILNQNISPRKPKWMVRLENKVEDLRKKIGRLTQYQHGNRSLQLEKQVNFITKQYKIHSIHEEPNTKITQFLDTLKQKLIVVSSRLRRYKTCTLRKKQNKEFTSNEKQFYRLLKSTSFNQVNASYNTQCNTLPSEQELHEFWAAKWESPVSHNNKSEWINNEKLKHNLVTDMIFENISEHEFKSTVDKLQNWKAPGLDYIQNYWYKKFTTLHPHLVNYINKFITNPNLMPEYITAGITYLIPKDDNDYKNPGKYRPITCLQTIYKIITSCLAKCIYKHIDNNCILAEEQKGCRKMSRGCKEQLTIDAVIMQQVQKYKKDLYTMYIDYQKAYDSVPHSWLLEILHIYKIHPQIINFLQDTMQKWVTRLKLTIGNKTVCDVDSIKIQRGIFQGDSLSPLLFCLALNPLSNILNLTHTGYALEYEKINNQLTTTHPKIVNHLLYMDDIKLYANTQDDLNNLANLSEQFSQDICMQFGVDKCKINSVVSGQLHKHSYEMQTGEQINSLEENGAYKYLGYYQSKYIHHKEIKCALTKQFKHRVNLILKTELNGRNITKAINSFAVPILTYSFGVISWTKTEIKNLQRLVNTSMTKHRKHHPRSCIQRMTLPRTEGGRGFIDISNLHNRQIKNLRNFFHNMSTTSTLHKAISHNDDRYTPLNLKNQEHQNNEKEIENKSKILEWSRKSLHGRHHHDLCQPNVDKYASNEWLKFGQLFPETEGFIMAIQDQVIETRNYQKYIMKLPISTDTCRRCHSSSETIQHITGACKSIAQTDYKHRHDQVAKIIHQKLAQKCNLLTQPPKPYYNYNPEIILENNRYKLYYDRAILTDKTIHFNRPDITFLDKDTKVAYIIDIAVPNSHNLQNTISEKLSKYTELKDEIIRTWHLKKATVVPIVISTTGIVPNNLKQSLSTLDLPLHTRLSLQKAIILNTCRIVRKFLQDTC

SEQ ID NO: 26065 - protein, 1251 aa, Phanerotoma sp.
MSNHNTMNREVHSFGSDIPPEHCLVPQNELNHATGRDSTSRDRELNCRNLPYMGNHPVGNSTNQIEDISRESNYLFPSNGSSILLSNSTSNTNTTSLNTSSRSPGSQRITHTLPHNSQPNNTNTTTSTAFACPNCTRSFASLRGLGVHRKSAHPLIVNSEIDITKKKERWDDEDLRRLCLVESAIDSVRNINEILKVQVMPTRTIESIKYIRSTKKYQELLKTTRETKISAHGSNSASITSDTPMPVTTNSDKKLRWTNQEMLRYAVEEVKASPNRRDINEYLFKTVRIRTQTALSSVRRRPAYKTIIEDLKQKIRNGVDISSLINNQVPLQPDPEESPSAAVNVRLQPSPAQLETRLTDDIAPTACPSATSTSRHDTSMPDNRNVAEPVPCLEPYRRDFILSAKRVLLASSEHGPLQNAIIQLEKELDPIPALTVWIKQRLPEPQANPRQPVEIHHELLSRKKRKKSEYAYVQKLWSRNMSKAAKHVLDGASSNLPQPSLVDQERFWRPIFEDRGSGAPIPLVEPETIHNNLLQPITLAEVEERRPNTKTASGPDGLSAKIWIKTIPDNIKVLIFNIMLYSGHVPDEWRHSRTILIPKVEGSMDPANFRPISISSVVLRHFHRIIAARLMKVSLFGEKQRGFVNADGISENATVLAAVIDDAWQKLNQLHVATLDVKKAFDTVSHLSIKSVLLNKGVPNHLVQYITNVYKEAYTVLEVKNSRSKPIRPGQGVRQGDPLSSVLFNTVMDEIIKAIPSSVGYSFDGSVVNALAFADDLVMIASTRLGLQESMDKVASEMRVHGLAPAPNKCHCMSLVPAGHVQKLKVVEDQLFQIEGEPIDQLKLGETWKHLGVRFSVKGPVKPTCDVDGYLQKITEAPLKPQQRLKILRTFLIPRYLHLLTFSPNTYEVLRKMDKNVRKYVRKWTRLPQDVPIAFFHAPIKEGGLGVFSFSTGIPDLTSRRLNGLRNSEFPPAKSASISNYAARRRKWCNLTPKINWAKKLHNSVDGWALRHCHDEPASYAWVEDPYVRITAREWIQFVRLRANALPSRMRTTRGLRRAQQNVQCRAGCRATETSAHIVQNCFRSHGGRILRHNAVASKTAEVLVSKNYEVIQEPMIRTSEGNRKPDIIAVREDGAHIIDIQVVSGHTDLKNTNNNKINYYKKNSDLTDYVSRKWAIPPALIKVSAITLTWYGIWCRESASYLRSLGVSKAAMTAMTTRTMRGSHINFNRFNKMTSMAYHNLWPSRFKDRT

SEQ ID NO: 26066 - protein, 1191 aa, Philotrypesis tridentata
MEEPPQKNIVENNQFVILLPVRDEEVLQCCLCNGVGAFRGGTKIENLIRHIKRNHVGYNHSFRCWQCGFIAPNTARYPRKVVAQHCGDCVPAVPRRPAGLANGERRREIRAELNLPPGVRRGQQQQPIAPEAQQQPEPPQPSPSPSPGPVLARRTRGRVLVSSSSEEGTPRRQVHDLPSLRELRDLPGSPSRSPDVSDGSEDLFASPVGSNPEAQSLVHQNELGAGPEEMHQQQQQQQPPQQQQQEQQQRRAQQQPPRQNMSERQRELVEALEAINDPEGFEEIVVRVQEYMGRLKAGERAGGEGRAGRRNPRRPDRVGRVHEATRLQRLFRNNRKRAVQEVLAGANKLCQIGNDEIHHHFQTIAAPRDGEQVWPNVFDLPPPTPGSDEQLTRPFTCGEVGGNLWGRANTAPGPDGLTYKDLARADRGAHVLTALFNAVYRLKTAPKAWAESTTVLLYKKGDPNDIGNWRPIAMGNTDGKLFASLMADRIKTWASINGRFSREQKGFLQFEGCFEHNFMVQDAIREARDKGRDTLVAWLDLANAFGSVPHSSIRRALVLHQIPVQTIDTIMSLYANMNTKIKTAQGFTPPIRIEAGVRQGCPLSPDIFNLVMEVLIREIKASGRGGNIRGTSVTSFAYADDLALLSNTTQDMGNLLAAADRAARAVGIAFNAAKCASLHVRNKEVINTQIRIGEENIRTMEAFQAYEHLGTPTGYQVRQTPVQTITELLADMQRIDSSPLAPWQKIEATSTFLLPRLDFAMQGSTMEKGYLDRADKVIRRLARAWMALPQRASAELLFIRPSQGGAGLLPLSDIYDILTVANGFKMLCSPDAMIQRVALVSLQQAVDEGMGVRSSERQLATYLSGSLQLKRHVRTSHWSKVRMATRRLAAKFPVRWVWGEESQSFLIETQNLDDEPVITGSPDKKMLVRRMRASLNEFYIKKLLAKPEQGKVIEVTSKEAISNHFLRTGGFTRFCDWRFIHRARLGILPLNGARRWDRGADKRCRKCGNNLESLPHVLNHCGVHSAAKRARHNAIQDRLVKAAHPPEGATISVDRTVPGTRGAAAAMRPDIVLKDDAHRRAVIIDVCVPFENRRIAMQEARNEKVNKYRPVASQLQEQGYTVEVEAVVVGALGGWDSRNEKSLKLLGISPYYAKMMRKLIVSDTIRWGRDIYVEHVSGVRQYRLPPPEDGR

SEQ ID NO: 26067 - protein, 926 aa, Philotrypesis tridentata
MINDPEGFEEIAVRGKEYLRRLKAVERGREDGRTGRRNPRRPDRLGRIHEATRLQRLFRNNRKRAVQEVLAGANRLCQIENEEVHHHFQSIAAPRDGEQAWPHVFNLPPPTPGSDEQLTRPFTCEEVGGNLWGRTNTAPGPDGLTYKDLVRADRGAHVLTALFNAVYRLRTPPKSWANSSTVLLYKKGDPNDIGNWRPIAMGDTDGKLFASLMADRLKIWANTNGRVSREQKGFLQFEGCFEHNFMLQDAIREARDKGRETLVAWLDLANSFGSVPHSSIRRALILHQVPLQTIDTITSLYENMTTNIKTAHGFTPPIRIEAGVRQGCPLSPDIFNLVMEVVIREIKASGRGGNIRGMNVTSFAYADDLALLSNSTQDMGNLLAAANRAVRAVGITFNAAKCASLHVRNKEVVNTQLKIGEENVRTMEAFQAYEHLGTPIGYQVRQTLIQTITELLADMQRIDSSPLAPWQKIEATSIFLLPRLDFAMQGSTMEKGYLDRADKVIKKLARSWMALPQRASAELLCIRPSQGGAGLLPLFDICDILTVANGFKMLCSPDAMVQRVALVSLQQAVDEGMGVRSSERQLATYLSGSLQLKRHVRTSHWSKVRMATRRLASKFPVRWVWGEESQGFLIETQNLDDEPVITGSPDKKMLVRRMRASLNEFYIKKLLAKPDQGKIIEVTSNQPISNHFLCTGGFTRFCDWRFIHRARLGILPLNGARLWDRGADKRCRKCGNNLESLPHVSNHCGVHTAARRARHNAIQDRLVKAAHPLEGATVSVDRTVPGTRGAAAAMRPDIVLKDDAHRRAIIIDVCVPFENRRTAMQEARNEKVNKYRPVASQLQEQGYTVEVEAVVVGALGGGGGRRWDSQNEKALKLLGISPYYAKMMRKLIVSGTIRWGRDMYVEHVSGVRQYRLPPPEDGRQQH

SEQ ID NO: 26068 - protein, 1367 aa, Apodemia zela
MRTVGDGGLSRRVPLDKMTTADGAGSSGRRASVRSHATAQQMNIEDDTESNSPYFQSGTSSDPSYHLSPTISISSMQSGSVAQETNSVIDLVPTTRKTTRRKWSSEMNKFILRTYYYLTSLETDTKSYLEPLHSKFLEKFPEMDVSRQRLGDQRRAIIRRNLLSPQTRKSIHNEVEFELRNIQNQLSELPQSHLHDSNESCTPRAQRMRWLSIHNEYIMKTYYRITQLEQDKTAYRKPLHQSFINFFPQFAHVSEQRVSDQMRVIIKNKLITTDRLQVIKQEILEELQTPHIAQEIIYNTITHTATHTIINENHSLENIDPSCLSESITNNAHPDNIEETGYDQVLEENFQQAFEYFYSSDPSNRPYIPKQKISKKLNCIVSFVNNKILPQKVNTDTDFKTLQTLTYCAAWTAAKQNGSKLNIPPKTQTENNMSRIQEYKPTWQKRLERKILNLRTKISRLTHYNKGIRSDHLNREVELIIAQYKIHSVHEENNTQISHFIDTLKQKLTVACGRLKRYNNCTLRKSQNSKFKNNERKFYREINCSSTNQTNNTYNTPDPDKLREYWANIWSNSVEHNVNASWIQTELDRNRDSPSMTYENIPISTFHDVLKGLSNWKAPGSDHIHNYWYKKLTTLHPYIYNHINNFICNPQDIPSYITVGTTYMLLKDKRDTTNASNYRPITCLQTIYKIMTACVANLIYEHLDKNRLLNEQQKGCKKWSRGCKEQITIDSIILKQVKKNKTDLYSTYIDYKKAFDSVPHSWLMVVLDIYKIHPRLICFLRQAASNWETRLQLNLPTLNIFTDPIKIQRGIFQGDALSPLWFCLALNPLSNLLNSTNSGYPLLYTDDGQITRRTNEYKLSHLLYMDDIKLYAKSQTELDDLLNITQNFSADIKMEFGLDKCKTNVTKMGQYYEYSYQLETGGVILPLNEYESYKYLGFQQSRQINQKDSIEKLTTEFKHRISTILRTQLNSLNTVKAINTYAIPVLTYSFGIINWTKSNLKNLQRQINVLMTKYRKHHPRACIQRQTLPRKEGGRGIIDINNLHNKQVSNLRQYFHTKSEESIIHKAVVQNDYKYTPLNLSDRTTQPNEVQMSNATKISEWTRKSLHGRHRSDLSQNNVDIDASNEWLTRGVLFPETEGFMVAIQDQIIETRNYQKYIVKNINSTDICRRCNSASETIQHITGACKNIVQTDYKHRHDQVANIVHQELALKYKLISLPRISYYKYSPEIVLENNTHKIYYDRAILTDRTIHYNRPDITLIDKENKTATIIDVAIPNTHNIQNTIAEKISKYTELKDEIKRIWNLRNVTIVPIVVSTTGIVPKQLHQSIHTLQIQKHIYINIQKAVILNTCRIVRKFLQTDLNGIHLA

SEQ ID NO: 26069 - protein, 1088 aa, Apodemia duryi
MEELQTSHVPEEIPHMEYLHTSTHVVMNEHYLLENIDPSCFLEPTTQNTEPDNAEGTDYDHVLENNFQQAFEYFYPTDPLNRPYIPKQKPTKKLNYTVSYINNKILPQKMNRNTDFKTLQTLIYCTAWTASKQNGSKLSIPPITQTENYRNRSQQQKPAWQKRLEGKISNLRTKISRLTHYSKGVRSDHLNRQVELILAQYKIHSTHEDKNTQLPHFIDTLKQKLMIACSRLKRYNNCTLRKLQNSKFNNNERKFYREISSSTNNQTRNLHNIPEPDQLREYWANIWSNPVEHNTSANWIRTELNRNRDSPSMAYENIPISTFDNVLKGLSNWKAPGSDHIHNYWYKKLTTLHPYIYNHINSFISNPSDMPLYITIGTTYMLSKDKHDTTNPAKYRPITCLQTIYKIITACLANLIYEHLDENNLLNEQQKGCKKFSRGCKEQITIDSIILKQVKKNKTDLYSAYIDYKKAFDSVPHSWLMAVLDIYKIHPQLICFLRQATSNWETRLLLNSPTSTILTNPIKIQRGIFQGDALSPLWFCLALNPLSNLLNSTNSGYPLKYIDNDRQIDDIRTNCHEYKLSHLLYMDDIKLYAKSQAELEGLMEITQNFSADIKMEFGIDKCKTNVTKRGQYYEYSYKLKTDEIILPLNEYESYKYLGFQQSQEINQKEALERLTIEFKHRISTILRTQLNSLNTVKAINTYAIPVLTYSFGIINWTKSKLKNLQRQINVSMTKHRKHHPKACIQRQTLPRKEGGRGIIDIINLHNKQISNLRQYFHTKSEESIMHKAVVQNDCRLTPLNLSDRVIQPNETQISNATKISEWTQKSLHGRHRSDLSQINVDINASNEWLTRGVLFPETEGFMVAIQDQIIETRNYQKHIIKKINSTDICRRCNSASETIQHITGACKTIVQTDYKHRHDQVTNIIHQEIALKYKLIALPRIPYYKYSPEIILENKTHKLYYDRAILTDKTIHHNRPDITLIDKKNKTAIIIDIAVPNTHNLQNTIAEKMSKYIDLKDEIKRMWNLRDVTIVPVVISATGVVPKQLHQSINTLQIQKYIYVHMQKAVILNTCRIVRKFLQTDLNGTHLA

SEQ ID NO: 26070 - protein, 1089 aa, Apodemia mormo
MRTYYRITQLEQDKTAYRKPLHQSFINVFPQFAHISEQRVSDQMRAIIRNNLFTTDRLQAIKQEILKELKTSHIAQETIDETITHTATHTITNENYSIENIDPSCLSEPITNNANPDNIEETDYDQELDEKFQQAFEYFRPLNRPYIPKQKTSKKLNYIVSYINNKILPQKININTDFKTLQTLTYCAAWTAAKQNGSKLSFPPKTQAENNMSRFQEYKPAWKKRLERKILNLRTKISRLTHYNKGIRSDHLNREVELILAQYKIHSVHEENNTQLSHFIDTLKQKLTIACSRLKRYNNCTLRKSQNSKFKNNERKFYREINFSSTNQTNSTYNTPVPEQLREYWANIWSNSAEHNANAGWIQTEIDRNRDKPSMTYENTPVSTFHSVLKGLSNWKAPGSDHIHNYWYKKLTTLHSHIYNHINNFISNPQDMPSYITVGTTYMLLKNKQDTTNASNYRPITCLQTIYKIMTACLANLIYEHLDQNKLLNEQQKGCKKWSRGCKEQITIDSIILKQVKKNKTDLYSAYIDYKKAFDSVPHSWLMAVLDIYKIHPRLICFLRQAASNWETRLQLNLPTSTIFTDPIKIQRGIFQGDALSPLWFCLALNPLSNLLNSTNSGYSLLYTNDDGQMNNRRTDLQEYKLSHLLYMDDIKLYAKSQAELDGLLNTTQNFSADIKMEFGIDKCRTNVTKMGQHYEYSYQLDTGAVILPLNECESYKYLGFQQSRQINQKATIEKLKTEFKHRLSTILKTQLNSVNTVKAINTYAIPVLTYSFGIINWTKSNLKNLQRQINVLMTKYRKHHPRACIQRQTLPRKEGGRGIIDINNLHNKQISNLRQYFHTKSEESIIHKAVVQNDYKYTPLNLSDRATQPNEVQISNTTKITEWTRKSLHGRHRSDLSQTNVDIDASNEWLTRGVLFPETEGFMVAIQDQIIETRNYQKHILKKINSTDTCRRCNSAPETIQHITGACKNIVQTDYKHRHDQVANIVHQELALKYNLISLPRISYYKYSPEIVLENKTHKLYYDRAILTDKTIHYNRPDITLIDKQNKTAIIIDVAIPNTHNIQSTIAEKMHKYTDLKDEIKSTYEMLQ

SEQ ID NO: 26071 - protein, 863 aa, Apodemia virgulti
MIACSRLKRYNNCTLRKFQNSKFNNNERKFYREISSSTNNQTRNLHNRPEPDQLREYWANIWSNPVEHNTSANWIRTELNRNRDSPSMAYENIPISTFDNVLKGLSNWKAPGSDHIHNYWYKKLTTLHPYIYNHINSFISNPSDMPLYITIGTTYMLPKDKHDTTNPAKYRPITCLQTIYKIITACLANLIYEHLDENNLLNEQQKGCKKFSRGCKEQITIDSIILKQVKKNKTDLYSAYIDYKKAFDSVPHSWLMAVLDIYKIHPRLICFLRQAASNWETRLQLNLPTSTIFTDPIKIQRGIFQGDALSPLWFCLALNPLSNLLNSTNSGYSLLYTNDDGQMNNRRTDLQEYKLSHLLYMDDIKLYAKSQAELDDLLNTTQNFSADIKMEFGIDKCRTNVTKMGQHYEYSYQLETGTVILPLNECESYKYLGFQQSQQINQKATIEKLKTEFKHRLSTILKTQLNSVNTVKAINTYAIPVLTYSFGIINWTKSNLKNLQRQINVLMTKYRKHHPRACIQRQTLPRKEGGRGIIDINNLHNKQISNLRQYFHTKSEESIIHKAVVQNDYKYTPLNLSDRATQPNEVQISNTTKITEWTRKSLHGRHRSDLSQTNVDIDASNEWLTRGVLFPETEGFMVAIQDQIIETRNYQKHILKKINSTDTCRRCNSAPETIQHITGACKNIVQTDYKHRHDQVANIVHQELALKYNLILLPRISYYKYSPEIVLENKTHKLYYDRAILTDKTIHYNRPDITLIDKQNKTAIIIDVAIPNTHNIQSTIAEKMHKYTDLKDEIKRIWNLRNVTIVPIVMSTTGIVPKQLHQSIHTLQIQKYIYINIQKAVILNTCRIVRKFLLTDLNGIHLA

SEQ ID NO: 26072 - protein, 1373 aa, Apodemia mormo
MRTVGDGGLSRRVPLDKMTTADGAGSSERRASEFSNATAQTISVEDDTEPNSSSFQSGTMSDDPSYHLSSTISVSSMQSGSVAQEANTVTEIVPTTRKTTRRKWSSEMNKFILRTYYYLTSLETDTKSYLEPLHSKFVETFPDVNVSRQRLGDQRRAIIRRKLLAPQTIDSIYNEVADELKNIQSQPSQSTQSDSQYSNTSYTPRNAQRMRWSSAHNECIMRAYYRITRLEQDKTAYRKPLHQSFINFFPDLTHVTEQRVSDQMRVIIKNKLITTDKLQAIRQEVMEELQTSHVSEEIPHMEYLHTSTHSVMNEHYLLENIDPSCFSEPTTQNTEPDNTEGADYDHVLENNFQQAFEYFYPTDPLNRPYIPKQKPTKKLNYTVSYINNKILPQKMNRNTDFKTLQTLIYCTAWTASKQNGSKLSIPPITQTENYRNRSQQQKPAWQKRLEGKISNLRTKISRLTHYSKGVRSDHLKRQVELILAQYKIHSTHEDKNTQLPHFIDTLKQKLMIACSRLKRYNNCTLRKLQNSKFNNNERKFYREISSSTNNQTRNLHNIPEPDQLREYWANIWSNPVEHNTSANWIRTELNRNRDSPSMAYENIPISTFDNVLKGLSNWKAPGSDHIHNYWYKKLTTLHPYIYNHINSFISNPSDMPLYITIGTTYMLPKDKHDTTNPAKYRPITCLQTIYKIITACLANLIYEHLDENNLLNEQQKGCKKFSRGCKEQITIDSIILKQVKKNKTDLYSAYIDYKKAFDSVPHSWLMAVLDIYKIHPQLICFLRQATSNWKTRLLLNSPTSTILTNPIKIQRGIFQGDALSPLWFCLALNPLSNLLNSTNSGYPLKYIDNDRQIDDIRTNCHEYKLSHLLYMDDIKLYAKSQAELEGLMEITQNFSADIKMEFGIDKCKTNVTKRGQNYEYSYKLKTDEIILPLNEYESYKYLGFQQSQEINQKEALERLTIEFKHRISTILRTQLNSLNTVKAINTYAIPVLTYSFGIINWTKSKLKNLQRQINVSMTKHRKHHPKACIQRQTLPRKEGGRGIIDIINLHNKQISNLRQYFHTKSEESIMHKAVVQNDCRLTPLNLSDRVIQPNETQISNATKISEWTQKSLHGRHRSDLSQINVDINASNEWLTRGVLFPETEGFMVAIQDQIIETRNYQKHIIKKINSTDICRRCNSASETIQHITGACKTIVQTDYKHRHDQVTNIIHQEIALKYKLIALPRIPYYKYSPEIILENKTHKLYYDRAILTDKTIHHNRPDITLIDKKNKTAIIIDIAVPNTHNLQNTIAEKMSKYIDLKDEIKRMWNLRDVTIVPVVISATGVVPKQLHQSINTLQIQKYIYVHMQKAVILNTCRIVRKFLQTDLNGTHLA

SEQ ID NO: 26073 - protein, 777 aa, Apodemia duryi
MTYENIPMSTFHSVLKGLSDWKAPGSDHIHNYWYKKLTTLHSHIYNHINNFISNPQDMPSYITVGTTYMLLKNKQDTTNVSNYRPITCLQTIYKIMTACLANLIYEHLDQNKLLNEQQKGYKKWSRGRKEQNNNRFNYYQTSEKKNKIDLYSAYIDYKKAFDSVPHSWLMAVLDIYKIHPRLICFLRQAASNWETRLQLNLPTSTIFTDPIKIQRGIFQGDALSPLWFCLALNPLSNLLNSTNSGYSLLYTNDGGQKNNRRTDLQEYKLSHLLYMDDIKIYAKSQAELDDLLNTTQNFSADIKMEFGIDKCRTNVTKMGQHYEYSYQLETGTVILPLNECESYKYLGFQQSRQINQKATIEKLKTEFKHRLSTILKTQLNSVNTVKAINTYAIPVLTYSFGIINWTKSNLKNLQRQINVLMTKYRKHHPRACIQRQTLPRKEGGRGIIDINNLHNKQISNLRQYFHTKSEESIIHKAVVQNDYKYTPLNLSDRATQPNEVQISNTTKITEWTQKSLHGRHRSDLSQTNVDIDASNEWLTRGVLFPETEGFMVAIQDQIIETRNYQKHILKKINSTDTCRRCNSAPETIQHITGACKNIVQTDYKHRHDQVANIVHQELALKYNLISLPRISYYKYSPEIVLENKTHKLYYDRAILTDKTIHYNRPDITLIDKQNKTAIIIDVAIPNTHNIQSTIAEKMHKYTDLKDEIKRIWNLRNVTIVPIVMSTTGIVPKQLHQSIHTLQIQKYIYINIQKAVILNTCRIVRKFLQTDLNGIHLA

SEQ ID NO: 26074 - protein, 960 aa, Bibasis iluska
MQCFLRTSNANSCSQNDNVVKCEYCSQPRFFNNRRGLNIHIGKAHKNILKCNINPGTSPQSELNLNSLKNLEHTLANLKSSVAIVRRIPKGARIAVATRLTSVIKKVISENSFESWEQLLTFPYIILHSKKDSQGSLTKNIKSNCTSGALTTNNLLAEKNILYSNHNLFKKVEQKISDGDLRGASSLLFSSDVVAPDSTDTLSALLERHPQSNPVSIHIGSPDAPYQGDVVQATSKDTLAAIMSFRSGSAGGLDGLSPQHLKDLVGGNIGDTSRALLDAITQLINLMLSGKVNGDIIHVLYGANLCALKKKNGGIRPIAVGCTFRRLASKICCKHISSLSDNKLEPIQLGFGSKGGCEAAAHAARTYIMTNETSTPDVLLKLDVQNAFNSIDRFAMLTQIKNYIPSTYPYLWQCYGTSTKLMYKNHTLNSSVGCQQGDPLGPAIFSYTIHPIISCLNSKFNVWYLDDGTLGGEVNKVFDDFEFLITEFHKIGLKLNFSKCELYISETKSDKDKTHIINKFQTIAPDINIIDKYSLHLLGSPIYPEAIPLAIQKHVNKFNEFSDRLLKIHSHMAMFIIRFCLFVPQFTYLLRSTPVWKFQKTLFELDSIIKQTISSVFNCYLDERAWSQASLPIRYGGLGIRKISSVALPAFLASTHSTQKLSKSILGQNYNIVFMEEAKKIWLETGPNQNFPCMQNLQKQWDEPLCKLEQKRLLDTSNNNTERARLLAVAERESGFWLQAFPSPNIGNLLDDVSINIAIRLRLGVKNTEPHRCHCGSDVDQLGHHGLSCQRSAGRMSRHASLNDIIRRALVSVNVPAILEPNGLARDDGKRPDGMTLVPWRRGRTLVWDATCVDTLAPSHLLGTSQNAGAAATEAENLKRRKYMTLNDSYIFVAFGVETLGPWGPNARQFYSEIAARLIDVSGDPRAGVFFGQRIGIAIQRGNAASVLGTIPHDSDATNI

SEQ ID NO: 26075 - protein, 1267 aa, Ips nitidus
MLKHLKECGSRDRRKCEFCEREFATFLALRCHERAAHKDLYMEQEELKAKPSEAEVFAKIAEMEANKKSNYFLNDISQALGLTKDQIRHRRAKPEYKEYLRSAREKSKPAMTLSPWVAGARKMFQVPPASDDNKRSTATKFAAPACDTKAGPSCQSIPQNQEIKTTIKPHASSQPLLEFKATIKPLVSSQPLPRTPRQSDVMAIAVSPVSMDESSNLTANEIFYTPPSVEPDIPNKRRCITSDTIAQETPKRAPTIRSELNKQQASRAPVNIISDVLIRPCLKRQRETEDDTPLPPASRPKQNTPVSVTPITVGVQSYVANGIANNNPDSSQNINVSTEATEVFTPGGTGQNVLDGPNSFIAFLQNFILDEMSKPPANRNILNIELAKFALYKPINQFQNKLTEWMDVKFKNKKGNNNNKPNNTNNKGNNNNKPNNINNVNSVNNNVQNNSTETETRAKRGQKQKPNYTRHYAQQFTGRGLRAQNYKKAQDLYASNRASLATDILAGKPLDAMEASPSAESVEVYFAKILENPSFADNEEIRDYKEPASNSELYISADEILAAKNGWNPSAPGPDGITVNTVKGFDNDELAVLFNTIYLRTCLRERWRNSRTILIHKDGDKLDPGNYRPITITSSVMRLMHRVIARRIKHNITLNMHQRGFTDADGTLANTVITQHYIRHRIESRKTYNILSLDLQKAFDSVNQGSVLRALRRLGVSDHMIQYINETFKDATTEIKVGKSTTRKIKIARGVKQGDPLSPILFNAVMDELLCRLEALGRGGSLDSEGNINCPATAFADDLLIFEDHDKHLHLDLDMIDTFLQGRGMQLNAKKCSLISGALIPRAGKIIPRTKSFLSHNGVPIRMATDFDPTKYLGHKLGASGVLKPTIINLQRWLNNVAKAPLKPDQKLALIKQFVIPKMLYGLQQPKITGKLLREADRLVSFTVKRILHLNIHTPNASLYAKIKDGGLGVTHLKHTIPRLFLGRLTKLLDTSDNDIGLMFVVQGERVRGLMDRLQIMAGVQPPDVYWASAIKEGPLTKGMEEAAHDPASRSWIDTKPTGWSGKDYVKAIQLRTANLPTMGLPSNPPDRRNCRAGCSKVESISHVLQGCPSTHWERIKRHNEIAKKLSAHCKSKKFSVVEEPHIRHEDGTLFKPDLITVIGESAIVSDVQVVWEGNLTLDHQHENKRSKYEDDQKFQSSVRRLYPGKTIIHAPLTLGARGTWPLCNKLTSDLLQITPALKCSMIASVLKWGNSIHAAFGRKVWRGRRN

SEQ ID NO: 26076 - protein, 1295 aa, Ips typographus
MEDKTTEPPATVNTGGPLQPSNDIMGPRENSGTQGASNSAATHCCLKCGKSYQTRSGMLKHLKECGSRDRRDCNFCSRAFGSFLALRCHERAAHKDAYLEQEETKAKPSEAEVLAKIAEMEANKKSNYFLNEIAIATGLTKDQIRHRRQKPEYKEYLQLAHEKAKATMSISPWVKGSKRKALAPSASDCVRKPSASQPAAATSINKNINIKDIIKSQPIIPKAPVLENQICIPESPKAANVSLNNTANEIYYTPPSPDSVESNKRKCTFSDDIAQDTPKRAPTIRSELNKQQASKAPVNIISDVLIRPCLKRQRETEDDTPLPPASRPKQNTPVSATPTTVGVQSCVANGIANNNPDVSQNINVSTEATEVFTPGGTGQNVVDGPNSIIAFLQNFILDEISKPPANRNILNIELAKFALYKPINQFQNKLTEWMDVKFKNKKGNNNNKPNNTNNKGNNNNKPNNINNVNSVNNNVQNNITETETRAKRGQKQKPNYTRQYAQQFTGRGLRAQNYKKAQDLYASNRASLATDILAGKPLDAMEASPSAESVEVYFAKILENPSFADKEEIRDYKDPASNTELYISPDEILAAKSGWNPSAPGPDGITVNTVKGFDNDELAVLFNTIYLRTCLPERWRNSRTILIHKDGDKLDPGNYRPITITSSVMRLMHRVIARRIKHNITLNMHQRGFTDADGTLANTVITQHYIRHRIESRKTYNILSLDLQKAFDSVNQGSVLRALRRLGVSDHMIQYINETFKDATTEIKVGKSTTRKIKIARGVKQGDPLSPILFNAVMDELLCRLEALGRGGSLDSEGNIKCPATAFADDLLIFEDHDKHLHLDLDIIDTFLRGRGMQLNAKKCSLISGTLIPRAGKIIPRTKSFLSHNGVPIRMATDFDPTKYLGHKLGASGVLKPTIMNLQRWLNNVAKAPLKPDQKLALIKQFVIPKMLYGLQQPKITGKLLREADRLVSFTVKRILHLNIHTPNASLYAKIKDGGLGVTHLKHTIPRLFLGRLTKLLDTSDNDVGLMFVVQGERVRGLMDRLQIMAGVQPPDVYWASAIKEGPLTKGMEEAAHDPASRSWIDTKPTGWSGKDYVKAIQLRTANLPTMGLPSNPPDRRNCRAGCNKIESISHVLQGCPSTHWERIRRHNEIAKKLSAHCKSKKFSVVEEPHIRHEDGTLFKPDLITVIGESAIVSDVQVVWEGNLTLDHQHENKRSKYEDDQKFQSSVRRLYPGKTIIHAPLTLGARGTWPLCNKLTSDLLQITPALKCSMIASVLKWGNSIHAAFGRKVWRGRRN

SEQ ID NO: 26077 - protein, 1291 aa, Aeromachus stigmata
METRSKRIRKGPLPEGDRRGTPGADAGCHSMRTIGGEGLNRRVPTDKNATADPIDQQTDDVSIPSRSVSPAEDVSQEARANQPATTKAGKPRVRMKWTDEINTFIMRTYYYITKLEKDRTTYIKKLHKEFSDRYPDLNVSEQRIADQRRVIIRNKLLSNEALNKIKSDVIKVLKIEEDTRVSLNIELGLQTQEHTQLDSDNYDTVSQTTLNLVSLNSDYQTPENALESSQQISSGLSEHVTQKVSTSTQTFTQSSLLTYCIETQEPTEEPIDDIYIQKLFEELQRNVVKFTGIDPTCRPKLPILKENKNLYKIINIFNKTILNKFYTIDSDINHIHTLVYCSALTISENLGYKIQTDNTRTFKKPKKPEWQIRLEQDVKKLRADIGRLTQYINNNRSKKVIKAVEIIFKKQKLHTTYEKDNVRLEEYLDTLKQKLSLKSHRLRRYNKALKRKEDNKLFNNSEKLFYRTLSNRLNIDKNAEIPTKETLKQYWSEIWTEKRDHNKQAEWIKVEEDKWNSIKDMEFANITAEDILMVTRKIKNWKATGVDKIHSFWYKKFYVLHNILASIFTQVIEGSVEIPNFITKGITYMLPKSTMTANPSQYRPITCLPTIYKILTACITNKINKHLELNNILAEEQKGCRQNHRGCKEQLIIDSIILKYANKYNRNIHLTYIDYKKAFDSVPHSWLVQVLHIYKINPTIIKFMTNVMTKWKTSLLLNIGNKSLETDELQIRNGIFQGDSLSPLWFCLALNPLSTLLTQSEKGYQLNTDTKISHLMYVDDIKLFSKSESNMKKLIEITSKFSQDINMSFGLDKCKSLHIKAGKVIGGYYKLNDDEEISSMEPNDTYKYLGIQQSKNINHTQIKKELTSEYTKRLNLLCKKQLYSKNLFKAINTYAVPILTYSFGIIKWSNTDIKHLEIKTRTTLTKHNYAHPKSAIERWSIRREKGGRGMIDLTELWGTQIQNLRDFFYNKSKSSHIHNAVVELDAGYTPLYLKDRDRTYKTKVDLIKEKFDRWRKKELHGRHLHDLEQEHIDIFASNRWLKLGVLFPETEGFMLAIQDQVINTRNYKKYIIKETAVKSDKCRKCNKQPETIQHITSACPNLAQTDYTHRHNQIVNIVHQKLAIKHKLITGPLKPYYQYNPNPVLENANYRLYYDRGILTDKTIHYNRPDITLLDKSSKVAYIIDVSIPNTHNIQKVISDKIHKYTELKEEIHRIWNLEKVYTVPIVISSTGIVPKYLHHSLKILGLPENIYITMQKATILNTCRIVRKFLQDDSPNPTSTESETHLVIGP

SEQ ID NO: 26078 - protein, 970 aa, Penaeus indicus
MNIQELTDEEREIIEEISSITEHNLDMELQGFKKVERTLLRKHVKEVNNVLGNIVTESISGTNNLIKACTILIGRKVGLKPYRKRANGMKEPWWKMRIKVSIKEIRKHINILERKERGDLKRMEKYKELEQKYRIKRKGLKVVLDELKQRLKAKSMKIKRYEQRIEQYKINRLFQQDQKRGYQQLGGKVNSNEKPDAIESKRFWNNIWDNKVDHKKDAEWLRELRAAKGDGKQDDIRITTEMVIQQTRKIPNWKCPGPDGVQGYWLKSFTALHERIADQLNDMINNGVEIPKWMTTGKTVLCQKDPGKGNAVDNYRPISCLPLMWKLMTGIISNVLYEFLEDADKLPNEQKGCRRRSRGTKDQLLIDKTVLNDCRKRHTNLGMAWIDYKKAYDMVPHSWILESLELANVADNVISFIMRSMRNWNVDLTSCGEFLGKVNIRRGIFQGDSLSPLLFVICMIPLTDILRKVPTGYTLKCGLKLYHLLFMNDLKIYGKNEREINGLVSTVEIFSNNIGMEFGAKKCGTLILKRGKVVKTDGLELPSGDTIKEVEDEGYKYLGITEFDKIKDSEVKESFRKEYLRRAKAIMKSRLHERNKIMAMNTWAVSLMRYGAGIIKWNVAELDEMDRKTRKIMTMNKEFHPKSDVDRLYVTRSKGGRGLIGCKSCVVTEVNSLGWYVRNHDEPLLVAVKGSNTIPLCQESMKPNEFKKLKQEERINTWKDKAMHGQYLREMEGKDKVNTWRWLQKSDLKGCTEALICSAQEQALRTNYTKFKIDKTIDSPFCRMCGNKNETVTHIISECSMLAQREYKRRHDNVAKYVHWRLCEKYELDKANKWYDHKPDGVIENTNYKILWDVMIQCDREIEARRSDIVVVDKQKREVKIIDIAIPGDVRVCEKEIEKIDKYKPLKDEIARLWQMQKVTVTPVVIEALGAITNRLGKFMQEIGIEICIEHVQKTALLGTARVLRLVLVS

SEQ ID NO: 26079 - protein, 1213 aa, Ampulex compressa
MEDNDNSASDAEPSGPEDSVTDLSVRQGTSGDNSACIMVNDLITILAPMHASGIICPPCLTHGCHICLLDLKSANAHFSQEHSNLGIEWKCGNCGKIWPGIRNWRSHFPKCKGRADEEANLVQCSVCDKRFKTKVGLSIHECHDHPALRNLRRKEYAERERLPKGRKLTVWNEEEVKLLQDLDARFKSCKYPNVEIRKFLPTKSLKQISDKRRGLNQAPAASLPEVDILISDSSSSSETDDRAPVAERARLTIEDTQNAMEDQDTWQDEMRNAIIREHEVPVACQEINKKVLQMWDKLQKPSDMLINYTDVDNFIIHDLIPFLLNSDANKIKNNKTSKRKDKSSNNSNINKNNSNSNNNNNNNNTHNHNRINNNNNENRLNHNGGDRNIPEESNIYNSHKKRPQKKKNKRTRNQRQRNLFARCQDLYKNCPRKLADIAMQGGDVAIGDLLELPSENDIEELYTSLWGIEGPLTCRLPLVDRALNINQVLKPINIAEVQQRIGKIPNKSAPGVDKVKKYNLRKGGCDVILMRLYNILLLTGYFPTPWLVNRTTLIPKVGKDLKDVRNWRPITIGSIISRIFSSLIDSRIRAAVSQCKRQKGFTKENGCQSNILLLQRSLIEMKNKDGGVVTVIDIAKAFDTIPHAIIKPALMRKGIPYHLILLIEKMYKGCTTRIKASKGRTVNINLKRGVKQGDPLSPILFNLSVEHIIDSISNKYEGIELASENVSILAFADDVVLLGSNKVVAQKQLSFLSDELKKLGMSISVGKCSTFQIVPTNKSWYVTDPAIKINNEVVKNICPDEVFAYLGVKIGPWRGCYRGVTMPEVTRIIKNVKRLKLKPHQKVTLISDFILPRFIYDLLSVPPSTSVLKLIDNGIRTQLKEILHLPLSTTNGIIYAAKRDGGLGFPRMEHIVKLSILKSGIKMQISEDQVLKSIASEHKYDKFLKDIANSLRINWPSNIQDITRAKARMKSEIQKEWEELKSQGQGVKDFRNDKVGNCWLYQPTLLKSSRYIDALRLRSNTAGTKVALRRAHLVEDINCRHCRIQPETLGHVLGLCHFTKPLRIRRHDEIKNLIASKINRQYAVTVEPTIRTNQGLQKPDLIIQNEERVLIVDVSVRYENRDYLELARKEKLQKYNNLVDLLKTRFNKKGGQVIPIIIGSRGAIPAETKQCCRLLKLSARDVKTMSLIALRSSIEIFNLFIDYDKTNSGHNFK

SEQ ID NO: 26080 - protein, 1545 aa, Amphibalanus amphitrite
MSDETLISPEDGRATMGGSTPRCCKCVSNPCRTCRCVKLGRRCATCRFGDNCPNSVPKLTQLCDIATEIATLKQNSRVLPHIPKGARIAVADELAHLINDAVEQGTEEAWRRLTCFGYSTLSINREARTAEKTSLATQVRLNLSQNSDTNKVRPSKPSKRSHAHRPVGEMTAMSRRVASKLTDGDTRGALRALTSDDSFASPTEEVIKRMQEKHPEPPTDLRNVPPPDDIHVPLVASEADVLKAINSFPPSSSAGLDGIRPAHLRSLLTKHTAEAGARLLTALTALTNLALSGRLPECATPAFFGASLIALRKKDGGLRPIAVGSVYRRIAGKVAATAVSAAIGAQLRPVQLGVATRNGCEAAVHATRAYIDECEASENSRVIVKLDISNAFNTVRRDAMLEAVKTRAPEIYPFVWQGYNNAAPLFIGDSKILSQTGVQQGDPLSSLLFSLTVDSATRAPDTEINTWYLDDGTLAGPPSDVISSIKQVKAEMSEVGLAINAGKCEVTFLGGFTDDTKLSALHMLQSVLPDIREVPVDELELLGAPVHDAQTRRALLQGQLLVEKLIKRLQALDEAHQAFFLLKNYVSLPRLLYLLRSSPAYRHPALLNRIDEAVRRGMEVITNVQLRDISWRQATLPISLGGLGVRRVTDVALPAHLASQVASADTIASINGSAANRVSELTRCLISEWERRTGLPPPEAHRRRYQREWDRAETARISERLLEDSKTDVDRARLRAAAQPHSGAWLNAFPAASVGTLLDPDTLRTAVALRVGADICAPHRCRCGADIDERGLHCLCCQMSAGRFPRHAELNSVIKRGLSTAGMTSVLEPAGLDRGDGRRPDGMTTFPYAEGKCLVWDATCVDTFSASSVKASAARASSAATVAERRKRHRYADISRRYLFRPVAVETSGALGPDSYSFLKELGRRIVKTTGDRRDFERLMQRVSVAVVRGNATAVRLASVNVRPSHRTNIEPKSLPWPPTNSTGTEAKLPPQLPTTTSPTTRPAEQEILDPLNMGLPNNGISMCQHVGKSVNLADIKRQLKSNRRIGACDKKVPTPCTAPADGEERSVPSGAQLPHGVWLCMQCGHQGCARHATQHFNTPRSDSHTLAVNAAADWGVWCFTCNEKVSLKSNKKLHEAVQFVKKKQGTLRPGATPSKEDTPPPKSSKGASAKEKQAQADCDNESLPKVKGLINLGNSCYLNSVLQCLSQCHYLTHYLDISSRPGRKVTVSADGETMELVLPEGGPITASLCDFLKKMHITGTDSTVSPSHLLRKIALKVPQFVGCDQQDAHELLRALMEQARLEDLRRHQKQILLGLGLPAKADPKEVPDDMKARAKALGHQVSHTTIDSIFSGQLVSLVVCQACMACTHRMEPFLDLSLPAAEDIIFSLLSELDPPPASVSGDSTEDELNEPPASVSPDPPADEPPASVSPDPPADEPPASVSPDPPADLAAEELSERLSALIVDSAGAAAAADSCGDEPGPLTVNGRPSSPVEADAAPAGLVPLVGESADKAPERCAGDGGSGPGGGEAELCAGGELRRGCGGA

SEQ ID NO: 26081 - protein, 1504 aa, Amphibalanus amphitrite
MAKYISSSKNKTKLRAAENYATDATSDSQEPPCCTSTSKRKRRIRCNVCGRHWHLSCVHLTRAQAETLGSWWCPLCVYNSPVSTDPSRPIQPPSTVPQSQPGTESPPSPDSAVDLAFILARLKQNCPVARRIPRGARIAAAEALSSLIENAVDTGTANSWSRLLCFPYKALSVPQIDARNTDNISLTTKVKRSIAAYMEAVSSEPSLAASFPPEESCTKQMTFPNRATNHHQSPGIRKPDERLKRGVALKLQDSDVRGAIRLLASADRVEHDSDDVLESLKAKHPSSPEDLDLPPGPDDDTQPVLATESEVLATVASLDPGASAGLDGLRPAHLKDLVGRSAGEAGARLVSALTRLVNLAICGQVPAPAHAAFYAASLTALRKPCGGVRPIAIGTTYRRLATKIALRPLSSELGALLRPNQLGFGTPGGCEAAAHATRLFARNLSEDSVLVKVDMRNAFNTVRRDHFLRQVRIHAPELFPLLWQAYSVSTPLYYGTSVIWSATGLQQGDPSGPAVFSLAVQSVTRNVTSPLNVWYLDDGTLGGGIDGVCADLQDLIPAMARIGLEVNPAKCEIINASGDAVQHTLYVEKLHHLIPGAAVKDDAEQMVLGAPLTSSAAETALGRKKEELDRLITRLKLLDSHSAFYLLRHCLWLPRLQYLLRAAPVYLQPDILNELDVTLKSAVQDLTNVYFDQTSWQQAVLPTSLGGLGLRRVTDVALPSFIASFHRCQQLLSSLLPPLFTAAISKELDESTADWLTKAGDKMTPDADARRQQKKWDYPLAEKQRDSLLAAANQFERARLLSAATPESGAWMRALPSASLGTLLDNNTVRIAIALRVGADVNSSHVCKCGAVADCKGHHTLTCRFSAGRLPRHTALNEVIRRALQSAGVPALLEPLGINRGDGKRPDGMTIFPFTQGQCLVWDVTCVNTYAESRLASAVVQAGAAAAEAEEEKRRKYPELCRRFRFQPIAFETSGSCGPSTKSLLREIGAQVSAVTGERRETEWLLQRCSIAIIRGNAASILLTSTSLPSRPPQRLEVAKDVRQRSQCQLEARKKRRQAGSESKAQATSHDLQLNPVIPPLDSDKNSKDPLYIGLPNYGNTCYQNATLQSLLGLQPFQSEMVSLISGPVESGQCRTLCGVAKLMDLRQKALSKLVFSHLNDLRDVFADIDPAFRGTEMQDANEFLLRLLDTMKDEVDARRSTDNPVRDNFHYQTLESYRCTKCHETVLKRQENISWFVSVPHHQGTEAPTLQDALRLSMRPDRRHLLCQHCCHDECYVTTKISQLPRTLILQLNRCVFLGDEAKKIRTKVSIPKFLSLNEFVADDVTRPPEWNCTNPSLCTRESEVPSGPPAATAAPTAPTTAGSPVSAGATAPARPSPSATAAAESPPLPPPELQVLDAANSYSKPGRTREDKGRELHVIRRSQEREPAGAVEQVHLSEFCVQEDQSLRPVDLVGDSTYRLVGVISHYGGTAHSGHYVSDVYSVGRDMWFHYDDQRVYCLLNT

SEQ ID NO: 26082 - protein, 1340 aa, Amphibalanus amphitrite
MEAVSSEPSLAASFPPEESCTKQMTFPNRATNHHQSPGIRKPDERLKRGVALKLQDSDVRGAIRLLASADRVEHDSDDVLESLKAKHPSSPEDLDLPPGPDDDTQPVLATESEVLATVASLDPGASAGLDGLRPAHLKDLVGRSAGEAGARLVSALTRLVNLAICGQVPASAHAAFYAASLTALRKPCGGVRPIAIGTTYRRLATKIALRPPSSELGALLRPNQLGFGTPGGCEAAAHATRLFARNLSEDSVLVKVDMRNAFNTVRRDHFLRQVRIHAPELFPLLWQAYSVSTPLYYGTSVIWSATGLQQGDPSGPAVFSLAVQSVTRNVTSPLNVWYLDDGTLGGGIDGVCADLQDLIPAMARIGLEVNPAKCEIINASGDAVQHTLCVEKLHHLIPGATVKDDAEQMVLGAPLTSSAAETALGRKKEELDRLITGLKLLDSHSAFYLLRHCLWLPRLQYLLRAAPVYLQPDILNELDVTLKSAVQDLTNVYFDQTSWQQAVLPTSLGGLGLRRVTDVALPSFIASFHRCQQLLSSLLPPLFTAAISKELDESTADWLTKAGDKMTPDADARRQQKKWDYPLAEKQRDSLLAAANQFERARLLSAATPESGAWMRSLPSASLGTLLDNNTVRIAIALRVGADVNSSHVCKCGAVADCKGHHTLTCRFSAGRLPRHTALNEVIRRALQSAGVPALLEPLGINRGDGKRPDGMTIFPFTQGQCLVWDVTCVNTYAESRLASAVVQAGAAAAEAEEEKRRKYPELCRRFRFQPIAFETSGSCGPSTKSLLREIGAQVSAVTGERRETEWLLQRCSIAIIRGNAASILLTSTSLPSRPPQRLEVAKDVRQRSQCQLEARKKRRQAGSESKAQTTSHDLQLNPVIPPLDSDKNSKDPLYIGLPNYGNTCYQNATLQSLLGLQPFQCEMVSLISGPVESGQCRTLCGVAKLMDLRQKALSKLVFSHLNDLRDVFADIDPAFRGTEMQDANEFLLRLLDTMKDKVDARRSTDNPVRDNFHYQTLESYRCTKCHETVLKRQENISWFVSVPHHQGTEAPTLQDALRLSMRPDRRHLLCQHCRHDECYITTKISQLPRTLILQLNRCVFLGDEAKKVRTKVSIPKFLSLNEFVADDVTRPPEWNCTNPSLCTRESEVPSGPLAATAAPTAPTTAGSPVSAGATAPARPSPSSTAAAESPPLPPPELQVLDAANSNSKPGRTREDKGRELHAIRRSQEREPAGAVEQVHLSEFCVQEDQSLRPVDLVGDFTYRLVGVVSHYGGATHSGHYVSDVYSVGRNMWFNYDDQRVSCVDEAYVLNEGHQRDGYTFFYLHKELCSQIVRMEGGGL

SEQ ID NO: 26083 - protein, 1045 aa, Oedothorax gibbosus
MNIAVDGDRTEPAVVPGVTGHPCPECAKSFATLRGLGVHRRSQHPSTFHAEQLARLQPKKARWSKQEELRLAMLEAKMWAEDSTISNMNQLLLACFGQERTLESIKGKRRSPAYKILVDAEKMKLMAVRPNHPQSNVTRGHPSDSPDEDENSPVGEPVRDVDSENDSTIIYSWAPESVDAEDQVSDGDTTICYNWSVNYVALVDASLEGNTVSTEEDICVNTALAILEIEPELALKLTEDYLMRIVAVDALKGSDKVRKKKRKNRVGKKQNDISRRKLRKLEYARMQDLYKRTRSGCYEKIFSRASIGEKLGSEDTFEFWKHLLKDDLRKPNVELLRATRPVTLPDASLLLEPVMIDEVVTSRIPFRSSPGPDNVTPKAWNRVPDRVKAKLFTVWMKVAKVPNFIVESKTIFLPKKEETSSPSDLRPISIASVILRHFNKVLARRMGVIMGEHFDSFQLGFRPFDGIAQGLSTLNDILKYVGSNQQGLALASVDLQKAFDSVDHGAIFEALEELCFPEDFIGYVRFIYQEANTRLMFKGDVSEPIHPARGVRQGDPLSPLLFLIVFDHVLRSIPPNEGFMLGDKLISHLAYADDLIVTTNSKRSLQRIFDAMLPTLGATGLEINLDKSFTLTWVKDGKRKRMLFDHSEVVYVRNRPLKALDVADSFTYLGVKFNSKGRLSIKSELGIKLETLLKAPLKPQQKYFLLLKMLIPGVMHELTFSQLHAGSLKKLDLLLRKCVRTMLHLPHDTPIAAFHATTYDGGLGLPSLRWTVPLLAARRGAYRKTQLLMNCGEIIRNNGDIHRMHRKRLLESCDGAGLKEANKVPSAHAWITDGTALMSGRKFVQAVQIRLNVLYSRGRAARGRSMDHQCTRGCPQPETLNHILQVCYATHKLRIKRHDDVANYLSRGISQRGFTVHSEPMFETSKGTLKPDLVIYSNDEVTVCDIQIVNDQFPLDTAHRNKCEKYEPLAEKLANLRSKFSITSLTMNWRGILCRRSVEDLMFRKMISTRDLKLFAVKVLEGGAMAHQVHQNMTACLRTVKKGEG

SEQ ID NO: 26084 - protein, 973 aa, Oedothorax gibbosus
MLEAKMWAEDSTISNMNQLLLACFGQERTLESIKGKRRSLAYRILVDAEKTKLMTVRPYRPRRNVARGHPNDGPEADEDNPVVEPGRDVDSEDDSTVIYSWAPESVDAEDQVSEGDTTICYNWSVDYVALVDASSEGNTVSAKEDICVNTALAILDIEPELALKLTEDYLMRTVAVDALESFDRVQKKKRKNRVGRKQKEISKRKLRKLEYARMQDLYKKTRSECYEKIFSRASIGDKLCSEDTFEFWKHLLKDDIRKPNVELLRATKPVALPDTSLLLEPILIDEVVTSRIPFRSSPGPDNVTPKAWNRVPVRVKAKLFTVWIKLAKVPNFIVESKTIFLPKKEETISPSDLRPVSIASVILRHFNKVLARRMSTIMGEHFDIFQLGFRPFDGIAQGLSTLNDILKCVGSNQQGLALASVDIQKAFDSVDHGAIFEALEELCFPEEFIRYIRFIYQEAKTKLLFKGDVSEPIHPARGVRQGDPLSPLLFLIVFDHVLRSIPPNEGFMLGDKLISHLAYADDLIIATNSKRSLQRIFDAILPTLGATGLEINLDKSFTLTWVKDDKRKRMLFDCSEAVYVRNRPLKALDVVDNFTYLGVRFNSKGRLSIKSELGSKLETLLKAPLKPQQKYFLLLKMLIPGVMHELTFSQLHAGSLKKLDLLLRKRVRAMLHLPHDTPIAAFHATTYDGGLGLPSLRWTVPLLAAKRGAYKKTQLLMNSGKIVGNNGDIHRLYRNRLLESCDVAGLKEANKVPSAHAWITDGTALMSGRKFVQAVQIRLNVLYSRGRAARGRSMDHQCTRGCPQPETLNHILQVCYATHKLRIKRHDDVANYLNRGLSQRGFTVHSEPMFETSKGTLKPGLVIYSEDEVTVCDIQVVNDQFPLITAHRNKYEKYEPLVEKLANLRSKFSITSLTMNWRGILCRKSVEDLLIRKMISTRDLKLFAVKVLEGGAMAHQVHQNMTACLRTVKKGEG

SEQ ID NO: 26085 - protein, 1224 aa, Exoneurella tridentata
MGEGLPPRLSPTKKSMSDGNHQASEPGWAGDPPASPLGAELIVEERGGGSGAALSDQNNQSSLARRLRSAARQEAAGGGEQDPSGAQGRIPVLEREELAIVAQLNELQDCPICSRSGPSLRYIGSKQLAEHVRGGHPAASITWLCAGCGRPCRNIQSWRCHLPHCKGPQVAEQLPFRCGHCEMSFSSKSGVSQHERHAHPVVRNDKRSAEAAPSNAKKGRAASVWSDEDLRVIGDLEQRYAGSRVINVEIARHFPDKTNKQVSDARRRIKEAERRGVEAPVQPLPRVDRRRSSPSENEESEERTPATLPRIEEAEEASDNDGGGVTGVLDSNPEPPAESEISPPRDWRQSLVTEICSGRDEEMGRFQDWGRLVQCHIESHNNASQEEVDDLYNAFASHLVSSETSNRNGRRASQGVRGRRKTGRRRPPTSAEMRRFSYARCQMIWDKCPRKLAEMVASNDLSLLKQQAAPNLASTESLYRELWGIEGPSDAAELYRPANEGPIPVEITLVPATPSEVRKRIARIRSDSAAGPDGYTKADLRGEETARALSKLYNLLLWACKFPTAWRINRTTLLPKPGKETSDVRNWRPITISSMVSRIFSSLLDQRLRASIGQHNRQKGFTEENGCFANISLLEAAIRVAKRSGGVFNVLDISKAFDTIPHSVIPLSLERKGVDPLVAAYIADIYRDCSTVIKAREGEVNIKLKRGVKQGDPLSPLIFNLAIEPLIEQLNRTCGVDIEQNNLSVLAFADDITCIARDAREAQAQLQMVSDFLGDLKMSVSIEKCSAFELVPRGKTWYTRRPEVGMDGKLIPYVQADEVVKYLGARVSPWRGLAKGREHETLREVIARVRSLPMKPMQKVQLLGTYIFPRFTYGFIVNPPSRAVLREYDGIIRTSVKEILHLPHTVSTAYLYTPRAQGGLGLLETEKMVMIANLRANIKARQSPDPVVRAAACAHRTEKRSSEYAEAIGLQWPMSLRELDNKKYELRMSYAQEWAKLKWQGQGARDFAEDAVCNGWLKGGLLSHSRVTDAIKLRTNTYPTRSLMNIINSQVDPMCRKCRCRRETLGHILGDCRYTKDKRINRHNEIKDLLVARLTKGFPEVMDEPEVRVNGQRFRPDIVVRTSKNEVLVIDVTVRYEHRDYLSGACAEKSTKYKSVAAQLARDFHSSEKRVLPIVIGSRGAIPRSTKDALNSLKIGKKDWLTISMIALRSSIEMINAFMDDGFP

SEQ ID NO: 26086 - protein, 1079 aa, Delias pasithoe
MSTPVLRAKLRTTTAQRPGGLPPHPRRNNTGTKTKNIKNDNGPTGSINPVSETQSRSDSAPDLEYRCSYQGCQRSFKTKTGLGVHQQRTHKDWYDARQLAHNPSSRSRWTEEESALLARKEAELTQKGVRFLNQALREHSERSLEAIKGHRRSAKHKDLVQLYLSQLQTTSAPECVQDPIPSTPDADVPAQVESQANTKVARLTAVQDSPPAIRGTTDAIPGYRQRIIKQVESYIANDALAISSHLLEIGKQIQSMSGEDIRLRLASILRILFPIEKPGRPRKPVIGDPQATSKRKRRRLEYRYTQTLWTRNPGRCIRGIMGDIKSSAKTPKKEIMLPYWEQLMATINDASPGYTVPDVPHHNLWDPISVDDIKDCYPPLNTAAGPDGITSKAIRAMPATDLTIAMNLLILCDRPPDGLLESRTTLIPKKSDASDPGDFRPITVPSVLLRCLHRILARRIERSVPIDERQRAFRPIDGCSINTYLVDLALRYHRSKLKCLYMASIDISKAFDTVTHRAIKDTMLHYGFPAPLVEYVMSTYYFGTTTLGCDGWRSRGIRPTIGVKQGDPLSPVLFNLIMDRLLAELPQEIGARIEDFRINAAAFADDIVFMASSRRGLQTLIDIARNTLSNMGMRINPAKCHTIALRTVPKMKKCVVDASVRFRCGGYDMPALSRSSEWKYLGVFFTPEGKTTGTALPTIRSHLERLTKAPLKPQQRLFALRTVVIPSVSHVLTLGKTHVGYLRKIDTVIRSIVRKWLALPTDCPSAYIHADYKDGGLSIPSVRWTIPGLRKKRLEALSKISNRYGPLVLEEVDLCRRHLNDRGTYLDSPQAVKDRWARMLYSNIDGTALTRSSNVPQQHRWVVEGNKFLRGSDFLNMCKLRINALPTRSRCARGRPHKDRFCRAGCVAIETLNHVEQICHRTHHARIERHNAVAKYVVKRLKGKGLTVLEEPRINSARGIRKPDIVAYDNEQALVLDAQIVNDQYDLEAAHRTKSSKYKNIEEDIRRLTGGSEVHFGSITLSWKGLWSKDSIKHLLGRKVLDSSDIKIISTRVLVGGLSSYWSFLSTTSTTAKQRQGIG

SEQ ID NO: 26087 - protein, 1100 aa, Zanna intricata
MDINPSHASTRLLDADVIYAIPWVPGPCSVCAGWFQRAADLVRHHRLVHHGVSMGFRCMKCDRLFGGPHAALCHYAKCSGVVLQDLPHRCQVCDRGFRTVSGLSQHKRHLHPEIRLLERRDLSVLPRRPRSRHGPRIWSVEEEEILLDFFRNWDGEGNYTVLLIDRLIGKTSRQIRDKVALLRRSGAIPGFSGQSENIPLLITGSSDTDSSSGDLSFLPTSPVPTEEAPIDTPLVEESDLFGRWSEDVREFWLATDHVHPLSKKLAEKWLEVEFPDKLWIEEFVCEISELIRGAAEIRRPGLRRRYLKRTYQAANIKRRRYANTQELFKGCPSKLGEMIRSNRLDDLLPDSSIRPPSDLIRAAYENLWGVEGRCELEVPRRTQDLLFHPITGNEIKLRVKRMKPNGAPGPDRIKRDMVIGIPGIYNLLAGLFNLLVWVDYYPDVWKQNSTTMIPKADKDLLLASGWRPITVGNLFSRLFSGVLETRLRSSIDLCTAQRGFVAGNGCFSNIRLMHEALAVGKRSSLCAAVLDISKAFDCISHRAIMEVLRAQGINSELLKAIQGMYQGVTTRFKNCGGLQMPIKRGVKQGDPLSPLLFNLVLDPLLRRLQDLPGAFRMNDVLVPVLAFADDMILLYQDVDSLQNALNEVTSYLKSVGLGLSPEKCGVFGVKQARKSWIDINIQVSVDGVLLRRFGISENVRYLGAFFNLAEGMANRRNTEEVTLAAERVNRLALKPRQKLDLLCFHVLPGFYHLLVSDLPSASKLKDLDKSVRRIVKGFFHLPLGTSNGLLYCRRKDGGLGVPKMLDLVRAANLKAYCALDNTTDEVIRSVLVEGQAATCRKVAESMGLSWPTSCSAIEAWKRKKKLVEVDDWKSQPIQGRGVGCMKGNRVGNCWLRKKMLHAGEEIDMLKMRSEVFPVNSYLHRIDPDVRRTCRRCNIKDETLAHVLGECQAGRGARIARHDRVVDTICERATSAGWVVAKEQLFRAGAEALRPDLVIKTPERALIVDVTVRFEQGSSLKDAVREKKDKYSRIVESVQEDMDIEDVSILPVVIGARGGMISESERNLKLLGLGGSADLESIILDVIRASVNIGRAHLDFT

SEQ ID NO: 26088 - protein, 1104 aa, Zanna intricata
MDINPPHASTRLLDADVIYAIPWEPGPCSACAGWFQRAADLVRHHRLVHHGVSMGFRCMKCDRLFGGPHAALCHYAKCSGVVLQDLPHRCQVCDRGFRTMSGLSQHKRHLHPEIRLIERRELSALPRRPRTRRGPRVWSVEEEEILLDFFRNWDGEGNYTVLLIDRLVGKTSKQIRDKVALLRHTGVIPGFSGQSENIPLLITESSDMDSSSENLSFPPYSSLPTEEAPIDTPLVEETNQESDLFGRWSEDVREFWLATDHVHPLSRKLADKWLEVEFPDKLWIEEFVCEISILIRGAAETRRPDLRRRYLKRTYQAANIKRRRYANTQELFKGCPSKLGEMVRSNRLDDLLPDSSIRPPSDLIRVAYENLWGVEGRCELSVPRRRQDLLFHPITGNEIKLKVKRMKPNGAPGPDGIKRDMVIGIPGIYNLLAGLFNLLVWVDYYPDVWKVNSTTMIPKADKDLLLASGWRPITVGNLFARLFSGVLETRLRSSVDLFTAQRGFVAGNGCFSNIRLMHEALVVGKRSSLCVAVLDISKAFDCISHRAIMEVLRAQGINSELLKAIQGMYQGVTTRFKNCGGLQMPIKRGVKQGDPLSPLLFNLVLDPLLRRLQDLPGAFRMNDVLVPVLAFADDMILLYRDVDSLQNALNEVTSYLESVGLGLSPEKCGVFGVKQAQKSWIDINVQVSVDGVLLRRFGILENVRYLGAFFNLAEGMASKRNIEEVTQAAERINRLALKPRQKLDLLCFYVLPGFYHLLVSDLPSASKLKDLDKSVRRIVKGFFHLPLGTSNGLLYCRRKDGGLGVPRMLDLVRAANLKAYCALENTNDGVIRSVLVEGQAATCRKVAESMGLSWPTNCSAIEAWKRKKKLVEVDDWKSQPVQGRGVGCMKGNRVGNCWLRKKMLHAGEEIDLLKMRSEVFPVNSYLHRIDPEVRRTCRRCNIKDETLAHVLGECQAGRGARIARHDRVVDTICERATSAGWVVAKEQLFRAGAEALRPDLVIKTPERALIVDVTVRFEQGSSLKDAVREKKDKYSRIVESVQEDMDIEDVSILPVVIGARGGMISESERNLKLLGLGGSADLESIILDVIRASVNIGRAHLDFT

SEQ ID NO: 26089 - protein, 1412 aa, Salpingoeca rosetta
MCRRNPVVATVDNGGGRLNMAHKGVAPTRQGLRRSQRVAAQRAPGHYREVANPRALTRRASTPSRGLPQGSTRADDRGPEHNDNGNDDVDDDDDYAVAAEANREEPLCTSSPARHEGSDDHLQPVDDGRSTHSQHSSTAMSDTLDALNVTDTLDALDVSDTFDALDDSELVSSGELVDALQSVYGPEPPSDTEATDAHGPNALTPAQSGHQGGPASHQHGDHATARAPPHGAAEAQHQQPTAANTTAALSTAASAAHEPAQAATPEPRTPADPGGEEQSIPDTPLADVFDLMQCCDDANCWVKDHTPYAHDGSFAGPLPKLPCPFGNCSVHSHNAADGHKNLTALATHIRTAHPEHAIPGLAAALGLGFCTKCAYVCSPRHKCKHAEAVPEDPPETHYKPESWWNAKFATFEQDLVSRVANVDVYHGVKTAVDVRVRSPTERRAVLIADSLIGQACALADDPDNDDQYTYLDAGVYLLQRVFARTPQHFLSQNTTLARMRMLAAREWDELEESVTRKPSGRPATGDRAKARAAAKRFRAGQMSKGHSILRDTASVAEWSDDIKEQVKQKIITTGSAGLPSRGDDNSGGDAGGDGPLARTTIDDLPAEKITDALYTLDRQAAAGATGLTPATLAQLHEHGASLPKLVNALYHGKFRKRMPLLMGGRVVPLTKSNGGIRPVVPMDSIAKLLEKTVFSAHKAEIADALCPHQLGVGIPAGTECIVHGLREYLRAHRDHVAQALDISNAFGAVTRRSIYDAISRRFPSLAHCFLATYGQAPVVVTPGGDTLHMRDGIAQGGPLSPAYFALATIHALKETDKAHPTVTVVAYLDDTYIVGPRDDVKAAAERLDTEIRRTGLKINEDKTVVIPYGDQTAKVLGVPLFGPYEASHLDETRRALDLASAHLPAQLVFQFLRYCITTNSGYFMRTTRRSKEYCEALDDIIAEQLRRMMGAFKPLSSRALTRARRPIKQGGLGLRRQTSVAPAAFLGSVCSFSKSPHHPFQAYTTPGAELEAEIAQAIADLHLGDDGPRDTRDVLNHDARSLQQFLTQIMDRKTGWDENPRNRAIQRGASLHGGYEWLLALPSCKDLRMSDKVFRFALSQRIRTPCSESRASGSCYCCGREMKLDHAEVCDSTKTGRHDYMQNAISRAFMQLNRRATQEPSGFPGAGGKRGDILSFDKSGDYTVFDLVFAAPAASSYQPQAAKVNLYAASQAEQRKIKKYQAILRDQGDFKFVPIAIEAGSGAWGSKFRKFFSSDLMSTTDPQTPPHVRTFTSMHSSTYWRQVLSIARCKAECYANLRCIGQMPHDKRGKNQPGSVRAGDTHTPRQSTQTVQRARAQAQRNHQQGKRTRKRKHPQTTPPGHNGQRSNDSNNGTAATAAATATTDNDEGQPRSAPATSRSPGGPAATEPPATV

SEQ ID NO: 26090 - protein, 1022 aa, Rhabditophanes sp.
MQREMCWKKKEGWREQKKAIGWKLKEMPSLERSEVEGGAGRNNVVIRRSEELEELIGGNGVEESQIRAVPIPNTDELEKLFNKFFTMLMSKNATKPRRILKFRIKKDHPLLLRVNSILETRLESARAQIKDPNKLHKRAKVFILAAIFTLRKRYMGKVGPTITKPNYIFTQEKITKLIKRIRNARRIQGGEEAVTKNLLEEAKMMAKLRMSPAQYIKACEDRVKLLEEELGKQKERYESFKTRTKFQGQPSMKSIGKKIESNGELDYDEAEKVYKELYTKKPDPVSTPQFDEWLQEIKDSTLLLLSKELEERRIWKMAEESLKTSALWKAPGQDQIPNAAYRMLPAAKMYLKNWITKNLNDHYKVDEEDVKGLCFLIYKEGDATNVLNYRPISLLNTDYKILTKVTSNIIKENLAKGIIPAEQLARENTWGTLHGLLLDKAYVKNSQYQRKEHYSAWYDFSKAYDSLSHKQILRLVESLNIGVNIKVMIKSMMAKWNIQLLRKDMDKAKTIRIKQGVYQGDSWSPLIFILTTAGIISKLKRDEALGKATKYKHRVIAFMDDLKVHSPNVEGLEMMSKMIKEGAGELSLKLNEKKCGFYSRKEDVGKEESLFIPRVRKGYKYLGITQLETDIPEENFQRMKEKYLERTQSILESRLTTNQKKILYNTAVIPAGIYVTGNLFPAEKVASTLLRCRKIDLEVRKLTVKENIKTRPTANARFYLPQSVGGLGFRSLEVEMCIQYIRKYVYLMSNTEVSEAKKIFIAINKGGCRNPISDYEHVRKLYKLKDWKLEKEKGPIDYRIVVKSMIEEIKKANFKLRKEDWSKAMTYPKTVLAHEGNISFPALKSLSLDSSKLSLVNASAEEQIFFLGKKASVGLTGSGRCRFGCQADETNYHVTSTCQRAALITRHDMVVWNVLKLMKLKFERKAFPNPGKVLQVGEASLDEEYDNFEIRAGASMLMEEKIKSNKPDIIIFRKEPRLAVVIEVSVPALKTTNSKRKSKSSSTPRTQRWRFQKTMSIPLQEG

SEQ ID NO: 26091 - protein, 1201 aa, Sitophilus oryzae
MERKTKSCLGKEPLPGVRQGISGAGSGSDTSENAGGGLLRKRAPISQKATASISQRAQYEESRNSQTATSPESSRPNTRVATTRNVLYTRIRWSKELNCDVMRTFYYINQCRDDALPGWRYKLHKEFQKLHPEINLSEQNIVDRKNVIVKKGYLNDSELANLRREAGNLLTEQDVSIEIIGQEVHQEVNERSQDTRKSTSAVNDGSQDTTNEEQNIIGNEEAYNNFISFLRLYENLGISERPRLLRISNKFKAEVIINKLNPVLKKHLEAVENIEEIQDAIYAAAITVLDFNGQKVISPEASQTKHSPPGKPSWAIRLQQQIDNFRAEADIIAEYLNNNTSPKVKAKIEKIRHHLKISRNSQSMRRKLTEHRDTLRQKVRRYNEKTKRKQQNQMFIKNEKKFYKTLTSTNSPEQLNSVQNNNSDTHFQEYWESIWASNEDADLTAPWLTNVERATQNLTDMPQTTFTDMDVSQALKKAKNWKAPGYDQIHNFWLKKFTASHESLARCFTKALNDPTTLPRHISEGITYLIHKKGDQNNPHNYRPITCLSVFYKLLTAMINDKIYQHCESNNIFAFEQKGCIRKAMGCKEQLLIDSVIMKKAQAQKRNLHTCYIDYSKTFDSIPHNWLLKILDIYKISDNVKAMLTYIMKLWRITLKLNNKNIRKGDIRCGIYQGDSLSPMWFCLALNPLSQLLNNTNACFRIKMRDRTGYSHLPYVDDLKLYAESKQQLESLLTVTQQFSDDIKMNFGLDKCATIEIKKGHVVKTEENFMNIPCLEPDDTYKYLGIQQNLGIPHTNLKKEAMEKYKSRPTKLLNTKLNSKNLTRAINCWAIPTLSYSFGILKWSDTDLDELDKTTRRTLTKFRCLHPNSSIQRLYMPRSEGGRGLLNIKSLCKSQERKMREYFLQHTHPNIQTVVEHDQAYTPLNLASPQLEFQIESHSSRINNWEEKILHGKYPLQLAAAHIDKTTSISFLKYGNLHPETEGFMLAIQDRIMRTRNYEKHILKTDTIDVCRKCAKPGETIEHITGACSALADTDYLCRHNQVAKIIHSRLALRCKLIKSSLPYYKYTPDAVLESDQHLLYWDRPIITDKTVDYNRPDILLINKSEKVAWIIDIGIPLTHNIFKTEQEKCRKYTNLAIEVKRIWNLNKVSIVPLIISTEGVCTTNLSPNLAKLELQKGLRYPMQKAVILQTCHLVRKFLSI

SEQ ID NO: 26092 - protein, 1110 aa, Plectus sambesii
MSLSYCTLTVPLAPPHGCALCMPVPRKYSDHNGLAKHLKQHHPGHTLNFACCKCGLTFADLKKAKAHIKANTVCAAAADICATVETGPASPLRRIPFGPRRRGRAADIIDTVHDDVVDAVDVNDDVECVPMLPQSPPGPSRAVDCHPWPSTSSDCQHSLPALATQVEVELIAVSAGQSRWVMSFASVSTVEDFEAKLNEFIAEKSETADTVRSASAQQSQRTTLAPSAPRPSVQTDIPTAAASNRQRGRSVPEYDAASASKIQKLYRLNRAKAFRAITAQSSPFCSIDKARLCQHFSQVSGTVGDTEAALPEEVPLFPPVQGDNDPLSGPLTTTEVWAKLRKCPNTAPGPDGIRYNTWRRKDLGGHMLTAIFNAAHRLKYVPRQWLKSTTILLHKKGDRDDVTNWRPIALSNTIGKIYSSVMAARLTQWMIANNRISPAQKGFMPYEGCLEHNFVLQTCIQDARRSGRPGTVAWLDLKNAFGSVPHSTILRCMQWTGLSADSIEVVQRLYDGCVTNVRTMDGLTDDIPILSGVKQGCPLSPIVFNIAIEPIIRAVQRLQRGYLLHGVKHDVLAYADDLVLISGSVAGLQRMLDTTSRVATWAGLTFNPLKCASLHVDGKKRRAPRTRFSIQHGTMLALGIDDFYEHLGVPTGFTTHQSALEMLKRMKEEVRQVDGSLLAPWQKFDAVNTFVLPRLSFHLKCGSVPKTPLNELDKQVKAVGKKWLCLPQRASAEILYMSYKSGGQNLLPTGLLADISQLVHAMRLFTSKDASIQQLALSTLVAVVRKRVRREVRAGDVSAYLNGSMEGDLRLETTDVSSMWTRLRSATRRLRTKLAVEWRDSGAGVELVLDNVTLVRSQAESRLRSAVRERYLRHLIAKPDQGKVIEVTAATSASNHFMRTGSFTRFAEWRFIHRARLGVVPLNGCRRFGSGDTRCRRCGASNETLPHVLNHCRPHFSTMVRRHDAILDRLEKALHKSPATVVRRNMQVPGCDGSLRPDLVVTNEVDMTATIVDVTVPFENRREAFVAARAEKKRKYAEIARHYQALGYKTFLDAFVVGTLGGYDSANAAVLVRLGISRYYAVLMKRLMVTDTVRWSRDIYTEHVTGHRQY

SEQ ID NO: 26093 - protein, 1110 aa, Folsomia candida
MDGGEEDSPTSPSPEELNTSLLGRIRRIGSSWLGGGSATAPPPAEDVNASLLTITTARKRGRPPKTPNTPVASNFPPDSLPQGDEPGPSTLDPSRLAVKAPRPPRKSVSPSTRADATADATNWLLERIRVSDNPSSFILKSTLMERYTSYCEEKGTEPLIDASIGKEVRKCFPAAITKRQVGRNSWWGIMWEEDALQQQQQSQQQQQSQQQQHHQARFREDLANLHVSIPTLRRVPKGARLIVAQALTKTVNEVTTTNSEEAWEALLLFPCHVLQVPRKSDKVVNLTKWVKDLAHRWETDRKSTTPAPRVPRPPLSLEQQQQQFAKKVEAKLSDGDVRGAIRLITSDDIIAPNNEDTLTALIAKHPPHPEPSNFPVPPKLIPCPAIEDDQLRAATASFAPGTAGGLDGLRPQILLFSPTLGQGEEDLIKAIKGLLELMLRGEVPETICPIFYGASLTALLKKTGGIRPVAVGNVWRRLLAKIVAHRITPNVLEYVAPHQLGEGVRAGAEAGAHASRIFFNATHHTPQAFLKMDFRNAFNEIRRDTLLNIVKEKYPEYFPFISQCHLPSTLFYGTTPIPSLRGCQQGDPLGPALFSLVVHPILQAIRTVLNIWYLDDATVADCPAKVLEALATVVKMGEEVGLHLNTAKCEVGFLGATPLQEAELWAEFQHAAPGIQPILPETATLLGSPITDEAIDLLLGKKTEDLATLSSRLRDLTSHSAFYILRASISTPRLIYFLRCAPSWTKKGLLQEYDSTLKGALETTLNCDLSPDAWLQSSLPVKMGGLGVTHAVDTAMPCFIASCHSTLPLVSSLMPEDIIASDTTLEEAEQEWITATDGAEKPPDTLVGSQAAWERPLHDLAITQLHERATEPEDKARLLAAVQPHTGAWLNTFPSPQLGTHLPNEAFRVATALRLGCDICVPHKCPCGEKVTAKGYHGLKCRKSVGRHSRHSAANGIITRALRSAEVPCIKEPPGCARADGLTMVPWTRGRSLVWDFTCADTFAPSYLPSTTKRPGAAAEKANEMKKKKYDFLRDRFLFIPVAMETTGVFAMEGLRLIEAIGERIAATTGEGRATSFLIQRMSVAVQRGNVAAVLGTLPPGKELEEVFSL

SEQ ID NO: 26094 - protein, 941 aa, Tinea semifulvella
MLGSASQPEFFQCQQCDDGRFFKGRRGLKIHTTRCHSLPLSCPLISQPSISANSTFNNNNNVPTFDSIITRLHLTTPVVKRIPRGARISLAGSLSMAIQNCLSNTQAAWENLLLFAFNHFHINQKENGSLTSKLKSNCSNPKLPQYHNSSSFKNYNIKNIIESKVMDGDLRNAARILFSSDTLASSNNETLEALRSKHPSPDPASNLPNPPPQNSVFLQINDEDTIAALMSFPNGSAGGVDSITPQHLKDLVSRSAGDAGRRLVSDITKLCNLMLSGTVHQAILPFLYGARLCAFNKKEGGIRPIAIGNTFRRLSSKLACRHIVSTLRTKFQPVQVGFGSKGGCEAAVHSARTFIASDEVEVLLKVDVKNAFNSLDRTTLLNEAASHIPDIFPYIWQCYSSTSKLFYHEHCIESAVGVQQGDPLGPALFSLGIHHCISSLNSKFNVWYLDDGTIGGKANTVIKDLIHIKQAFLELNPSKCEIFISSNLSNNIPSIIKKFNEHAPNIKILFKDSLFLLGAPLLNEGIKPFLDNKFKLFSENSNRLGVLNSHIAFTLLKNCLFVPKLIYALRASPIWKFPALLDQLDATLKETVEKILNLSFDEISWSQATLPVKFGGIGVRKISSIASPAFLSSVHSVKDLSSKILNQNRIELTCALEAIRAWKIKCPNDDIPKESNFQKLWDTPLVQNTYKHLAQNPISDQHRARLLASVEKESGHWLHALPSANLGTLLDDESFRIAVGLRLGAPLCILHRCPCGKEVDCLGVHGLSCSKSAGRFSRHGSLNDTIKRALATIEVPALLEPVGVIRDDGKRPDGMTLVPWERGRALVWDATCVDTLAASHLRGTAHKAGAAAENAESSKRRKYVSILKDYIFVPFAVETLGPWSPSAKKFLKDITPRLVVSSGDKRAGSFFAQRISIAIQRGNAASVLATIPRGRDLYPYP

SEQ ID NO: 26095 - protein, 945 aa, Tinea semifulvella
MLGSASQPEFFQCQQCDDGRFFKGRRGLKIHTTRCHSLPLSCPPISQPSISANSTFNNNNNVPTFDSIITRLHLTTPVVKRIPRGARISLAGSLSMAIQNCLSNTQAAWENLLLFAFNHFHINQKENGSLTSKLKSNCSNPKLPQYHNSSSFKNYNIKNIIESKVMDGDLRNAARILFSSDTLASSNNETLEALRSKHPSPDPASNLPNPPPQNSVFLQINDEDTIAALMSFPNGSAGGVDSITPQHLKDLVSRSAGDAGRRLVSDITKLCNLMLSGTVHQAILPFLYGARLCAFNKKEGGIRPIAIGNTFRRLSSKLACRHIVSTLRTKFQPVQVGFGSKGGCEAAVHSARTFIASDEVEVLLKVDVKNAFNSLDRTTLLNEAASHIPDIFPYIWQCYSSPSKLFYHEHCIESAVGVQQGDPLGPALFSLGIHHCISSLNSKFNVWYLDDGTIGGKANTVIKDLIHIKQAFQEIGLELNPSKCEIFISSNLSNNIPSIIKKFNEHAPNIKILFKDSLFLLGAPLLNEGIKPFLDNKFKLFSENSNRLGVLNSHIAFTLLKNCLFVPKLIYALRASPIWKFPALLDQLDATLKKTLEKILNLSFDEISWSQATLPVKFGGIGVRKISSIALPAFLSSVHSVQDLSSKILNQNRIELTCALEAIRAWKIKCPNDDIPKESNFQKLWDTPLVQNTYKHLAQNPISDQHRARLLASVEKESGHWLHALPSANLGTLLDDESFRIAVGLRLGAPLCILHRCPCGKEVDCLGVHGLSCSKSAGRFSRHGSLNDTIKRALATIEVPALLEPVGVIRDDGKRPDGMTLVPWERGRALVWDATCVDTLAASHLRGTAHKAGAAAENAESSKRRKYVSILKDYIFVPFAVETLGPWSPSAKKFLKDITPRLVVSSGDKRAGSFFAQRISIAIQRGNAASVLATIPRGRDLYPYP

SEQ ID NO: 26096 - protein, 945 aa, Tinea semifulvella
MLGSASQPEFFQCQQCDDGRFFKGRRGLKIHTTRCHSLPLSCPLISQPSISANSTFNNNNNVPTFDSIITRLHLTTPVVKRIPRGARISLAGSLSMAIQNCLSNTQAAWENLLLFAFNHFHINQKENGSLTSKLKSNCSNPKLPQYHNSSSFKNYNIKNIIESKVMDGDLRNAARILFSSDTLASSNNETLEALRSKHPSPDPASNLPNPPPQNSVFLQINDEDTIAALMSFPNGSAGGVDSITPQHLKDLVSRSAGDSGRRLVSDITKLCNLMLSGTVHQAILPFLYGARLCAFNKKEGGIRPIAIGNTFRRLSSKLACRHIVSTLRTKFQPVQVGFGSKGGCEAAVHSARTFIASDEVEVLLKVDVKNAFNSLDRTTLLNEAASHIPDIFPYIWQCYSSPSKLFYHEHCIESAVGVQQGDPLGPALFSLGIHHCISSLNSKFNVWYLDDGTIGGKANTVIKDLIHIKQAFQEIGLELNPSKCEIFISSNLSNNIPSIIKKFNEHAPNIKILFKDSLFLLGAPLLNEGIKPFLDNKFKLFSENSNRLGVLNSHIAFTLLKNCLFVPKLIYALRASPIWKFPALLDQLDATLKETLEKILNLSFDEISWSQATLPVKFGGIGVRKISSIALPAFLSSVHSVQDLSSKILNQNRIELTCALEAIRAWKIKCPNDDIPKESNFQKLWDTPLVQNTYKHLAQNPISDQHRARLLASVEKESGHWLHALPSANLGTLLDDESFRIAVGLRLGAPLCILHRCPCGKEVDCLGVHGLSCSKSAGRFSRHGSLNDTIKRALATIEVPALLEPVGVIRDDGKRPDGMTLVPWERGRALVWDATCVDTLAASHLRGTAHKAGAAAENAESSKRRKYVSILKDYIFVPFAVETLGPWSPSAKKFLKDITPRLVVSSGDKRAGSFFAQRISIAIQRGNAASVLATIPRGRDLYPYP

SEQ ID NO: 26097 - protein, 945 aa, Tinea semifulvella
MLGSASQPEFFQCQQCDDGRFFKGRRGLKIHTTRCHSLPLSCPLISQPSISANSTFNNNNNVPTFDSIITRLHLTTPVVKRIPRGARISLAGSLSMAIQNCLSNTQAAWENLLLFAFNHFHINQKENGSLTSKLKSNCSNPKLPQYHNSSSFKNYNIKNIIESKVMDGDLRNAARILFSSDTLASSNNETLEALRSKHPSPDPASNLPNPPPQNSVFLQINDEDTIAALMSFPNGSAGGVDSITPQHLKDLVSRSAGDSGRRLVSDITKLCNLMLSGTVHQAILPFLYGARLCAFNKKEGGIRPIAIGNTFRRLSSKLACRHIVSTLRTKFQPVQVGFGSKGGCEAAVHSARTFIASDEVEVLLKVDVKNAFNSLDRTTLLNEAASHIPDIFPYIWQCYSSPSKLFYHEHCIESAVGVQQGDPLGPALFSLGIHHCISSLNSKFNVWYLDDGTIGGKANTVIKDLIHIKQAFQEIGLELNPSKCEIFISSNLSNNIPSIIKKFNEHAPNIKILFKDSLFLLGAPLLNEGIKPFLDNKFKLFSENSNRLGVLNSHIAFTLLKNCLFVPKLIYALRASPIWKFPALLDQLDATLKETLEKILNLSFDEISWSQATLPVKFGGIGVRKISSIALPAFLSSVHSVQDLSSKILNQNRIELTCALEAIRAWKIKCPNDDIPKESNFQKLWDTPLVQNTYKHLAQNPISDQHRARLLASVEKESGHWLHALPSANLGTLLDDESFCIAVGLRLGAPLCILHRCPCGKEVDCLGVHGLSCSKSAGRFSRHGSLNDTIKRALATIEVPALLEPVGVIRDDGKRPDGMTLVPWERGRALVWDATCVDTLAASHLRGTAHKAGAAAENAESSKRRKYVSILKDYIFVPFAVETLGPWSPSAKKFLKDITPRLVVSSGDKRAGSFFAQRISIAIQRGNAASVLATIPRGRDLYPYP

SEQ ID NO: 26098 - protein, 945 aa, Tinea semifulvella
MLGSASQPEFFQCQQCDDGRFFKGRRGLKIHTTRCHSLPLSCPLISQPSISANSTFNNNNNVPTFDSIITRLHLTTPVVKRIPRGARISLAGSLSMAIQNCLSNTQAAWENLLLFAFNHFHINQKENGSLTSKLKSNCSNPKLPQYHNSSSFKNYNIKNIIESKVMDGDLRNAARILFSSDTLASPNNETLEALRSKHPSPDPASNLPNPPPQNSVFLQINDEDTIAALMSFPNGSAGGVDSITPQHLKDLVSRSAGDAGRRLVSDITKLCNLMLSGKVHQAILPFLYGARLCAFNKKEGGIRPIAIGNTFRRLSSKLACRHIVSTLRTKFQPVQVGFGSKGGCEAAVHSARTFIASDEVEVLLKVDVKNAFNSLDRTTLLNEAASHIPDIFPYIWQCYSSPSKLFYHEHCIESAVGVQQGDPLGPALFSLGIHHCISSLNSKFNVWYLDDGTIGGKANTVIKDLIHIKQAFQEIGLELNPSKCEIFISSNLSNNIPSIIKKFNEHAPNIKILFKDSLFLLGAPLLNEGIKPFLDNKFKLFSENSNRLGVLNSHIAFTLLKNCLFVPKLIYALRASPIWKFPALLDQLDATLKETLEKILNLSFDEISWSQATLPAKFGGIGVRKISSIALPAFLSSVHSVQDLSSKILNQNRIELTCALEAIRAWKIKCPNDDIPKESNFQKLWDTPLVQNTYKHLAQNPISDQHRARLLASVEKESGHWLHALPSANLGTLLDDESFRIAVGLRLGAPLCILHRCPCGKEVDCLGVHGLSCSKSAGRFSRHGSLNDTIKRALATIEVPALLEPVGVIRDDGKRPDGMTLVPWERGRALVWDATCVDTLAASHLRRTAHKAGAAAENAESSKRRKYVSILKDYIFVPFAVETLGPWSPSAKKFLKDITPRLVVSSGDKRAGSFFAQRISIAIQRGNAASVLATIPRGRDLYPYP

SEQ ID NO: 26099 - protein, 907 aa, Tinea semifulvella
MLGSASQPEFFQCQQCDDGRFFKGRRGLKIHTTRCHSLPLSCPLISQPSISANSTFNNNNNVPTFDSIITRLHLTTPVVKRIPRGARISLAGSLSMAIQNCLSNTQAAWENLLLFAFNHFHINQKENGSLTSKLKSNCSNPKLPQYHNSSSFKNYNIKNIIESKVMDGDLRNAARILFSSDTLASSNNETLEALRSKHSSPDPASNLPNPPPQNSVFLQINDEDTIAALMSFPNGSAGGVDSITPQHLKDLVSRSAGDAGRRLVSDITKLCNLMLSGTVHQAILPFLYGARLCAFNKKEGGIRPIAIGNTFRRLSSKLACRHIVSTLRTKFQPVQVGFGSKGGCEAAVHSARTFIASDEVEVLLKVDVKNAFNSLDRTTLLNEAASHIPDIFPYIWQCYSSPSKLFYHEHCIESAVGVQQGDPLGPALFSLGIHHCISSLNSKFNVWYLDDGTIGGKANTVIKDLIHIKQAFQEIGLELNPSKCEIFISSNLSNNIPSIIKKFNEHAPNIKILFKDSLFLLGAPLLNEGIKPFLDNKFKLFSENSNRLGVLNSHIAFTLLKNCLFVPKLIYALRASPIWKFPALLDQLDATLKETLEKILNLSFDEISWSQATLPVKFGGIGVRKISSIALPAFLSSVHSVQDLSSKILNQNRIELTCALEAIRAWKIKCPNDDIPKESNFQKLWDTPLVQNTYKHLAQNPISDQHRARLLASVEKESGHWLHALPSANLGTLLDDESFRIAVGLRLGAPLCILHRCPCGKEVDCLGVHGLSCSKSAGRFSRHGSLNDTIKRALATIEVPALLEPVGVIRDDGKRPDGMTLVPWERGRALVWDATCVDTLTASHLRGTAHKAGAAAENAESSKRRKYVSILKDYIFVPFAVETLGPWSPSAKKVFKRHNTASCCLLR

SEQ ID NO: 26100 - protein, 945 aa, Tinea semifulvella
MLGSASQPEFFQCQQCDDGRFFKGRRGLKIHTTRCHSLPLSCPLISQPSISANSTFNNNNNVPTFDSIITRLHLTTPVVKRIPRGARISLAGSLSMAIQNCLSNTQAAWENLLLFAFNHFHINQKENGSLTSKLKSNCSNPKLPQYHNSSSFKNYNIKNIIESKVMDGDLRNAARILFSSDTLASPNNETLEALRSKHPSPDPASNLPNPPPQNSVFLQINDEDTIAALMSFPNGSAGGVDSITPQHLKDLVSRSAGDAGRRLVSDITKLCNLMLSGTVHQAILPFLYGARLCAFNKKEGGIRPIAIGNTFRRLSSKLACRHIVSTLRTKFQPVQVGFGSKGGCEAAVHSARTFIASDEVEVLLKVDVKNAFNSLDRTTLLNEAASHIPDIFPYIWQCYSSPSKLFYHEHCIESAVGVQQGDPLGPALFSLGIHHCISSLNSKFNVWYLDDGTIGGKANTVIKDLIHIKQAFQEIGLELNPSKCEIFISSNLSNNIPSIIKKFNEHAPNIKILFKDSLFLLGAPLLNEGIKPFLDNKFKLFSENSNRLGVLNSHIAFTLLKNCLFVPKLIYALRASPIWKFPALLDQLDATLKETLEKILNLSFDEISWSQATLPVKFGGIGVRKISSIALPAFLSSVHSVQDLSSKILNQNRIELTCALEAIRAWKIKCPNDDIPKESNFQKLWDTPLVQNTYKHLAQNPISDQHRARLLASVEKESGHWLHALPSANLGTLLDDESFRIAVGLRLGAPLCILHRCPCGKEVDCLGVHGLSCSKSAGRFSRHGSLNDTIKRALATIEVPALLEPVGVIRDDGKRPDGMTLVPWERGRALVWDATCVDTLAASHLRGTAHKAGAAAENAESSKRRKYVSILKDYIFVPFAVETLGPWSPSAKKFLKDITPRLVVSSGDKRAGSFFAQRISIAIQRGNAASVLATIPRGRDLYPYP

SEQ ID NO: 26101 - protein, 850 aa, Tinea semifulvella
MAIQNCLSNTQAAWENLLLFAFNHFHINQKENGSLTSKLKSNCSNPKLPQYHNSSSFKNYNIKNIIESKVMDGDLRNAARILFSSDTLASSNNETLEALRSKHPSPDPASNLPNPPPQNSVFLQINDEDTIAALMSFPNGSAGGVDSITPQHLKDLVSRSAGDSGRRLVSDITKLCNLMLSGTVHQAILPFLYGARLCAFNKKEGGIRPIAIGNTFRRLSSKLACRHIVSTLRTKFQPVQVGFGSKGGCEAAVHSARTFIASDEVEVLLKVDVKNAFNSLDRTTLLNEAASHIPDIFPYIWQCYSSPSKLFYHEHCIESAVGVQQGDPLGPALFSLGIHHCISSLNSKFNVWYLDDGTIGGKANTVIKDLIHIKQAFQEIGLELNPSKCEIFISSNLSNNIPSIIKKFNEHAPNIKILFKDSLFLLGAPLLNEGIKPFLDNKFKLFSENSNRLGVLNSHIAFTLLKNCLFVPKLIYALRASPIWKFPALLDQLDATLKETLEKILNLSFDEISWSQATLPVKFGGIGVRKISSIALPAFLSSVHSVQDLSSKILNQNRIELTCALEAIRAWKIKCPNDDIPKESNFQKLWDTPLVQNTYKHLAQNPISDQHRARLLASVEKESGHWLHALPSANLGTLLDDESFRIAVGLRLGAPLCILHRCPCGKEVDCLGVHGLSCSKSAGRFSRHGSLNDTIKRALATIEVPALLEPVGVIRDDGKRPDGMTLVPWERGRALVWDATCVDTLAASHLRGTAHKAGAAAENAESSKRRKYVSILKDYIFVPFAVETLGPWSPSAKKFLKDITPRLVVSSGDKRAGSFFAQRISIAIQRGNAASVLATIPRGRDLYPYP

SEQ ID NO: 26102 - protein, 943 aa, Tinea semifulvella
MLGSASQPEFFQCQQCDDGRFFKGRRGLKIHTTRCHSLPLSCPLISQPSISANSTFNNNNNVPTFDSIITRLHLTTPVVKRIPRGARISLAGSLSMAIQNCLSNTQAAWGNLLLFAFNHFHINQKENGSLTSKLKSNCSNPKLPQYHNSSSFKNYNIKNIIESKVMDGDLRNAARILFSSDTLASPNNETLEALRSKHPSPDPASNLPNPPPQNSVFLQINDEDTIAALMSFPNGSAGGSITPQHLKDLVSRSAGDAGRRLVSDITKLCNLMLSGTVHQAILPFLYGARLCAFNKKEGGIRPIAIGNTFRRLSSKLACRHIVSTLRTKFQPVQVGFGSKGGCEAAVHSARTFIASDEVEVLLKVDVKNAFNSLDRTTLLNEAASHIPDIFPYIWQCYSSPSKLFYHEHCIESAVGVQQGDPLGPALFSLGIHHCISSLNSKFNVWYLDDGTIGGKANTVIKDLIHIKQAFQEIGLELNPSKCEIFISSNLSNNIPSIIKKFNEHAPNIKILFKDSLFLLGAPLLNEGIKPFLDNKFKLFSENSNRLGVLNSHIAFTLLKNCLFVPKLIYALRASPIWKFPALLDQLDATLKETLEKILNLSFDEISWSQATLPVKFGGIGVRKISSIALPAFLSSVHSVQDLSSKILNQNRIELTCALEAIRAWKIKCPNDDIPKESNFQKLWDTPLVQNTYKHLAQNPISDQHRARLLASVEKESGHWLHALPSANLGTLLDDESFRIAVGLRLGAPLCILHRCPCGKEVDCLGVHGLSCSKSAGRFSRHGSLNDTIKRALATIEVPALLEPVGVIRDDGKRPDGMTLVPWERGRALVWDATCVDTLAASHLRGTAHKAGAAAENAESSKRRKYVSILKDYIFVPFAVETLGPWSPSAKKFLKDITPRLVVSSGDKRAGSFFAQRISIAIQRGNAASVLATIPRGRDLYPYP

SEQ ID NO: 26103 - protein, 945 aa, Tinea semifulvella
MLGSASQPEFFQCQQCDDGRFFKGRRGLKIHTTRCHSLPLSCPLISQPSISAISTFNNNNNVPTFDSIITRLHLTTPVVKRIPRGARISLAGSLSMAIQNCLSNTQAAWENLLLFAFNHFHINQKENGSLTSKLKSNCSNPKLPQYHNSSSFKNYNIKNIIESKVMDGDLRNAARILFSSDTLASSNNETLETLRSKHPSPDPASNLPNPPPQNSAFLQINDEDTIAALVSFPNGSAGGVDSITPQHLKDLVSRSAGDAGRRLVSDITKLCNLMLSGTVHQAILPFLYGARLCAFNKKEGGIRPIAIGNTFRRLSSKLACRHIVSTLRTKFQPVQVGFGSKGGCEAAVHSARTFIASDEMEVFLKVDVRNAFNSLDRTTLLNEAASHIPDIFLYIWQCYSSPSKLFYDEHCIDSAVGVQQGDPLSPALFSLGIHHCISSLNSKFNVWYLDDGTIGGKANTVINDLIHIKQAFQEIGLELNPSKCEIYIGSNLSNNIPSIIKKINEHAPNIKILFKDSLFLLGAPLLNEGIKPFLDNKIKLFSENSNRLGVLNSHIAFTLLKNCLFVPKLIYALRASPIWKFPALLDQLDATLKDTLEKILNISFDEIFRSQATLPVKFGGIGVRKISSIALPAFLSSVHSVQDLSSKILNQNCVELTSALEAIRAWKIKCPNDDIPKESNFQKLWDTPLVQNTYKHLAQNPISDQHRARLLASVEKESGHWLHALPSANLGTLLDDESFRIAVGLRLGAPLCVLHRCPCGKEVDCLGVHGLSCSKSAGRFSRHGSLNDIIKRALATIEVPALLEPVGVIRDDGKRPDGMTLVPWERGRALVWDATCVDTLAESHLRGTAHKAGAAAENAESSKRRKYVSILKDYIFVPFAVETLGPWSPSAKKFLKDITPRLVVSSGDKRAGSFFAQRISIAIQRGNAASVLATIPRGRDLYPYP

SEQ ID NO: 26104 - protein, 945 aa, Tinea semifulvella
MLGSASQPEFFQCQQCDDGRFFKGRRGLKIHTTRCHSLPLSCPLISQPSISANSTFNNNNNVPTFDSIITRLHLTTPVVKRIPRGARISLAGSLSMAIQNCLSNTQAAWENLLLFASNHFHINQKENGSLTSKLKSNCSNPKLPQYHNSSSFKNYNIKNIIESKVMDGDLRNAARILFSSDTLASSNNETLEALCSKHPSPDPASNLPNPPPQNSVFLQINDEDTIAALMSFPNGSAGGVDSITPQHLKDLVSRSAGDSGRRLVSDITKLCNLMLSGTVHQAILPFLYGARLCAFNKKEGGIRPIAIGNTFRRLSSKLACRHIVSTLRTKFQPVQVGFGSKGGCEAAVHSARTFIASDEVEVLLKVDVKNAFNSLDRTTLLNEAASHIPDIFPYIWQCYSSPSKLFYHEHCIESAVGVQQGDPLGPALFSLGIHHCISSLNSKFNVWYLDDGTIGGKANTVIKDLIHIKQAFQEIGLELNPSKCEIFISSNLSNNIPSIIKKFNEHAPNIKILFKDSLFLLGAPLLNEGIKPFLDNKFKLFSENSNRLGVLNSHIAFTLLKNCLFVPKLIYALRASPIWKFPALLDQLDATLKETLEKILNLSFDEISWSQATLPVKFGGIGVRKISSIALPAFLSSVHSVQDLSSKILNQNRIELTCALEAIRAWKIKCPNDDIPKESNFQKLWDTPLVQNTYKHLAQNPISDQHRARLLASVEKESGHWLHALPSANLGTLLDDESFRIAVGLRLGAPLCILHRCPCGKEVDCLGVHGLSCSKSAGRFSRHGSLNDTIKRALATIEVPALLEPVGVIRDDGKRPDGMTLVPWERGRALVWDATCVDTLAASHLRGTAHKAGAAAENAESSKRRKYVSILKDYIFVPFAVETLGPWSPSAKKFLKDITPRLVVSSGDKRAGSFFAQRISIAIQRGNAASVLATIPRGRDLYPYP

SEQ ID NO: 26105 - protein, 850 aa, Tinea semifulvella
MAIQNCLSNTQAAWENLSLFAFNHFHINQKENGSLTSKLKSNCSNPKLPQYHNSSSFKNYNIKNIIESKVMDGDLRNAARILFSSDTLASSNNETLEALRSKHPSPDPASNLPNPPPQNSAFLQINDEDTIAALMSFPNGSAGGVDSITPQHLKDLVSRSAGDAGRRLVSDITKLCNLMLSGTVHQAILPFLYGARLCAFNKKEGGIRPIAIGNTFRRLSSKLACRHIVSTLRTKFQPIQVGFGSKGGCEAAVHSARTFIASDEMEVFLKVDVKNAFNSLDRTTLLNEAASHIPDIFPYIWQCYSSPSKLFYDEHCIDSAVGVQQGDPLGPALFSLGIHHCISSLNSKFNVWYLDDGTIGGKASTVINDLIHIKQAFQEIGLELNPSKCEIYIGSNLSNNIPSIIKKFNEHAPNIKILFKDSFFLLGAPLLNEGIKPFLDNKIKLFSENSNRLGVLNSHIAFTLLKNCLFVPKLIYALRASPIWKFPALLDQLDATLKDTLEKILNLSFDEISWSQATLPVKFGGIGVRKISSIALPAFLSSVHSVQDLGSKILNQNSVELTCALEAIRAWKIKCPNDDIPKESNFQKLWDTPLVQNTYKHLAQNPISDQHRARLLASVEKESGHWLHALPSADLGTLLDDESFRIAVGLRLGAPLCVLHRCPCGKEVDCLGVHGLSCSKSAGRFSRHGSLNDIIKRALATIEVPALLEPVGVIRDDGKRPDGMTLVPWERGRALVWDATCVDTLAASHLRGTAHKAGAAAENAESSKRRKYVSILKDYIFVPFAVETLGPWSPSAKKFLKDITPRLVVSSGDKRAGSFFAQRISIAIQRGNAASVLATIPRGRDLYSYP

SEQ ID NO: 26106 - protein, 963 aa, Tinea semifulvella
MGDDNNNSSIISGNTSNFIKCNLCTDNKLYKGKRGIARHLAWHRSRLDTNINHNIPSTSTDTINQNITSSQHENEPLWQKLCKCKNNIPVIKRIPRGARLTVSKNLTETICEVIKNNSVASWEKLLTFSYRVLHINSAKDNKKKSVTSLIKSNINNISLPLFLPNKGNKYDVSKKVEEKVSDGDLRGAARLLFSDDKTAPLNTDTLNALKMKHPQSFSSEISFEPLNPNQQQVEATIGNIINAISSFPSGSAGGLDSLTPQHLKDLTSKQTGENGCLLISAICSLINLMLSGKVNIEIAPILYGANLIALEKKCGGIRPIAVGFTFRRLASKLCCKSIQESLNNIFEPIQLGVGSKGGCEAAIHAARSFLSSFKNKVFLKLDIKNAFNSISREYFIKEVKEKIPSIYNYVWQSYSNSSKLIYNKNEISSSVGCQQGDPLGPALFSLAIHPIIKNLQSQFNIWYLDDGSLAGEIDSVLNDFSTIINKFSELGLEINSNKCEIFLSETFSTIEKTDIINKFSRLAPNIKQINMDNFFLLGSPIFDSGIPNLIEEKLEQFNNISDRFSKISSHIALFIFRFCLFAPKYMYFLRTTPLWKFSEQIQKIDTTLKINLEKILNLKFDSNSWLQATLPVNFGGLGIRRIESLALPAFLSSGYGALNLVGKILNPLDCTVEVSGLSEAKDAWSALCPDNIPINTKVQRLWDIPLIKIIHNELLHSNNCAEQARLLAVSEKESGLWLNALPSKNIGTILDNHTLRICVCLRLGLSVCEPHYCPCGKDVDCLGRHGLSCFKSAGRFYRHSSINNLIRRSFASISIPATLEPTGLFRDDGKRPDGMTLVPWSLGKSLVWDVTCVDTLATSHLQGTTVRAGAAAEQAQNVKRRKYINICNDYIFVAFAVETMGPWGLEAKTLFKEISKKLVDVSGDPRAGSFLAEKISIEIQRGNAASVLGTMPLDNGLEEIFIL

SEQ ID NO: 26107 - protein, 963 aa, Tinea semifulvella
MGDDNNNSSIISGNTSNFIKCNLCTDNKLYKGKRGIARHLAWHRSRLDTNINHNIPSTSTDTINQNITSSQHENEPLWQKLCKCKNNIPVIKRIPRGARLTVSKNLTETICEVIKNNSVASWEKLLTFSYRVLHINSAKDNKKKSVTSLIKSNINNISLPLFLPNKGNKYDVSKKVEEKVSDGDLRGAARLLFSDDKTAPLNTNTLNALKMKHPQSFSSEISFEPLNPNQQQVEATIGNIINAISSFPSGSAGGLDSLTPQHLKDLTSKQTGENGCLLISAICSLINLMLSGKVNIEIAPILYGANLIALEKKCGGIRPIAVGFTFRRLASKLCCKSIQESLNNIFEPIQLGVGSKGGCEAAKHAARSFLSSFKNKVFLKLDIKNAFNSISREYFIKEVKEKIPSIYNYVWQSYSNSSKLIYNKNEISSSVGCQQGDPLGPALFSLAIHPIIKNLQSQFNIWYLDDGSLAGEIDSVLNDFSTIINKFSELGLEINSNKCEIFLSETFSTIEKTDIINKFSRLAPNIKQINMDNFFLLGSPIFDSGIPNLIEEKLEQFNNISDRFSKISSHIALFIFRFCLFAPKYMYFLRTTPLWKFSEQIQKIDTTLKINLEKILNLKFDSNSWLQATLPVNFGGLGIRRIESLALPAFLSSGYGALNLVGKILNPLDCNVEVSGLSEAKDAWSALCPDNIPINTKVQRLWDIPLIKIIHNELLHSNNCAEQARLLAVSEKESGLWLNALPSKNIGTILDNHTLRICVCLRLGLSVCEPHYCPCGKDVDCLGRHGLSCFKSAGRFYRHSSINNLIRRSFASISIPATLEPTGLFRDDGKRPDGMTLVPWSLGKSLVWDVTCVDTLATSHLQGTTVRAGAAAEQAQNVKRRKYINICNDYIFVAFAVETMGPWGLEAKTLFKEISKKLVDVSGDPRAGSFLAEKISIEIQRGNAASVLGTMPLDNGLEEIFIL

SEQ ID NO: 26108 - protein, 1010 aa, Cerceris rybyensis
MNLDNCAGRPSGRSGPTTQVEMPTPEAFTCKMPGCGRSFSTKKGCGVHEQHMHKNWYDQQQITADRTVKAHWCAEELALMARHEARFTLDGVRFLNQALLPVLPGRSLEGIKGQRRTQRYKCLVTRFIEELSNESRPETSNVSRAGSPDRSAIAGDLNYNILMALSTLEPIDIDGFHAETLNNICRCCTSWDLDRISVELEIYLTKVFPPSTKKHKKAQTNLNSLRTRRQARRAEYARTQQTWTKNPWRCLRSLLTNATTNSIPKREIMVPFWKAVMTGNNDQSSLPEAVSAPISKLWEPILPDEVAKCLPSTSTAPGPDGLTAKLLKATPSSVLARVFNLFMATGRIPKYLLEARTTLIPKKDGAAEPGEFRPITVPSVLVRAFHKVLAKRVMCSVRIDKRQKAFVPVDGCLENVFDLDLVLRHCRQMFKPLYMASMDLAKAFDSVSHQALEITMRAKGFPEPMIQYIMYGYNGATTRIACDSWESEPFHPSRGVRQGDPLSPIIFNLVMDGLIERMPKEVGVDIDGRRFDVLAFADDLVLIASTPQGLQEMIDVVVDYLPRCGLALNVSKSFTVAVKNLPHIKKSAVDAKAKFTCQGKCLPALKREDHWNYLGIPFSPEGRIINKDDRDQLQQALEKLTKAPLKPQQRLFGLRVMVLPGLYHLLTLGSTNLSRLRKLDALVRNAVRKWLGLPHDTPKAYFHASAKDGGLSIPSLRWLMPLRRRERLEKLKKGDQPITSFFSQEIAKAMRRLQDGQVDLASCKLIDDRWANLLHNSVDGKALKESKKVPQQHQWITEGSRLLSGRDFVNCTKLRINAIPTKSRTSRGRRTDRLCRAGCQETETLNHVLQKCHRTHAARIKRHNALVSYVKRNLDITYDRVFEEPHFKTSDGLRKPDLVAIKGTNGLVIDAQVVSEHSDLEAAHTRKMEYYRPLKEAVMKDHKVTDVQFTSITLSARGLWSLSSSRDLLNLKLLKKKELKILSTRTLIGGIYAVRIFNRTTTSVPRTGIG

SEQ ID NO: 26109 - protein, 1010 aa, Cerceris rybyensis
MNLDNCAGRPSGRTGPTTQVEMPTPEAFTCKMPGCGRSFSTKKGCGVHEQHMHKNWYDQQQITADRTVKAHWCAEELALMARHEARFTLDGVRFLNQALLPVLPGRSLEGIKGQRRTQRYKCLVTRFIEELSNESRPETSNVSRAGSPDRSAIAGDLNYNILMALSTLEPIDIDGFHAETLNNICRCCTSWDLDRISVELEIYLTKVFPPSTKKHKKAQTNLNSLRTRRQARRAEYARTQQTWTKNPWRCLRSLLTNATTNSIPKREIMVPFWKAVMTGNNDQSSLPEAVSAPISKLWEPILPDEVAKCLPSTSTAPGPDGLTAKLLKATPSSVLARVFNLFMATGRIPKYLLEARTTLIPKKDGAAEPGEFRPITVPSVLVRAFHKVLAKRVMCSVRIDKRQKAFVPVDGCLENVFDLDLVLRHCRQMFKPLYMASMDLAKAFDSVSHQALEITMRAKGFPEPMIQYIMYGYNGATTRIACDSWESEPFHPSRGVRQGDPLSPIIFNLVMDGLIERMPKEVGVDIDGRRFDVLAFADDLVLIASTPQGLQEMIDVVVDYLPRCGLALNVSKSFTVAVKNLPHIKKSAVDAKAKFTCQGKCLPALKREDHWNYLGIPFSPEGRIINKDDRDQLQQALEKLTKAPLKPQQRLFGLRVMVLPGLYHLLTLGSTNLSRLRKLDALVRNAVRKWLGLPHDTPKAYFHASAKDGGLSIPSLRWLMPLRRRERLEKLKKGDQPITSFFSQEIAKAMRRLQDGQVDLASCKLIDDRWANLLHNSVDGKALKESKKVPQQHQWITEGSRLLSGRDFVNCTKIRINAIPTKSRTSRGRRTDRLCRAGCQETETLNHVLQKCHRTHAARIKRHNALVSYVKRNLDITYDRVFEEPHFKTSDGLRKPDLVAIKGTNGLVIDAQVVSEHSDLEAAHTRKMEYYRPLKEAVMKDHKVTDVQFTSITLSARGLWSLSSSRDLLNLKLLKKKELKILSTRTLIGGIYAVRIFNRTTTSVPRTGIG

SEQ ID NO: 26110 - protein, 1010 aa, Cerceris rybyensis
MNLDNCAGRPSGRTGPTTQVEMPTPEAFTCKMPGCGRSFSTKKGCGVHEQHMHKNWYDQQQITADRTVKAHWCAEELALMARHEARFTLDGVRFLNQALLPVLPGRSLEGIKGQRRTQRYKCLVTRFIEELSNESRPETSNVSRAGSPDRSAIAGDLNYNILMALSTLEPIDIDGFHAETLNNICRCCTSWDLDRISVELEIYLTKVFPPSTKKHKKAQTNLNSLRTRRQARRAEYARTQQTWTKNPWRCLRSLLTNATTNSIPKREIMVPFWKAVMTGNNDQSSLPEAVSAPISKLWEPILPDEVAKCLPSTSTAPGPDGLTAKLLKATPSSVLARVFNLFMATGRIPKYLLEARTTLIPKKDGAAEPGEFRPITVPSVLVRAFHKVLAKRVMCSVRIDKRQKAFVPVDGCLENVFDLDLVLRHCRQMFKPLYMASMDLAKAFDSVSHQALEITMRAKGFPEPMIQYIMYGYNGATTRIACDSWESEPFHPSRGVRQGDPLSPIIFNLVMDGLIERMPKEVGVDIDGRRFDVLAFADDLVLIASTPQGLQEMIDVVVDYLPRCGLALNVSKSFTVAVKNLPHIKKSAVDAKAKFTCQGKCLPALKREDHWNYLGIPFSPEGRIINKDDRDQLQQALEKLTKAPLKPQQRLFGLRVMVLPGLYHLLTLGSTNLSRLRKLDALVRNAVRKWLGLPHDTPKAYFHASAKDGGLSIPSLRWLMPLRRRERLEKLKKGDQPITSFFSQEIAKAMRRLQDGQVDLASCKLIDDRWASLLHNSVDGKGLKESKKVPQQHQWITEGSRLLSGRDFVNCTKLRINAIPTKSRTSRGRRTDRLCRAGCQETETLNHVLQKCHRTHAARIKRHNALVSYVKRNLDITYDRVFEEPHFKTSDGLRKPDLVAIKGTNGLVIDAQVVSEHSDLEAAHTRKMEYYRPLKEAVMKDHKVTDVQFTSITLSARGLWSLSSSRDLLNLKLLKKKELKILSTRTLIGGIYAVRIFNRTTTSVPRTGIG

SEQ ID NO: 26111 - protein, 1134 aa, Adalia bipunctata
MSSGNSTEVTQGNPALPPTRKRQHWTREMNVSLINAYFEVTEGETKTKKYAAKLAERWYEMYPDKHAGKHLIAQIRNIRSRKLLAPDEIERIKANTRRDSPSKTAERIRRSIQRRSTAALPQIGSNQDINEQQIPEPETEEMNSEIRELFQQIDLQWTGVTMEARPRIPKLNLNRNAKTTIPAVNNAMQQVFNSAADFEELCHRVYCAATVTNIIQQTKAETSTQDGSNQRKQPPWEERIEKKINSLRREIGIIHTYLNNSKPSKKLERKVQTYAHRIKLNRKETQNYERLRLHSENLKQKIAALGSRLRRYHKRTQRYRENNLFSNNQRQFFRSLDERVSSSKTKHPSQANMQKYWSSIWSQKGKHTTNATWKEQERKKHEDIQEMPEIVVCERDVEETVRRMKNWTTPGIDGIHNYWWKAFKHTHKTLASLITEALKHPHIIPEYFTQGTTIMLSKKGDLTQPNNYRPITCLPAIYKIITSTIGHRIQIHLKKNKIMAWEQNGCKEKGRGSKELLVIDNILTKQARRKLKNISMAWIDYQKAYDSIPHSWLLEVLEIYKVNKQVIGLIKSLMSTWRTTISVNSNTSKYRTPEINIEQGIFQGDSLSPLLFCLALNPLSNMLNRSAYGYSIDQHTTLTHLFYMDDVKLYARGRKQLEGLLELVRSFSMDIGMTFGLEKCAIVEVRRGKLAETGNITLADGREIASLKTEDRYKYLGIHQTYEIQQQENKKTAETELIRRVRKVLMSQLSAKNKIVAINTWAIPAFLYTAGILIWSKTDLERLDRRIRTTLTQYGMLHPNSAIERLYLPRKEGGRGLSNLEYFCLKEEQKITDYFRRNNLPLHRWIAAHRQNLRADGRIREYDAGEDLPEKLRRNWESKSLHGRFFASLHQPEVDMISSNTYLTQGYLFPQTEGTFLAIQDQVVPTRVYTKHIMKQDVETTKCRLCNKAEESVQHLSSGCSSIANTKYLARHNNMGKVVHQLLCLGNQLLDHFTPHHIYVPQPLAENEHTKIYWDLTVITDRGTEHNRPDIVFWNKTKKTAVIIDFTVPLDQNLSKAYAEKIAKYEPLARQMKDMYQLERVDIKPLIISSNGLVHQKTTKHITEMKLPPNTILWMQKAVILGTVNIIRQVIYPH

SEQ ID NO: 26112 - protein, 1175 aa, Coccinella septempunctata
MEASETASGVETAPGGRPAQSLVENSEASGATLRNGTTRPRRSNRIGGGNSLDRSTTQDNPAITQKPKRQHWTREMNVSLINAYFEATEGETKTKKYAEKLAGIWAESHPGKPFTGKHLIAQVKNIKTRKLLALDEIEAIKANIARNSMGGTVENIRRSIQRRSTTAQPPTEEDEREHQLIEPEFDEVARGMRTLYQQVTMKWEGIEIDRRPKIPRIDQNQNTRETVQAVNNALGPEFKNARNLEELCHTVYCAATVTSIILKIEVKKTTQVKRHQQRPPWEERIQKKIINLRKEIGVLHAYLNNTSPSTRVENKIKEYTRKLKLKKKEPQYKERIKTYTEGLKQRIAALGNRLRRYNKRTQRYRDNNLFANNQRQFFRKLDEDKNVQTTKTPSPTDMHKYWSKIWSNKGTHNTEATWIEQEKKKHANLQEMSTMNIEEEDVKNTIKRMKNWTTPGIDGIHNFWWKSFSHTHQTLAQLIQEAIENPNKIPKYFTHGTTLMLPKKGDLTQPENYRPITCLPSAYKIITSTIGHKIRTHLKTNNIMAWEQAGCRENGRGSKELLMIDSILTRQAKRKLKNLSMAWIDYRKAYDSVPHSWLLEVLEIYKVDKKIINLIESLRSMWRTTLTVNTERTKYNTEEIKIEKGIFQGDGLSPLLFCLALNPLSNMLNRSEYGYKIEEQKKITHLFYMDDLKLYARGKKQLEGELELVRRFSTDIGMRFSLEKCATVEVKRGKLVEGENIRLADGREMANMKAEDRYKYLGIQQTYEIKQQENKKAAETELIRRTRKIVNSQLSAKNKINAINIWAIPTFTYTAGILNWSKTDLENLDRRIRTTLTQQGMLHPNSAIERLYLPRKEGGRGLSSLEHTCLKEEKKLTQYFEKNNLPLHQWIAAQRRIASTSRNIQEEDPAEKLRNKWKSKALHGRFFNSLQQPEVDMTTSNTYLKQGYLFPQTEGTLQAIQDQVVPTRTYLKHILQQQVETTKCRLCNSAEETVQHLTSGCTTIANTKYLTRHDNMGKVVHQLICLQKELIPHFTPHHVYAPQTLKENEQFKIYWDLTIITDRRVVHNRPDMVIFDKVNKTAIIIDFAVPQDQNLTKTYTEKMTKYEALAQQIRDMWKLRDARIMPLIISANGLVHRKTTQHLLELKLPQNTIMWMQKAVILGTVNIIRKTLYPH

SEQ ID NO: 26113 - protein, 1180 aa, Adalia bipunctata
MEASETASGVETAPGGRPAQSLVETSEASGATLRNGTTRPRRSNRTREGNSLDRSIRASAQDNPALTQRPKRQHWTREMNVSLINAYLVATEGETKTKKYAEKLAGLWVDSHPEKPFTGKHLIAQVKNIKTRKLLALDEIEAIKANIRRNSTGRTVENIRRSILRRSTTAQTPTAEDQNEREHQLLEPELDEATTEIRTLYQQVTMKWEGIEIEKRPRIPRIDQNQNTRETVQAINTALEPAFKNAKNLEELCHTVYCAATVTSIILRIDNENPTQVERHQQRPPWEERMEKKINSLRGEIGILHTYLNNTNPSKRVKNKMKKYTKKLKLKWKEPQYKEKLKTYTESLKQKIAALGNRLRRYNKRTQRYRDNNLFANNQRQFFRRLDEDKKIETTKNPPPTAMHKYWSNIWSNKGKHNTKATWIEQEKRKHADIQEMSTINIEEEDVKKTIRRMKNWTTPGIDGIHNFWWKSFPHTHQTLARQIQDSIENPHNIPEFFTHGTTLMLPKKEDLTQPENYRPITCLPSAYKIITSTIGHKIRTHLKSNNMMAWEQGGCRENGRGSKELLIIDNILTKQAKKKLKNISMAWIDYRKAYDSVPHSWLLEVLEIYKVNKKIIKLIESLMSTWRTTITVNTKKNRYTTEEVKIENGIFQGDGLSPLLFCLAMNPLSNMLNRSEYGYTIEEQKKITHLFYMDDLKLYARGKKQLEGELELVRRFSTDIGMGFSLEKCATVEVKRGKLADGKNIRLADGREMASMKAEDRYKYLGIQQTYEIKQQENKKAAETELIRRTRKIVNSQLAAKNKITAINIWAIPTFTYTAGILNWSKTDLENLDRRLRTTLTQQGMLHPNSAIERLYLPRKEGGRGLSSLEHTCLKEEEKLTQYFEKNNLPLHQWIAAQRRITSTSRNIQEEDPAEKLRSKWKSKALHGRFFNSLQRPEVDMTTSNTYLKQGYLFPQTEGTFLAIQDQVVPTRTYLKHILQQQVETTKCRMCNNAEETVQHLASGCTTIAGTKYLTRHNNMGKVVHQLICLQKEIITHFTPHHVYTPQTLQENEQVKVYWDFTIITDRSVEHNRPDMVIFDKTNKTAVIIDFAVPQDQNLTKTYAEKISKYEALAQQVKDMWKLKNTTIMPLIISTNGLVHRKTTQHLLELKLPPNTIMWMQKAVILGTVNIIRKILYPH

SEQ ID NO: 26114 - protein, 1175 aa, Coccinella septempunctata
MEASETASGVGTAPGGRPAQSLVENSEASGATLRNGTTRPRRSNRIGGGNSLDRSTTQDNPAITQKPKRQHWTREMNVSLINAYFEATEGETKTKKYAEKLAGIWAESHPGKPFTGKHLIAQVKNIKTRKLLALDEIEAIKANIARNSMGGTVENIRRSIQRRSTTAQPPTEEDEREHQLIEPEFDEVARGMRTLYQQVTMKWEGIEIDRRPKIPRIDQNQNTRETVQAVNNALGPEFKNARNLEELCHTVYCAATVTSIILKIEDKKTTQVKRHQQRPPWEERIQKKIINLRKEIGVLHAYLNNTSPSTRVENKIKEYTRKLKLKKKEPQYKERIKTYTEGLKQRIAALGNRLRRYNKRTQRYRDNNLFANNQRQFFRKLDEDKNVQTTKTPSPTDMHKYWSKIWSNKGTHNTEATWIEQEKKKHANLQEMSTMNIEEEDVKNTIKRMKNWTTPGIDGIHNFWWKSFSHTHQTLARLIQEAIENPNKIPKYFTHGTTLMLPKKGDLTQPENYRPITCLPSAYKIITSTIGHKIRTHLKTNNIMAWEQAGCRENGRGSKELLMIDSILTRQAKRKLKNLSMAWIDYRKAYDSVPHSWLLEVLEIYKVDKKIINLIENLRSMWRTTLTVNTERTKYNTEEIKIEKGIFQGDGLSPLLFCLALNPLSNMLNRSEYGYKIEEQKKITHLFYMDDLKLYARGKKQLEGELELVRRFSTDIGMRFSLEKCATVEVKRGKLVEGENIRLADGREMANMKAEDRYKYLGIQQTYEIKQQENKKAAETELIRRTRKIVNSQLSAKNKINAINIWAIPTFTYTAGILNWSKTDLENLDRRIRTTLTQQGMLHPNSAIERLYLPRKEGGRGLSSLEHTCLKEEKKLTQYFEKNNLPLHQWIAAQRRIASTSRNIQEEDPAEKLRNKWKSKALHGRFFNSLQQPEVDMTTSNTYLKQGYLFPQTEGTLQAIQDQVVPTRTYLKHILQQQVETTKCRLCNSAEETVQHLTSGCTTIANTKYLTRHDNMGKVVHQLICLQKELIPHFTPHHVYAPQTLKENEQFKIYWDLTIITDRRVVHNRPDMVIFDKVNKTAIIIDFAVPQDQNLTKTYTEKMTKYEALAQQIRDMWKLRKARIMPLIISANGLAHRKTTQHLLELKLPQNTIMWMQKAVILGTVNIIRKTLYPH

SEQ ID NO: 26115 - protein, 1175 aa, Coccinella septempunctata
MEASETASGVGTAPGGRPAQSLVENSEASGATLRNGTTRPRRSNRIGGGNSLDRSTTQDNPAITQKPKRQHWTREMNVSLINAYFEATEGETKTKKYAEKLAGIWAESHPGKPFTGKHLIAQVKNIKTRKLLALDEIEAIKANIARNSMGGTVENIRRSIQRRSTTAQPPTEEDEREHQLIEPEFDEVARGMRTLYQQVTMKWEGIEIDRRPKIPRIDQNQNTRETVQAVNNALGPEFKNARNLEELCHTVYCAATVTSIILKIEDKKTTQVKRHQQRPPWEERIQKKIINLRKEIGVLHAYLNNTSPSTRVENKIKEYTRKLKLKKKEPQYKERIKTYTEGLKQRIAALGNRLRRYNKRTQRYRDNNLFANNQRQFFRKLDEDKNVQTTKTPSPTDMHKYWSKIWSNKGTHNTEATWIEQEKKKHANLQEMSTMNIEEEDVKNTIKRMKNWTTPGIDGIHNFWWKSFSHTHQTLARLIQEAIENPNKIPKYFTHGTTLMLPKKGDLTQPENYRPITCLPSAYKIITSTIGHKIRTHLKTNNIMAWEHAGCRENGRGSKELLMIDSILTRQAKRKLKNLSMAWIDYRKAYDSVPHSWLLEVLEIYKVDKKIIKLIESLRSMWRTTLTVNTETTKYNTEEIKIEKGIFQGDGLSPLLFCLALNPLSNMLNRSEYGYKIEEQKKITHLFYMDDLKLYARGKKQLEGELELVRRFSTDIGMRFSLEKCATVEVKRGKLVEGENIRLADGREMANMKAEDRYKYLGIEQTYEIKQQENKKAAETELIRRTRKIVNSQLSAKNKINAINIWAIPTFTYTAGILNWSKTDLENLDRRIRTTLTQQGMLHPNSAIERLYLPRKEGGRGLSSLEHTCLKEKKKLTQYFEKNNLPLHQWIAAQRRIASTSRNIQEEDPAEKLRNKWKSKALHGRFFNSLQQPEVDMTTSNTYLKQGYLFPQTEGTLQAIQDQVVPTRTYLKHILQQQVETTKCRLCNSAEEIVQHLTSGCTTIANTKYLTRHDNMGKVVHQLICLQKELIPHFTPHHVYAPQTLKENEQFKIYWDLTIITDRRVVHNRPDMVIFDKVNKTAIIIDFAVPQDQNLTKTYTEKMTKYEALAQQIRDMWKLRDARIMPLIISANGLVHRKTTQHLLELKLPQNTIMWMQKAVILGTVNIIRKTLYPH

SEQ ID NO: 26116 - protein, 891 aa, Adalia bipunctata
MEKKINSLRGEIGILHAYLNNTNPSKRVKNKMKKYTKKLKLKWKEPQYKEKLKTYTESLKQKIAALGNRLRRYNKRTQRYRDNNLFANNQRQFFRRLDEDKKIETTKNPPPTAMYKYWSNIWSNKGKHNTEATWIEQEKRKHADIQEMSTINIEEEDVKKTIRRMKNWTTPGIDGIHNFWWKSFSHTHQTLARQIQDAIENPHNIPEFFTHGTTLMLPKKEDLTQPENYRPITCLPSAYKIITSTIGHKIRTHLKSNNMMAWEQGGCRENGRGSKELLIIDNILTKQAKKKLKNISMAWIDYRKAYDSVPHSWLLEVLEIYKVNKKIIKLIESLMSTWRTTITVNTKKNRYTTEEVKIENGIFQGDGLSPLLFCLAMNPLSNMLNRSEYGYTIEEQKKITHLFYMDDLKLYARGKKQLEGELELVRRFSTDIGMGFSLEKCATVEVKRGKLADGKNIRLADGREMASMKAEDRYKYLGIQQTYEIKQQENKKAAETELIRRTRKIVNSQLAAKNKITAINIWAIPTFTYTAGILNWSKTDLENLDRRLRTTLTQQGMLHPNSAIERLYLPRKEGGRGLSSLEHTCLKEEEKLTQYFEKNNLPLHQWIAAQRRITSTSRNIQEEDPAEKLRSKWKSKALHGRFFNSLQRPEVDMTTSNTYLKQGYLFPQTEGTFLAIQDQVVPTRTYLKHILQQQVETTKCRMCNNAEETVQHLASGCTTIAGTKYLTRHNNMGKVVHQLICLQKEIITHFTPHHVYTPQTLQENEQVKVYWDFTIITDRSVEHNRPDMVIFDKTNKTAVIIDFAVPQDQNLAKTYAEKISKYEALAQQVKDMWKLKNTTIMPLIISTNGLVHRKTTQHLLELKLPPNTIMWMQKAVILGTVNIIRKILYPH

SEQ ID NO: 26117 - protein, 1080 aa, Harmonia axyridis
MSLPGSPAVGQRRKRQHWTRDMNTSLINAYFEATEGETNRRKYAAKLEELWSVRYPDKQFAGKHLIAQIKNIKTRKLLAPDEIDMLKANFTRRSTNTTAETIRRSLHRRSITPQQDVENEQNIEEPHTTQHELDETHTEITTLFQQISQNWNGVNMEARPKFSKLTQNIDTKETIQAINKAMKSVFDNSTNFADLCHIVYCAALIANTILKTRKETPTQENHKQQKPPWEERLEKKISNLRKEIGVLHTFLNNPNPSKKVEKKLQTYTKKLKLKNKLTQYKESLRTHAENLKQKIAALGNRIRRYHKRTQRYRENNLFTYNQRQFFRNIDEEKDKNRAVTPAPVEMRKYWSNIWSKKNEHNKAATWIEREKEENKNLRGMTAIVVTEEDVRTTIKRTKNWSTPGIDSIHNYWWKSFTNTHKTLARLIREAIEDPRTIPEYFTQGTTLMTPKRGDLTQPSNYRPITCLPSIYKLITSTIGHKIKIHLKNNHIMAWEQNGCKDKGRGAKELLIIDNLLTKQAKKKLKNVSMAWIDYQKAYDSVPHSWLLEVLEIYKVDKQVIGLIKSLMKTWRTKITVHTGTTKYNTEEVKIQNGIFQGDSLSPLLFCLALNPLSSMLNRSEYGYKIDELIKLTHLFYMDDLKLFAGGKKQLEGELELVRRFSEDIGMKFGLEKCALVEVKRGKFIETDDIKVSEGKVMQSMEIDERYKYLGIQQSFEINHQENKKTTELELIRRVRKILNTQLSAKNKIVAINTWAIPTLLYTAGVLTWSKTDLEGLDRKIRTSLTKHGMLHPNSAIERLYLPRKEGGRGLSNLELSCKKEQKQITTFFENSNLPVHRWVAAHRRSCATAGGNQDLDAHEDPSEKLRESWKSKALHGRFHASLHQPEVDVASSNTYLMQGYLFPQTEGTFLAIQDQVVPTRTYLKYILQQQVESTKCRLCNVAEESVQHLSSGCSTIANTKYLARHNNMRKVVHQLLCLQKDLIQHFTPHHVYTPKTILENQHSKVYWDLTLITDRGVEHNRPDMVVWDKLNKTATIIDFAVPQDNNLAKTYAEKIRKYEALAHQMKDMWKLKSVIIKPRS

SEQ ID NO: 26118 - protein, 1133 aa, Adalia bipunctata
MSNRDSIEPVQDSPALPPRRKRQHWTRGMNISLINAYFIATEGDTNKKKYASRLAELWAENHPDKQFTGKHLIAQVKNIRTRKLLTPDEIDAMKTNAVRNSTSRTVEIIRRSLQRRSITQPETGAQQDTEDRPVIDPEVDETIVEIRTLYQQINLKWEGIEMSVRPRIPRLNQKKTTKLTIETINTALRPIFNNASSFEELCHAVYCTAAVTNNIEMIQTETLNPNDHRQRRPPWEQRIEKKINNFRREIGILHTYLNNTKASKKVEKEVQKYAKKLKIKKKSKHYVEELRTHTEQLKQKIAALGNRLRRYHKRTQRYRENNLFTNNQRQFFRQIDEEKGEDKIKPPSSEDMREYWAMIWSNDSKHNMAAEWMEREKSEHANLREMSTISVTEEDVKATVRRTKNWTTPGIDGIHNFWWKSFTCAHNTLARLINGAIKDPRTIPEYFTHGTTLMLKKKGDQTQPRNYRPITCLPSVYKIITSTLSHKIQTHLKSNKIMAWEQNGCRQKGRGSKELLVIDNTLTKQAKRKLKNISMAWIDYQKAYDSVPHSWILEILDVYKVNKQVIELIKNLMTSWRTTLTVNTKTTKYKTRIIEIKNGIFQGDSLSPLLFCLALNPLSNLLNRSAYGYSIDEQTKITHLFYMDDLKLYARGRKHLEGELELVRKFSTDIGMTFGLEKCATVEVRRGKLIETENIKLSDGREIANLKTEDRYKYLGIQQTYEVKHQENKKATETELMRRIRRIVTSQLSAKNKIVAINIWAIPTFTYTAGVLKWSKTDLDRLDRRIRSTFTQHGMLHPNSAIERLYLPRKEGGRGLSNLEFTCLKEKENITHYFERNNLPVHQWIAAHRRGSATTGRIHGQDAVEDLPESWKQKWKSKAVHGRFYASLHQPEVDIISSNTYLTQGYLFPQTEGTFLAIQDQVVPTRNYIAHILQQRVETTKCRLCNAAEESVQHLSSGCSTIAGTKYLVRHNNMGKVVHQLLGLQNQLIKHFTPHHIYTPQTLMENEQFKVYWDLTVITDRGVEHNRPDMVVWEKVNKTATIIDFAVPQDNNLAKSYAEKIAKYEALAQQIKDMWKLKTVVIKPLIISVNGLVHRKTTQHLREMNLPQNTITWMQKAVILGTVGIIRRTIYPH

SEQ ID NO: 26119 - protein, 1033 aa, Propylea japonica
MNNTVETIRRSLHRRSITPQPETENEQNIEEQQTTQQELDETNIQIRTLFHQVSQKWEGVKMEDRPKIAKLTQNINTKTTIQAINKALKLTFENTTNFADLCHTVFCAATVANIILGTAKKTQTLGNHDQRKPPWEERLEKKISNIRKEIGILHAFLGNPNPGKKVKKKLQIYTKKLKFKNKGTTYRDELRTHQEHLKQKIAALGNRIRRYHKRTQKYKDNNLFTNNQRQFFRNIDGDRDQDKTKPPAPDDMQSYWSDIWSKKNEHNKTATWIERERKENKNLKEMAAIAVTEEDVKATMKRTKNWTTPGIDGIHNYWWKSFTNAHKITARLIEEAIQNPCTIPEYFTQGTTLMIPKKGDLTQPSNYRPITCLPSIYKLITSTISHKIKIHLKNNKIMAWEQNGCRDKGRGAKELLVIDNILTKQAKKKLKNISMAWIDYQKAYDSVPHSWLLEVLEIYKVDKQVIELIKQLMTTWRTKIAVHTKTTQYHTGEVEIKNGIFQGDSLSPLLFCLALNPLSSMLNRSEYGYKINELIKLTHLFYMDDLKLYARGKKQLEGELELVKSFSQDIGMKFGLDKCALVEVRRGKFMETDNIRLAEGQVMKSMKIGDRYKYLGIQQSFETKHQENKKIAEIELMRRVRKILNTQLSAKNKITAINTWAIPTLLYTAGVITWSKTDLEGLDRKVRTTLTKHGMLHPNSAIERLYLPRKEGGRGLSNLELTCNKEQEHITSFFESKNLPVHQWIAAHRRSPTAGDENQDGNTREDGSEILKERWKSKAIHGRFYASLHQPEVDVTSSNTYLMQGYLYPQTEGTFLAIQDQVVPTRTYLKHILQQQVESTKCRLCDVAEETVQHLSSGCSTIAGTKYLSRHNNMGKVVHQLLCLQKDLVRHFTPHHIYTPQTVLENQHSKVYWDLTITTDRGAEHNRPDMVVWDKVNKTAIIIDFAVPQDHNLSKTYADKIAKYESLAQQMKEMWNLKKVTIKPLIITVNGLVHRKSTQHLKELQLPKNTITWMQKAVILGTVNIIRKVVYPH

SEQ ID NO: 26120 - protein, 1123 aa, Coccinella septempunctata
MSNLDNPALTRRKRQHWTREMNVRLLSAYFEATEGETNTRKYAARLTELWAEQYPEKLFTGKHLIAQVKNIKTRKLLAPDEVEAMKTNAIRSSTGRTIQNIRRSIQRRSTIAQRPETEEEQYEEEQQMMETEMDEHTTGIRTIYEQVNLKWEGVRMDARPKITKVAQNKNTKEIIQAINNTLKPAFNNTKNLEELCHTIYCAATVANIILETKAENRTREELKESRPPWEQRIERKITNLRKEIGILHTYVHTTTPSKKVEKKIEKYIFMLKIKSKTKTEQREQLKIYTETLKHKIAALGNRLRRYHKRTQRYKDNNLFSNNQRQFFRKLEEGKGEKTTNPPHPEDMRQYWAKIWTNRGEHRTTAAWIEREKREHDNVRDMPEINITEEDVKETIKRTKNWTAPGIDNIHNYWWKSFTHTHQALARLIGKALEDPRTIPEYFTQGTTLMLPKKGDLTQAKNYRPITCLPSAYKILTSTIGHKIRIHLKQNNIMAWEQNGCKEKGRGSKELLVIDKMLTRQAKKRLKNISMAWIDYQKAYDSVPHSWLVEILEIYKVNRLAINLIKSLMSTWRTTLSIKTRATTYRTEEIQIRNGIFQGDGLSPLLFCLALNPLSNMLNSSAYGYTINEQTKITHLFYMDDLKLFARGKKQLEGELELVRGFSADIGMSFGLEKCATVEVKRGKLVETENIKMADGREIANLGTENTYKYLGIQQTYEIKQKENKIAAETELIGRVKKIIDSQLSAKNKIIAINTWAIPTFSYTSGILDWSKTDLERLDRRIRTTFTQNGMLHPNSATERLYLPRKEGGRGLSSLQYICLKEKRKIREYFRENDLPVHQWISAQYTETDNGQDAGEDPSEILRQSWKTKALHGRFYTSLHQPDVDIKNSNTYLVQGYLFPQTEGTILAIQDQVVPTRTYVKHILQQQVETTKCRMCNAAEETIQHLSSGCSTLAGTKYLSRHDNMGKVVHQVLCLQKQLVQHFTPHHIYKPQTIVENEQHKIYWDLAVTTDRGVEHNRPDMVVWDNKKKTVIIIDFAVPQDYNLAKSYAEKISKYEALAQQMKDMWRLNTVTIMPLIISVNGLVHRKTTQHLHELDLPQNTITWMQKAVILGTVNIVRKIIYPH

SEQ ID NO: 26121 - protein, 1127 aa, Coccinella septempunctata
MSSRDPLTQDNPASTRRQRRQHWTRDMNVSLLSAYFQATEGEMNTKKYATRLAELWAELYPDKPFTGKHLIAQIKNIKTRKLLSPDEIETMKVNALRSSTSRTLHNIRLSINRMSLGKALPESEEGREVEEPHTIEQDEHTAGIRTIYQQIDMEWRGVNMDARPKIAKIEQNKNTKEIIQAINTALQPEFSNSKNFEELCHTIYCAATVSNIILETKNKNEIHVEQAQIRPPWEERIERKITKMRKEIGILHTYINSTNPTKRVETKVEKYIHKLKIRTKQKAEQKEQLKIYTENLKQKIAALGNRLRRYHKRTKRYKDNNLFSCNQRQFFRRLEEEKKETAADPPPLMAMQEYWSDVWKERGEHRKTATWIQQEKREHANLREMPNLTITDEDVRETIRRLKNWTAPGVDNIQNYWWKSFTSAHQTLARIIEEAIEDPRTIPSYFTLGSTTMIPKKGDLSQAQNYRPITCLPSAYKILTSTIGHKIRKHLKQNNILAWEQNGCKESGRGSKELLAIDKMLTKQAKRKLKNITMAWIDYRKAYDSVPHTWLLEILKVYKVNEKLIKLIESLMSMWRTTLSVTTPKTKYTTGEIKIKNGIFQGDGLSPLLFCLALNPLSNMLNRSAYGYSIDNRTKITHLFYMDDLKLFARGKQQLEGELELVRGFSSDIGMTLGLEKCATVEVRRGKLVETEDIKLADGREIAGLRREEEYKYLGIQQTYEIKQKENKNNAEQELIRRVKKIINSQLSAKNKITAINIWAIPTFAYTAGILNWSKTDLEKLDRRIRTSFTQRGMLHPKSAIERLYLPRKDGGRGLGNLEQICQREERKMKEYFRKNNLPVHQWISAQYNEIIDENDTGEYLPEKLKQRWRSKPLHGRFFTSLNQPEVDHQSSHAYLIQGYLFPETEGTVLAIQDQVIPTRTYVKYIMQQQVDTTECRMCHAAEETIQHLSSGCSAIAGTRYLARHNNMGKVVHQLLCLQKQLAQHFVPHHIYSPQTIVENEHYKIYWDLTIVTDRGVEHNRPDMVVWDKQRKTALIVDFAVPQDNNLAKSYAEKITKYEALAQQMKDMWRLKTVSIMPLIISVNGLVHKKTTLHLQELDLPRNTIMWMQKAVILGTVNIIRKIIYPY

SEQ ID NO: 26122 - protein, 1039 aa, Harmonia axyridis
MKSNAIRASTGRTIQNIRRSIQRKSTIAQRPRNYDEQNEEEQHITETEQDEHTDGIRTIYEQVNLKWEGIRMEARPKITKITQNKNTKEIIQAINTTLKPAFNNAKNFEELCHTIYCAATVTNIILESKTEHRTQEEHKEPRPPWEQRIERKITNLRKEIGILHAYVNTTNPSKKVEKKTEKYIFRLKIKSKTKSEQREQLKVHTETLKHKIAALGNRLRRYHKRTQRFKDNNLFSNNQRQFFRKLEEGKDEKTTNPPHPEDMRQYWAQIWTNRGEHRKTAAWIEREKREHDNVREMPEITITEEDVKETIKRMENWTAPGIDHIQTFWWKSFTHTHQALARLIRKAIEDPHTIPEYFTQGITLMLPKKGDLTQAKNYRPITCLPSAYKILTSTIGHKIRSHLKPNNIMAWEQNGCKKKGRGCKELLVIDKMLTKQAKKRQKNISMAWIDYQKAYDSIPHSWLLEILEIYKVNRLIINLIKSLMSTWRTTLSVKTRTINYRTEEIRIKNGIFQGDGLSPLLFCLALNPLSNMLNRSAYGYAINEQTKITHLFYMDDLKLFARGRKQLEGEVELVRGFSADIGMSFGLEKCSTVEVKRGNLVETENIKMADGREMANLGTENTYKYLGIQQTYEIKQKENKNAAETELIRRVKKIISSQLSAKNKITAINTWAISTFSYTSGILDWSKTDLERLDRRIRTTFTQNGMLHPNSAIERLYLPRTEGGRGLSSLQHICLKEERKIRDYFRENNLPVHQWISAQFAETHNEQDAGEDPPAKLRQSWKTKALHGRFYTSLHQPDVDIKNSNTYLVQGYLFPQTEETVLAIQDQVVPTRTYVKHILKQQVESTKCRMCNVAEETIQHLSSGCSTIAGTKYLSRHDNMGKVVHQLLCLQKQLVQHFTPHHIYKPQTIVENEQHKIYWDLAVTTDRGVEHNRPDMVVWDNKKKTVIIIDFAVPQDDNLAKSYAEKISKYEALAQQMKDMWRLKAVTIMPLIISVNGLVHRKTIQHLNELDLPHNTITWMQKAVIMGTVSIVRKIIYPH

SEQ ID NO: 26123 - protein, 958 aa, Adalia bipunctata
MDQMSPNGPIHASKCPRKDRFIYIYIYIYIYIAATVANIILETQTENPNQERQKQQRPPWEERIERKISSLRKEIGILHTYLNTANPSKKVQRKVDKYTHKLKIIKKIKKTEYKEQLRTYTETLKQKIAALGNRLRRYHKRTQRHKDNNLFSNNQRQFFRNLENGEDEGTANPPPPTDMQQFWAAVWADKGEHKRTATWIEREKLEHANVRQMTEMTITEEDVKETIRRMKNWTTPGIDNIQNYWWKTFTHTHLALARLMNKAIENPRTIPEYFTRGTTLMLPKKGDLTQPKNYRPITCLPSAYKILTSTIGHKIRGHLIDNNIMAWEQNGCRRRGRGSKELLVIDKMLTKQAKRRLKNISMAWIDYQKAYDSMPHSWLLEILGVYRVNKKVINLIQSLMSTWRTILSVKTRKTNYRTEEIEIRNGIFQGDGLSPLLFCLALNPLSNMLNRSTYGYAIDDSTKITHLFYMDDLKLFARGSKQLEGELELVRGFSADIGMSFGLDKCATVEVRRGKLMETENITLADGREIARLRTEDTYKYLGIQQTYEIKQAENKNDAETELIRRVKKIINSQLSAKNKIAAINIWAVPTFTYTAGILNWSKTDLERLDRRIRTTFTQNGMLHPKSAIERLYLPRKEGGRGLSNLEHICLKEEVNIKDYFRKNNLPVHRWIAGQYTETDRRIHGEEIREDLPGKLNQSWKTKAIHGRFYASLHQPEVDIQSSNTYLVQGYLYPQTEGTLLAIQDQVVPTRTYAKHILGQQMDSTKCRMCHTAEETIQHLSSGCSTIAGTKYLSRHNNMGKVVHQLLCLQKQLVQHFTPHHLYAPQTIVENEQYKIYWDLTVITDRGVEHNRPDMVVWDKGKKTALIIDFAVPQDNNLAKSYAEKISKYEALAQQMKDMWRLKTVTIMPLIISVNGLVHRRTTQHLRELDLPENAITWMQKAVLLGTVSIIRRIIYPH

SEQ ID NO: 26124 - protein, 1129 aa, Adalia bipunctata
MLTQDNPASTQRRKRQHWTREMNVRLLNAYFEATEGETNTKKYAAKMAELWAAQYPEKTFTGKHLIAQIKNIKTRKLLAPDEIERLKSKAIRSSTGRTIQTIRRSINRRSTTPASRRGPDEEQNDGEQQIIEPELDEHTTGIRTIYEQENLKWDGTQMDTRPKIAKIKLNKNSKEIIQAINTALRPAFNNTTNFEELCHATYCAATVANIILETQTENPNQERQKQQRPPWEERIERKISSLRKEIGILHTYLNTANPSKKVQRKVDKYTHKLKIIKKRKKTEYKEQLRTYTETLKQKIAALGNRLRRYHKRTQRHKDNNLFSNNQRQFFRNLENGEDEGTANPPPPTDMQQYWAAVWADKGEHKRTATWIEREKLEHANVRQMTEMTITEEDVKETIRRMKNWTTPGIDNIQNYWWKTFTHTHLALARLMNKAIENPRTIPEYFTRGTTLMLPKKGDLTQPKNYRPITCLPSAYKILTSTIGHNIRGHLIDNNIMAWEQNGCRRRGRGSKELLVIDKMLTKQAKRRLKNISMAWIDYQKAYDSMPHSWLLEILGVYRVNKKVINLIQSLMSTWRTILSVKTRKTNYRTEEIEIRNGIFQGDGLSPLLFCLALNPLSNMLNRSTYGYAIDESTKITHLFYMDDLKLFARGSKQLEGELELVRGFSADIGMSFGLDKCATVEVRRGKLMETENITLTDGREIARLRTEDTYKYLGIQQTYEIKQAENKNDAETELIRRVKKIINSQLSAKNKIAAINIWAVPTFTYTAGILNWSKTDLERLDRRIRTTFTQNGMLHPKSAIERLYLPRKEGGRGLSNLEHICLKEEVNIKDYFRKNNLPVHRWIAGQYTETDRRIHGEEIREDLPGKLNQSWKTKAIHGRFYASLHQPEVDIQSSNTYLVQGYLYPQTEGTLLAIQDQVVPTRTYAKHILGQQMDSTKCRMCHTAEETIQHLSSGCSTIAGTKYLSRHNNMGKVVHQLLCLQKQLVQHFTPHHLYAPQTIVENEQYKIYWDLTVITDRGVEHNRPDMVVWDKGKKTALIIDFAVPQDNNLAKSYAEKISKYEALAQQMKDMWRLKTVTIMPLIISVNGLVHRRTTQQLRELDLPENAITWMQKAVLLGTVSIIRRIIYPH

SEQ ID NO: 26125 - protein, 1218 aa, Tenthredo notha
MMDTTCSSASEAAGGEGHLPNPPVVAECIRRSARGMQRREVAVNASSQNNPANRSRDQRPSTSSQGNSNGVPSGPPRTEPNTTRTDLPHRPNLNQLRSAETFTVVGQSTGLQQCPKCQLLGTNTFCAGSLELNKHFKSDHPGVNSNWSCRTCNKVFDRIHAWSCHKPWCPGRQPEKEPLPFPCDRCGKSFSSQIGLSQHERHAHPMVRNDKREQATDRGAKPGLWSSDDLALIRQLEQLYANERHINLKIAESFPHRTNQQVSDVRKRLRLVAARQARDDSGQSRPRSSTSSDRSPTPPVVGRPVGNLREDDSSDAEAYEDALNDSLEPATEQTDATNNWRATITAAASTCHQENEIWRAWTSKAQALIRSDSSNPSDLENLYTEFTQVIRKPDQIERTAPGSSNTHRAGHRTNTRRPRKAQASLARQKKYAFAKCQTLWEQCPKKLAGMVVANDTSLLKQQQPPHCADIRKLYNELWGQKGPNVEPHSNPEEPVPIENLYAPFTPREVEARLSKMNNNSAAGPDGIVKGDLTKRGTSSALATLFNALLRAQYYPSAWRRNRTTLIPKAGHDLNDAKNWRPITISSMVSRLFSGLLDRRLRSSIRQNDRQKGFTADNGCYLNAHILDAAMSRAKEVGGTFAVLDVSKAFDTVPHSSVKECLVKKGIPATVAAYIAGMYSDCETVIKGGDGKEVNIRLERGVKQGDPLSPLLFNLAIEPLIERLQSTTEGLDVEGKNLAVLAFADDIVTIAANPSTAKKQLSTTAEYLEKMGMKLSTGKCSTFEYVPLRKSWRSRDPGLVLGDTPVPYAQPEKVFKYLGAKFSPWSGLLKGFELDVFEEIIRRVRALPLKPMQKIELLGKYIFPRYTYGLITSPPAVTVLKKIDTVIRTHIREILHLPHTVCTSFLYTPKRAGGLGLLELEKSVLVAALRNGLKALDSKDRVARAAANTEKAHGKFETYATALGLPWPTTLKHLDQAKARLRDRHHLEWSRLPWQGQGAIEWKNPICNKWLARDDLLTASRVTCAIKLRTNTYPTRANAKIIDGRLNSTCRKCGRASETLGHILGQCQETKGRRILRHNEIKDLLKHRLAENHQVLDELEVVANGEKFKPDLVVKLNEGGIRVLDVTVRYENRNYLARGHDEKIQKYSRILSKLKRDLNSNAARVVPIVVGSRGALPRRTVRALSDLGFGKADQLTISLIALRSSIEMANEFVDLKNDS

SEQ ID NO: 26126 - protein, 1143 aa, Chrysoperla carnea
MMVNKRIKSLGKQPLPGGYRQGTSGATAGCDSMRPGGGGLMIRRPPITKEATADDERDTRDDLPVDVPLPQTEMATADNSSRRRMKWTDEMNQFILLTYLEVTRLEQDKTGYRQKLYQQFTQKYTKLTHITEQRLADQRRTIITHTLIPLTIQNQIRQQVHHQIHTIHNTGIIHMDTQTTQTAENNNSNNSNDNTSITHIQNSLNTALAEFTNLDPTQKHKLPKLHHSRNLTNIVNTLNNYILPQYLSQDTTFTDLHNIIYCGAVVAVRCNGLKVTSPLNTRNTRTSQTRVPAWEKRLNSRITSIRRDLGRITQYIQGTRTQKLTKHIQNIKTTYRIHSKYDVHNTALEEFRDTLHQKLTVYSARLKRYKAAHKRKIHNTQFQYNQKFFYRSLTHNNTPQHDTQPPTEHSLFTYWSGLWSEEVQHNVETCWIGDEIHKTNNITLMTKTTITTKDIHNATQHLHNWKSPGVDQIHNYWLKHFTCTHEHLARHFTKFIQHPHTTPPFLMKGITYMIPKDNDAINPTKYRPITCLSTLYKLITSCITQKIYTHITDNNILAEEQKGCRKLSRGCKEQLIIDSVVTEQAKHNNRSMYTAYIDYKKAFDSVPHSWLQRVLNLYKIDEHIIQFLTHAMSLWTTTLNLTHNSTTITTDTIHIRRGIFQGDSLSPLWFCLALNPLSHILTDSGCGFKVKFDKEFHKISHLFYMDDLKLYASTQTQLTHLMRLTEIFSADIRMEFGTDKCKTQHIHADPGTPVLFDLQNGGVISPMEEGQFYSYLGVLQSQGIPHTDIKQTLTQHYIQRIQNILKSGLDGRNTVRAINTYATPFLTYSFGIIKWTNTDIKNIQIKTRTIMTKHRIHHIHSSSARLVLPRSLGGRGLTDIQLLHDRQLHSLREYFQSKTHTSHLHNAITSADKSYTPLNMHTTQHSLPPTKTQHTSTNMQTWKTKVLHGRYFHELSHDCIDREASQAWLTKCNIFPETEGFMFAIQDQIIHTLNYKKHILKDNAQQTDLCRQCRQKPETIQHITSACSRLTQTDYKHRHDQVAKIIHQKLAIKHKLTTDNSPYYKYTPSSILENNTHKLYWDRTIITDKAVHYNRPDITLIHKHTKTTFLIDIAVPNTHNLQSTHTEKLTKYTDLAVDLRNPW

SEQ ID NO: 26127 - protein, 747 aa, Chrysoperla carnea
MTKTIITTKDIHNATQHLHNWKSPGVDQIHNYWLKHFTCTHEHVARHFTKFIQHPHTTPPFLMKGITYMIPKDNDAINPTKYRPITCLSTLYKLITSCITQKIYTHITDNNILAEEQKGCRKLSRGCKEQLIIDSVVTEQAKHNNRSMYTAYIDYKKAFDSVPHSWLQRVLNLYKIDEHIIQFLTHAMSLWTTTLNLTHNSTTITTDTIHIRRGIFQGDSLSPLWFCLALNPLSHILTDSGCGFKVKFDKEFHKISHLFYMDDLKLYTSTQTQLTHLMRLTEIFSADIRMEFGTDKCKTQHIHADPGTPVLFDLQNGGVISPMEEGQFYSYLGVLQSQGIPHTDIKQTLTQHYIQRIQNILKSGLDGRNTVRAINTYATPFLTYSFGIIKWTNTDIKNIQIKTRTIMTKHRIHHIHSSSARLVLPRSLGGRGLTDIQLLHDRQLHSLREYFQSKTHTSHLHNAITSADKSYTPLNMHTTQHSLPPTKTQHTSTNMQTWKTKVLYARYFHELSHDCIDREASQAWLTKCNIFPETEGFMFAIQDQIIHTLNYKKHILKDNAQQTDLCRQCRQKPETIQHITSACSRLTQTDYKHRHDQVAKIIHQKLAIKHKLTTDNSPYYKYTPSSILENNTHKLYWDRTIITDKAVHYNRPDITLIHKHTKTTFLIDIAVPNTHNLQSTHTEKLTKYTDLAVDLRNQWKMTTVVVVPVILSSIGVIPTTLHNSLHTLELHKNTYITGWLISPRSDT

SEQ ID NO: 26128 - protein, 945 aa, Hesperia comma
MSSESNNVIPKTPIRKPKWQIRLEKKVEDLRVKIGRLTQYMNGNRSNSLNIHVSKIIKEFKVHTIHENNNTQLIHYLDTLKQKLSVTSSRLKRYKTCTLRKKQNSKFTLNERQFYRNLNEESSNYTKNNLDYNLCISPPTPTANQLHEFWSQIWSNPKVHNTHANWIKDENSLVSESMSMEFETIPIDIFQSVIKNLQNWKAPGTDHIHNFWLKKITHLHSHLYKHIQNFLINPQTIPLYIMTGITHMLPKDKRDPNNPAKYRPITCLQTIYKIMTSCISQLIYSHIEKNSILAEQQKGCRKLSQGCKEQLVIDSVILRQVQQKKTDLCSMYIDYKKAYDSVPHSWLLKILEIYKIHPTIVSFLRNVMANWTTRLRLTTSTNRIETPLIKISRGIFQGDALSPLWFCLALNPLSNLLNSLNIGYPLQYDDNNSESQTEKHLIRLNHLLYMDDIKIYAETQEDLSHLAEVTEKFSLDICMDFGIDKCKINSVKKGQIHQHQYALQTGEIIDPLTENETYKYLGYNQSKQIKYKETKAHLTQKFKHRLNSTIKTQLNSKNLVKAINTYAVPILTYSFGIITWSNHELQTLQRLINTTMTKHRKHHPRSCVQRLTLPRKEGGRGIIDVSNLHNRQIKSLRNYFHHKTATSKLHSAIVQNDHKHTPLNLQDRISQSNERQKDIQTKKDEWALKALHGRHYRDLNVSNVDKAASNEWLNRGELFPETEGFMIAIQDQVVETRNYQKHIMKIHSTVDTCRRCHSASETIQHITGSCKAIVQTDYKHRHDQVANIVHQKVASKYKLIPSPPTPYYKYTPETILENTTHKLYFDRAILTDKTIHYNRPDITLIDKVNRTAHLIDIAVPNTHNIQTTIAEKLNKYIELKDEIMRMWNLHKVTVVPIVISATGIIPNNLHHSIRELKLPTSLYIALQKAAILNTCRITRKFLQIE

SEQ ID NO: 26129 - protein, 1455 aa, Hesperia comma
MLREGRTLEAISCTLTNDQRSSSTTKIAMRLRSSNRVPQGGTSNGESRPGPSGSGSPTYSGEGIVSLPLVQTRTVTRQENITVSSPSSPISSIHSLFESPSSSPHSFEYPSTSRSTTATPMSVSVEQAATAINLAPTIGTKRRAQIKFTEDMNKFIWRTYLTITQLKKRTKYIDLLYEKFTEKYPHFQINKQKIGSQKRAIANNKILTDETMEEIKQDVMRNIGSSSFNTLNHKTLGSTTNKSQNTLNADMNTDSNQTQKLITSVSCFSNLSQSGSILENMRPATTKGGKQRQRMQWTNDVNKQLLKCYYMVTNNETDLTTYRSQLHRKFTEIFPELNFISEQRLADQIRVIQRNNRIPPIEREIIRKEAIDENHNHDSNAIPPTDTSTQAPSTSTVINQSLVSNQRNTHTYSCNSQPNNDEYTRTHQLKHMEKTFLETLEKFKDTDPTSRPYIPKQNCSKKFSEIVQYINTKILPNHTHPDQDFLKLQTIIYCAAYTAATSNGARIINLNMPSERENVITKTPNRKPKWQIRLERKVEGLRVKIGRLTQYMNGNRSNSLNFHVSKILKEYKVHTIHENNNTQLIHFLDTLKQKLSVTSSRLKRYKTCTLRKKQNNKFTLNEKQFYRNLNEETSNEAKNNFDDLNKSPPTPTADQLHSFWSQIWSNPKVHNIHANWIKDENSLLTETMSMEFETIPVDIFQSVIKNLQNWKAPGTDHIHNFWLKKFTHLHPLLHKHIQNFIINPQTIPLYITTGITYMLPKDKSDPNNPAKYRPITCLQTIYKIMTACISQLIYSHIEKYGILAEQQKGCRKLSQGCKEQLVIDSIILRQVQQKKTDLCSMYIDYKKAYDSVPHSWLLQILEIYKIHPTIVSFLRNVMANWTTRLRLTTPTSRIETPVIKISRGIFQGDALSPLWFCLALNPLSNLLNSFNIGYPLQYDDNNSNPMTDRHLIRLNHLLYMDDIKIYAETQEGLSHLAEVTEKFSLDVCMDFGIDKCRINSVKKGQIYQHQYTLQTGENIDPLNENETYKYLGYNQSKQIKYKETKTHLTQKFKHRLNSVIKTQLNSKNLVKGINTYAVPILTYSFGIITWSNQELQSLQRLINTTMTKHRKHHPRSCVQRLTLPRKEGGRGIIDVTNLHNRQIKSLRNYFHQKTVTSKLHHAVVKNDHKYTPLNLQDKLSQVNERQTDIQTKKDEWALKALHGRHYRDLNLNNVDKAASNEWLNRGELFPETEGFMIAIQDQVVETRNYQKHIMKVHSTVDTCRRCHSAPETIQHITSSCKAIVQTDYKHRHDQVVNIVHQKLASKYKLIPSPTTPYYKYIPETILENTTHKLYFDRAILTDKTIHYNRPDITLIDKLNRTAHLIDIAVPCTHNIQTTITEKLNKYTELKDEITRMWNLQKVTVVPIVISATGIIPNNLHHCIRELKLPPSLYITLQKAASLNTCRITRKFLQIQ

SEQ ID NO: 26130 - protein, 1459 aa, Carystus phorcus
MTILCYVRGGHWKLIAVYSPMTNGALAKQTIAMRLRSSNRLPQAGTSNGESRLGPSGSGSPTYSGEGTVSLPLVQNKTVTRHGQENVILSSPSSPISSNRSLFESPLSSPRSFEYPSTSRSTTATPMSVTVEQEANAIYPTPTTGTRNRARITFTHEMNKFIWRTYLTITQLEKRTKYIDSLFEQFTENFPHIPVNKQKIGSQKRAITKYKLLPPEIMEEIKQDVIRSIDQSSLYASNHNTQICTSKSSQNATIHSDPTQSTLPPVINEVNNLSQPRGILENMRPAITKGGKQRQRMQWTDEVNKQLLKCYYMVTKNETELTTYRPLLHRKFIEIFPELNFISEQRLADQIRVIHRNNRIPPIEREDIRKQVSEINHTHHLTNNSSTHTLTEISHMSDVNHQSDVSDRHNTYACSLDTREDNVELIRTPHLINIEKNFLETLEKFKDTDPTSRPYIPKQNCSKKFSEIVHYINSKILPYETHPEQDFVTLQTVIYCAAYTAVKSNGARVELDIINRKEKGETERIEQKPKWQKRLERKIENLRVKIGRLTQYVKGNRSTSLHSHISKILKEYKIHTTHENCNTQLPHFLDTLKQKLSVTSSRLKRYKACTLRKKQNSKFSLNEKQFYRKLNQVTSNDTKNNTHDVYKSSTNPSSDQLHGFWSKIWSDPKAHNPHADWIENEISHVTEVEAMEFEIIPVDIFQSVIKSLHNWKAPGTDHIHNFWLKKFTHIHPYLYKHIQNFIMNPQTIPTYITEGITHMLPKDQSDLQNPAKYRPITCLQTFYKIITSCVSKLIYSHVERNGILAEQQKGCRKFSQGCKEQLIIDSVIMRQVQQKKKDLCSLYIDYKKAYDSVPHSWLLKILEIYKIHPTIISFLQNIMTNWTTRLRLTTPIKQIETQTIKIQRGIFQGDTLSPLWFCLALNPLSNLLNSSNIGYPLQHADNNTNSLTLNPPTRHVTQLSHLLYMDDIKIYAETQEGLHHLAEITEKFSMDVCMDFGIEKCKINSVKKGQTYLHHYTMHTGENIDPLNESETYKYLGYNQSKQIHYKETKTNLIQKFKHRLNSVMKTQLNSKNIIKAVNTFAIPILTYSFGIITWSNKELQTLQRLINTTMTKNRKHHPRSCVQRLTIPRNEGGRGVIDIVNLHNKQIKNLRNYFHHKTLTSSLHNAIVQNDHKYTPLNLQDKLSQRNERQTDLQTKKDLWARKVLHGRHYRDLNLNYVDKAASNEWLNRGELFPETEGFMIAIQDQVIETRNYQKYIMKIHSTIDTCRRCHSASETIQHIISSCKAIVQTDYKHRHDQVVNIVHQKLALKYKLITTLSVPYYKYTPEIILENTTHKLYFDRAVLTDRTIHYNRPDIILIDKINRTAHLIDIAVPNTHNIQTTIVEKLNKYMELKDEITRMWNLHKVTIVPIVISATGIIPNNLHQAIRELKLPKFLYITLQKAAILNTCRIARKFLQI

SEQ ID NO: 26131 - protein, 1482 aa, Codatractus cyledis
MLTNDQRSNSKPTIAMRLRSSNKVPQAGTRNGESRPELASSGSPTYSGEGTESLQLAQSSTAASRVNTTSSSPSSSISSTHSLFQSPSSSPHSFENPSTSRSSTATPMSVDVEQEAEAIRLAPTTGTTKRARITWTNDMNKFIWRTYLEITQLETHTKKYLEPLFVRFTQSFPDIQTHRQRIGDQRRAIIRNRLLAPEILEEIKQEVIKNMQNKAPNTSKQNTQTPSSDLTDALSNSASGSHSIATSYYHGRHNRINSRQNNILVNMKSTLTKTGKPRQRMQWTEDINRQLLQCYYSVTNNETNLTTYRPLLHRKFTELFPELNFVSEQRLSDQIRVIHRNNLIPAKEREIIKKQTSKQNNDQNRTSNINNSIVTHNISDTLSSIGQDRTPHGLTRSGPGVTLQNVSPEEMLSSPALSNNVTHTVTVPYESQQNMPNTQGHNNADINLEILITNTFSDVFDKFNNSNPTTRPYIPKQKSSKIFSKIVYYINSQTLPKHIHPEIDFNTLQTTIYCAAWTAAKLNGARLVLNSPTERENTAPQNHSRKPKWQIRLERKIEDLRRKIGRLTQYIKGNRSTTLNNHISNIIRQYKIHTTHEEHNSQLPHFLDTLKQKLSVTSSRLKRYKTCTLRKSQNMKFIHNEKQFYRKLSQSSSNDTQSNTTNSTSTTPTSEELHRFWSQLWDNPISHNTQAQWIDTQTTHPIVEPMEFQVITAEVFQEVIKKLHNWKAPGTDHIHNFWLKKFTHIHPYILKHINNFIANPHTMPPYITTGITHMLPKDTNNLKNPSNYRPITCLQTIYKIMTSCISHFIYSHAEKNSILVEQQKGCRKLSQGCKEQLSIDAVIMRQVQKQKKDLYSMYIDYKKAYDSIPHSWLLKILDIYKIHPTIVYFLECVMANWTTRLKLTTTTHKIETQVIKIRRGIFQGDALSPLWFCLAINPLSNILNSLDIGYPLQYTDADTDTLTRNNKINLNHLLYMDDIKLYAETKEQLYQLAEVTETFSMDICMEFGIDKCKINSVKNGLIDQHNYTLNTGQTIDPLEETEYYRYLGYNQSRQIHYKETKSNLMQKFKHRLNSIMKTQLNSKNIVKAVNTYAVPILTYSFGIIKWSKSELQALQRLINTTMSKHRKHHPKSCLQRLTLPRNDGGRGFIDVINLHNKQIQNLRYYFHCKADQSNLHKAIVHNDLNLTPLNLKDKSIQNHERLTDRQTRKDEWAIKSLHGRHYHDLSHSHVDRNASNEWLHRGELFPETEGFMSAIQDQVIETRNYQKYIMKIRNVVDVCRRCNSASETIQHITGSCKAIVQTDYKHRHDQVANIVHQKLALKYSLIPTSSVPYYKYSPETILENTSHKLYFDRAILTDRTVHYNRPDITLIDKTNKTGYLIDIAVPNSHNIQTTIAEKLNKYIELKDEITRMWNLRKVTIVPIVLSTTGIIPINLHNSLKELNLPKYTYITLQKAVILNTCRITRKFLQLNPTHQHSHTNAL

SEQ ID NO: 26132 - protein, 1200 aa, Piruna aea
MRPTVTKTGKPRQRMQWTEEVNRQLLQCYYKVTDNETNLTTYRPLLHRKFIELFPELNFVSEQRLSDQIRVIHRNNLIPPKEREIIKNQTLTSNTHSSIGQEYSLKGEHHDGLNRNELQMTSQNLTRSLSPVKMQDTFTPSNNVAHTTPVHCEIQQNMLHTQGQNDVDINQLKVLITDTFLEAIDKFKSSDPTTRPYIPKQKSSKKFAQIVNYINFKTLPNHTHPETDFNTLQTILYCAAWTAAKLNGARLELNKPKETVNTVPQNYSRKPKWQIRLEKKIEDLRRKIGRLTQYIKGNRSTTLNNHILNITKQYKIHTTHEEHNSQLSHFLDTLNQKLSVTSSRLKRYKMCTLRKSQNIKFTHNEKQFYRKLTQATSNDTHQSINPPNDPTTTPTSEELHRFWSQLWDSPISHNTQAQWINTQNTHPITASMEFQVISVEVFQEVIKNLHNWKAPGTDHIHNFWIKKFTHLHPFILEHINNFIANPHTMPLYITTGITYMLPKDPSNPKNPSNYRPITCLQTIYKIITSCISHYIYSHAEKNCILVEQQKGCRKRSQGCKEQLSIDAVIMRQVQKQKKDLYSMYIDYKKAYDSIPHSWLLKILDIYKIHPTIVYFLENVMANWNTRLRITTTSHQIETQIIKIRRGIFQGDALSPLWFCLAINPLSNLLNSLEIGYPLQYIDINTDLQTKKHIIHLNHLLYMDDIKLYAETKEQLHQLAEITEIFSKDICMEFGIDKCKINSFKNGQIDQHYYTLQTGQTVDPLEETEYYKYLGYNQSRQINFRETKSSLMQKFKHRLNSIMKTQLYSKNIVKAVNTYAIPILTFSFGIIKWSKSELQSLQRLINTTMTKHRKHHPKSCLQRLMLPRIDGGRGFIDVVNLHNKQIKSLRYYFHCKTDHSNLHKAIVQNDINLTPLNLKDRTIQNNEKLTDRQTRKDEWARKSLHGRHYLDLSHSNVDRNASNEWLHRGELFPETEGFMLAIQDQVIETRNYQKHIMKIRNVVDICRRCNSASETIQHITGSCKAIVQTDYKHRHDQVANIIHQKLAIKYKLIQPVPVPYYKYSPETILENSSHKLYFDRAILTDRTIHFNRPDITLIDKKNKTAHLIDIAVPNAHNIQTTVSEKLNKYLELKDEIARMWNLRNVTIVPIVLSTTGIIPTNLHNSLKELDLPKYTYITLQKAVILNTCRITRKFLQLDPTH

SEQ ID NO: 26133 - protein, 1303 aa, Emesis temesa
MNKFIWRTYLEITQLETHTKKYLEPLFIRFTQSFPDIQTNRQRIGDQRRAIIRNRLLAPEILEEIKQEVIQNMQNKVPYTSKQNTQTPSSDLTDALSNSASGSHFTATSYYHSRHNRINSQQNSILVNMKSTLTKTGKPRQRMQWTEDINRQLLQCYYSVTNNETNLTTYRPLLHRKFTELFPELNFVSEQRLSDQIRVIHRNNLIPAKEREIIKKQTSKRNNDHNRTSNTNNSIVTQNISDTLSSIGQDSIHHDDYHNGLTRSGPRVTLQNVSPEEMLSSPALSNNVTHTVTVPCESQQNMPNAQGQNDVDINLEIFITNTFSDVFDKFNNTDPTTRPYIPKQKSSKKFSKIIYCINSQTLPKHIHPEIDFNTLQTTIYCAAWTAAKLNGARLELNSPTEKENTAPQNHSCKPKWQIRLERKIEDLRRKIGRVTQYIKGNRSTTLNNHISNIIRQYKIHTTHEEHNSQLPHFLDTLKQKLSVTSSRLKRYKTCTLRKSQNIKFIHNEKQFYRKLSQSTSNDTQSNTTKSTSTTPTSEELHRFWSQLWDNPVSHNTQAQWIDTQTIHPISEPMEFHVITAEVFQEVIKKLHNWKAPGTDHIHNFWLKKFTHIHPYILKHINNFIANPQTMPPYITTGITHMLPKDTSNLKNPSKYRPITCLQTIYKIMTSCISHFIYSHAEKNNILVEQQKGCRKLSQGCKEQLSIDAVIMRQVEKQKKDLYSMYIDYKKAYDSIPHSWLLKILDIYKIHPTIVYFLECVMANWTTRLKLTTTTHKIETQAIKIRRGIFQGDALSPLWFCLAINPLSNILNSLDIGYPLQYIDADTDSLSRNNKINLNHLLYMDDIKLYAETKEQLYQLAEVTETFSMDICMEFGIDKCKINSVKNGLIDQHNYTLQTGQTIDPLEETEYYRYLGYNQSRQIHYKETKSNLRQKFKHRLNSIMKTQLNSKNIVKAVNTYAIPILTYSFGIIKWSKSELQALQRLINTTMSKHRKHHPKSCLQRLTLPRNDGGRGFIDITTLHNKQIKNLRHYFHCKADQSNLHKAIVHNDLNLTPLNLKDKSIQNNERLTDRQTRKDEWALKSLHGRHYHDLSHSHVDRNASNEWLHRGELFPETEGFMSAIQDQVIETRNYQKYIMKIRNVVDVCRLCNSASETIQHITGSCKAIVQTDYKHRHDQVANIVHQKLALKYSLIATPSVPYYKYSPETILENTSHKLYFDRAILTDRTVHYNRPDITLIDKTNKTGYIIDIAVPNSHNIQTTIAEKLNKYIELKDEITRMWNLRKVTIVPIVLSTTGIIPNNLH

SEQ ID NO: 26134 - protein, 1434 aa, Theope publius
MRLRSSNKVPQVGTRNGESRPELASSGSPTYSGEGTESLQLAQSSTAASRVNTTSSSPSSSISSTHSLFQSPSSSPHSFENPSTSRSSTSTPMSVDVEQEAEAIRLAPTTGTTKRARIIWTNDMNKFIWRTYLEITQLETHTKKYLEPLFVRFTQSFPDIQTHRQRIGDQRRAIIRNRLLAPEILEEIKQEVIQNMQNKTPNTSKQNTQTPSPDLTDALSNSASGSHSIATSYYHGRHNSINSQQNNILVNMKSTLTKTGKPRQRMQWTEDINRQLLQCYYSVTNNETNLTTYRPLLHRKFTELFPELNFVSEQRLSDQIRVIHRNNLIPAKEREIIKKQTSKQNNDQNRTSNINNSIVTHNISDTLSSIGQDSTPHDDYHNGLTRSGPRVTLQNVSPEEMLSPPALSNNVTHTVTVPCESQQNMPNAQGQNDADINLEILITNTFSDVFKKLNNSDPTTRPYIPKQKSSKKFSKIVYYINSQTLPKYIHPDIDFNTLQTIIYCAAWTAAKLNGARLELNSPTERENTAPQNHSRKPKWQVRLERKIEDLRRKIGRLTQYIEGNRSTTLNNHISNIIRQYKIHTTHEEHNSQLLHFLDTLKQKLSVTSSRLKRYKTCTLRKSQNIKFIHNEKQFYRKLSQSSSNDTQSNTTNSTSTTPSSEELHRFWSQLWDNSISHNTQAQWIDTQTTHPISEPMEFQEITAEVFQEVIKKLHNWKAPGTDHIHNFWIKKFTHIHPYILKHINNFIANPHTMPPYITTGITHMLPKDPNNLKNPSNYRPITCLQTIYKIMTSCISHFIYSHAEKNSILVEQQKGCRKLSQGCKEQLSIDAVIMRQVQEQKKDLYTMYIDYKKAYDSIPHSWLLKVLDIYKIHPTIVYFLECVMANWTTRLKLTTTTHKIETQVIKIRRGIFQGDALSPLWFCLAINPLSNILNSLDIGYPLQYIDADTDSLTSNNKINLNHLLYMDDIKLYAETKEQLYQMAEVTETFSMDICMEFGIDKCKINSVKNGLIDQHNYTLQTGQTIDPLEETEYYRYLGYNQSRQIHYKETKSNLMQKFKHRLNSIMKTQLNSKNIVKAVNTYAVTTLTYSFGIIKWSKSELQALQRLINTTMSKHRKHHPKSCLQRLTLPRNDGGRGFIDVINLHNKQIKNLRHYFHCKADQSNLHKAIVHNDLNLTPLNLKDKSIQNNERLTDRQTRKHEWALKSLHGRHYHDLSHSHVDRNASNEWLHRGELFPETEGFMSAIQDQVIETRNYQKYIMKIRNVVDVCRRCNSASETIQHITGSCKAIVQTDYKHRHDQVANIVHQKLALKYSLIPTPSVPYYKYSPETILENTSHKLYFDRAILTDRTVHYNRPDITLIDKTNKTGYLIDIAVPNSHNIQTTIAEKLNKYIELKDEITRMWNLRKVTIVPIVLSTTGIIPNNLHNSLKELNL

SEQ ID NO: 26135 - protein, 1455 aa, Codatractus imalena
MRLRSSNKVPQVGTRNGESHPELASSGSPTYSGEGTESLQLAQSSTAASRVNTTSSSPSSSISSTHSLFQSPSSSPHSFENPSTSRSSTATPMSVDVEQEAEAIRIAPTIGTTKHARITWTNDMNKFIWRTYLEITQVETHTKKYLEPLFVRFTQSFPEIQTHRQRIGDQRRAIIRNRLLAPEILEEIKQEVIQNMQNKAPNTSKQNTQTPSSDHTDALSNSTSGSHSIATSYYHGRHNRINSQQNNILVNMKSTLTKTGKLRQRMQWTEDINRQLLQCYYSVTNNETNLTTYRPLLHRKFTELFPELNFVSEQRLSDQIRVIHRNNLIQAKEREIIKKQTSKQNNDQNRTSNINNSIVTHNISDTLASIGQDSTPHDNYQNVSPEETLSSPALSNNATHTVTVPCESQQNMPNTQGQNDADINLEILITNTFSDVFDKFNNSDPTTRPYIPKQKSSKKFSKIVYYINSQTLPKHIHPEIDFNTLQTTIYCAAWTAAKLNGARLELNSPTERENTAPQNHSRKPKWQIRLERKIEDLRKKIGRLTQYIKGNRSTTLNNHISNIIRQYKIHTTHEEHNSQLPHFLDTLKQKLSVTSSRLKRYKTCTLRKSQNITFIHNEKQFYRKLSQSSSNDTQNSTSTTPTSEELHRFWSQLWDNPISHNTQAQWIDTQTTHPISEPMEFQVITAEVFQEVIKKLHNWKAPGTDHIHNFWIKKFTHIHPYILKHINNFIANPHTMPPYITTGITHMLPKDTNNLKNPSNYRPITCLQTIYKIMTSCISHFIYSHAEKNSILVEHQKGCRKLSQGCKEQLSIDAVIMRQVQKQKKDLYSMYIDYKKAYDSIPHSWLLKILDIYKIHPTIVYFLECVMANWSTRLKLTTTTHKIETQVIKIRRGIFQGDALSPLWFCLAINPLSNILNSLDIGYLLQYIDADTDSLTRNNKINLNHLLYMDDIKLYAETKEQLHQLAEVTETFSMDICMEFGIDKCKINSVKNGLIEQHNYTLQTGQTIDPLEETEYYRYLGYNQSRQIHYKETKSNLMQKFKHRLNSIMKTQLNSKNIVKAVNTYAVPILTYSFGIIKWSKSELQALQRLINTTMSKHRKHHPKSCLQRLTLPRNDGGRGFIDVINLHNKQTQNLRYYFHCKADQSNLHKAIVHNDLNLTPLNLKDKSIQNNERLTDRQTRKDEWALKSLHGRHYHDLSHSHVDRNASNEWLRRGELFPETEGFMSAIQDQVVETRNYQKYIMKIRNVVDVCRRCNSASETIQHITGSCKAIVQTDYKHRHDQVANIIHQKLALKYSLIPTPSVPYYKYSPETILENTSHKLYFDRAILTDRTVHYNRPDITLIDKTNKTGYLIDIAVPNSHNIQTTIAEKLNKYIELKDEITRMWNLRKVTIVPIVLSTTGIIPNNLHNSLKELNLPKCTYITLQKAVILNTCRITRKFLQLNPTHQHSHTNTL

SEQ ID NO: 26136 - protein, 1470 aa, Noctuana lactifera
MRLRSSNKVPQVGTRNGESRPELASSGSPTYSGEGTESLQLVQSSTAASRVNTTSSSPSSSISSTHSLFQSPSSSPHSFENPSTSRSSTATPMSVDVEQEAEAIRLAPTTGTTKRARITWTNDMNKFIWRTYLEITQLETHTKKYLEPLFVRFTQRFPDIQTHRQRIGDQRRAIIRNRLLAPEILEEIKQEVIQNIQNKAPNTSKQNTQTPSADLTDALSNSASGSHSIATSYHGRNNCINSQQNNILVNMKSTLTKTGKPRQRMQWTEDINRQLLQCYYSVTNNETNLTTYRPLLHRKFTELFPELNFVSEQRLSDQIRVIHRNNLIPAKEREIIKKQTSKQNNDQNRTSNINNSIVTHNISDTLSSIGQGSTPNDDYHNGLTRSGPRVTLQNVNHEMLSSPALSNNVTHTVTVPCESQQNMPNTQGQNDADINLEILITNTFSDVFDKFNNSDPTTRPYIPKQKSSKKFSKIVYYINSQTLPKHIHREIDFNTLQTTIYCAAWTAAKLNGARLELNSPTERENTAPQNHSRKPKWQIRLERKIEDLRRKIGRLTQYIKGNRSTTLNNHISNIIRQYKIHTTHEEHNSQLPHFIDTLKQKLSVTSSRLKRYKTCTLRKSQNIKFLHNEKQFYRKLSQSSSNDTQSNTTNATSTTPTSEELHRFWSQLWDNPISHNTQAQWIDTQTTHPIPEPMEFQVITADVFQEVIKKLHNWKAPGTDHIHNFWIKKFTHIHPYILKHINNFIANPHTMPPYITTGITHMLPKDINNLKNPSNYRPITCLQTIYKIMTSCISHFIYSHAEKNSILVEQQKGCRKLSQGCKEQLSIDAVIMRQVQKQKKDLYSMYIDYKKAYDSIPHSWLLKILDIYKIHPTIVYFLECIMKNWTTRLKLTTTTHKIETQVIKIRRGIFQGDALSPLWFCLAINPLSNILNSLDIGYPLQYIDADTDSLTRNNKINLNHLLYMDDIKLYAETKEQLNQMAEVTETFSMDICMEFGIDKCKINSVKNGLIDQHNYTLQTGQTIDPLEETEYYRYLGYNQSRQIHYKETKSNLMQKFKHRLNSIMKTQLNSKNIVKAVNTYAVPILTYSFGIIKWSKSELQALQRLINTTMSKHRKHHPKSCLQRLTIPRNDGGRGFIDVINLHNKQIQNLRYYFHCKADQSNLYKAIVHNDVNLTPLNLKDKSIQNNEGLTDRQTRKDEWALKSLHGRHYHDLSHSHVDRNASNEWLHRGELFPETEGFMSAIQDQVIETRNYQKYIMKIRNVVDVCRRCNSASETIQHITGSCKAIVQTDYKHRHDQVANIVHQKLALKYSLIPTPSVPYYKYSPETILENTSHKLYFDRAILTDRTVHYNRPDITLIDKTNKTGYLIDIAVPNSHNIQTTIAEKLNKYIELKDEITRMWNLRKVTIVPIVLSTTGIIPNNLHNSLKELNLPKYTYITLQKAVILNTCRITRKFLQLNPTHQNSHTNTL

SEQ ID NO: 26137 - protein, 777 aa, Emesis heteroclita
MEFQVITAEVFQEVIKKLHNWKAPGTDHIHNFWIKKFTHIHPYILKHINSFIANPHTMPPYITTGITHMLPKDTNNLKNPSNYRPITCLQTLYKIMTSCISHFIYSHAEKNSILVEQQKGCRKLSQGCKEQLSIDAVIMRQVQKQKKDLYSMYIDYKKAYDSIPHSWLLKILDIYEIHPTIVYFLECVMANWTTRLKLTTTTHKIETQVIKIRRGIFQGDALSPLWFCLAINPLSNILNSLDIGYPLQYIDADTDSLTRNNRINLNHLLYMDDIKLYAESKEQLYQLAEVTETFSMDVCMEFGIDKCKINSVKNGLIDQHNYTLQTGQTIDPLEETGCYRYLGYNQSRQIHDKETKSNLMQKFKHRLNSIMKTQLNSKNIVKAVNTYAVPILTYSFGIIKWSKSELKTLQRLINTTMSTHRKHHPKSCLQRLTLPRNDGGRGFIDVINLHNKQIQNIRYYFHCKADQSNLHKAIVHNDLNLTPLNLKDKSIQNNERLTDRQTRKNEWALKSLHGRHYHDLSHSHVDRNASNEWLHRGELFPETEGFMSAIQDQVIETRNYQKYIMKIRNVVDVCRRCNSASETIQHITGSCKAIVQTDYKHRHDQVANIVHQKLALKYNLIPTPSVPYYKYSPETILENTSHKLYFDRAILTDRTVHYNRPDITLIDKTNKTGYLIDIAVPNSHNIQTTIAEKLNKYIELKDDITRMWNLRKVTIVPIVLSTTGIIPNNLHNSLKELNLPKYTYITLQKAVILNTCRITRKFLQLNPTHQHSHTNTL

SEQ ID NO: 26138 - protein, 1472 aa, Venada nevada
MRLRSSNKVPQVGTRNGESRPELASSGSPTYSGEGTESLQLAQSSTAASRVNTTSSSPSSSISSTHSLFQSPSSSPHSFENPSTSRSSTATPMSVDVEQEAEAIRFAPTTGTTKRARITWTNDMNKFIWRTYLEITQLETHTKKYLEPLFVRFTQSFPDIQTHRQRIGDQRRAIIRNRLLAPEILEEIKQEVIQNMQNKAPNTSKQNTQTPSSDLTDALSNSASGSHSIATSYYHGRHNRINSQQNNILVNMKSTRTKTGKPRQRMQWTEDINRQLLQCYYSVTNNETNLTTYRPLLHRKFTELFPELNFVSEQRLSDQIRVIHRNNLIPAKERENIKKQTSKQNNDQDRTSNINNSIVTHNISDTLSSIGQDSTPHDDYHNGLTRSGPRVTLQNVSPEEMLSSPALSNNVTHTVTVPCESEQNMPNTQGQNDADINLEILITNTFSHVFDKFNNSDPTTRPYIPKQKSSKKFSKIIYYINSQTLPKHIHPEIDFNTLQTTIYCAAWTAAKLNGARLELNSPTERENTAPQNHSRKPKWQIRLERKIEDLRRKIGRLTQYIKGNRSTTLNNHISNTIRQYKIHTTHEEHNSQLPHFLDTLKQKLFVTSSRLKRYKTCTLRKSQNIKFIHNEKQFYRKLSQSSSNDTQSNTTNSTSTTPTSEELHRFWSQLWDNPISHNTQAQWIDTQTTHPISEPMEFQVITAEVFQEVIKKLHNWKAPGTDHIHNFWIKKITHIHPYILKHINNFIANPHTMPPYITTGITHMLPKDTSNLKNPSNYRPITCLQTIYKIMTSCISHFIYSHAEKNSILVEQQKGCRKLSQGCKEQLSIDAVIMGQVQKQKKDLYSMYIDYKKAYDSIPHSWLLKILDIYKIHPTIVYFLECVMANWTTRLKLTTTTHKIETQVIKIRRGIFQGDALSPLWFCLAINPLSNILNSLDIGYPLQYIDADTDSLTRNNKINLNHLLYMDDIKLYAETKEQLYQLAEVIETFSMDICMEFGIDKCKINSVKNGLIDQHNYTLQTGQTIDPLEETEYYRYLGYNQSRQIHYKETKSNLMQKFKHRLNSIMKTQLNSKNIVKAVNTYAVTILTYSFGIIKWSKSELQALQRLINTTMSKHRKHHPKSCLQRLTLLRNDGGRGFIDVINLHNKQIQNLRYYFHCKADQSNLHKAIVHNDLNLTPLNLKDKSIQNNERLTDRQTRKDEWALKSLHGRHYHDLSHSHVDRNASNEWLHRGELFPETEGFMSAIQDQVIETRNYQKYIMKIRNVVDVCRRCNNASETIQHITGSCKAIVQTDYKHRHDQVANIVHQKLALKYSLIPTPSVPYYKYSPETILENTSHKLYFDRAILTDRTVHYNRPDITLIDKTNKTGYLIDIAVPNSHNIQTTIAEKLNKYIELKDEITRMWNLRKVTIVPIVLSTTGIIPNNLHNSLKELNLPKYTYITLQKAVILNTCRITRKFLQLNPTHQHSHTNTL

SEQ ID NO: 26139 - protein, 1344 aa, Calephelis perditalis
MRLRSSNKVPQVGTRNGESHPELASSGSPTYSGEGTESLQLAQSSTAASRVNTTSSSPSSSISSTHSLFQSPSSSPHSFENPSTSRSSTATPMSVDVEQQAEAIRLAPTTGTTKRARITWTNDMNKFIWRNYLEITQLETHTNKYLEPLFVRFTQSFPDIQTHKQRIGDQRRAIIRNRLLAPEILEEIKQEVIQNMQNKAPNTSKQNTQTPSSDLTDAFSNSASGSYSIATSYYHGRHNHINSQQNNNLVNMKSTLTKTGKPRQRMQWTKDINRQLLQCYYSVTNNETNLTTYRPLLHRKFTELFPELNFVSEQRLSDQIRVIHRNNLIPAKEREIIKKQSSKQNNDQNRTSNINNSIVTDNTSDTLSSIGQDSTPHDDYHNGLTWNGPRVTLQNVSPEEIVLSNNVTLTVTVPCESQQNMPNTQIQNDADINLEILITNTFSDVFDKFNNSDPTTRPYIPKQKSSKKFSKIVHYINSQTLPKHIHPEIDFNTLQTTIYCAAWTAAKLNGARLELNSPTERENNATQNHSRKPKWQIRLERKIEDIRRKIGRLTQYIKGNRSTTLNNHISNIITQYKIHTTHEEHNSQLPHFLDTLKQKLSVTSSRLKRYKICTLRKSQNIKFIHNEKQFYRKLSQCSSNDTQSNTTISTSTTPTSEELHRFWSQLWDNPICHNTQAQWIDTQNTHPISEPMEFQVITAEVFQEVIKKLHNWKAPGTDHIHNFWIKKITYIHPYILKHINNFIANPHTMPAYITTGITHMLPKDTNNLKNPSNYRPITCLQTIYKIMTSCVSHFIYSHAEKNSILVEQQKGCRKSSQGCKEQLSIDAVIMRQVQKQKKDLYSMYIDYKKAYDSIPHSWLLKILDIYKIHPTIVYFLECVMANWTTRLKLTTTTIKIETQAIKIRRGIFQGDALSPLWFCLAINPLSNILNSLDIGYPLQYIDADTDSLTRNNKINLNHLLYMDDIKLYAETKEQLYQLAEVTETFSMDICMEFGIDKCKINSVKNGLLDQHNYTLLTGQTIDPLEETEYYRYLGYNQSRQIHYKETKSNLMQKFKHRLNSIMKTQLNSKNIVKAVNTYAVPILTYSFGIIKWSKSELQALQRLINTTMSKHRKHHPKSCLQRLMLPRNHGGRGFIDVINLHNKQIKNLRYYFHGKADQSNLHKAIVHNDLNLTPLNLKDKSSQNNERLTDRQTRKDEWAVKSLHGRHYHDLSHSHVDRNASNEWLHRGELFPETEGFMAAIQDQVIETRNYQKYIMKIRNVVDVCRRCNSASETIQHITGSCKAIVQTDYKHRHDQVANIVHQKLALKYSLIPTPPVPYYKYSPETILENTSHKLYFDRAILTD

SEQ ID NO: 26140 - protein, 1464 aa, Emesis heteroclita
MRLRSSNKVPQVGTRNGESRPELASSGSPTYSGEGTESLQLAQSSTAASRVNITSASPSSSISSTHSLFQSPSSSPHSFEKPSTSRSSTATPMSVDVEQEAEAIRHAPTTGTTKRARITWTNDMNKFIWRTYLEITQLETHTKKYLEPLFVRFTQSFPDIQTHKQRIGDQRRAIIRNRLLAPEILEEIKQEVINNMQNKTPNTSKQNTQTPSSDLTEALSNSASGSHSIATSYDHGSHNRINSQQNNILVNMKSTLTRTGKPRQRMQWTEDINRQLLHCYYSVTNNETNLTTYRSVLHEKFTELFPELNFVSEQRLSDQIRVIHRNNLIPAKEREIIKKQTSKQNNDQNMTSNMNNSMVTHNISDTIYSIGLDSTLHDDNHIGLTRSEPGVALQNVSPEEMLSFTAHSNNVTHTISVPCESQQTDADSNLEILITNTFSDVFDKFNNSDPTTRPYIPKQKSSKKFSKIVYYINSQTLPKLIHPEIDFNTLQTTIYCAAWTAAKLNGARLELNSPTERENTAPQNHCRKPKWQIRLERKIEDLRRKIGRLTQYIKGNRSTTLNNHISNIIRQYKIHTTHEEHNSQLPHFLDTLKQKLSVTSSRLKRYKTCTLRKSQNIQFTHNEKQFYRKLSQSSSNDTRSNTTNSTYTTPTSEELHRFWSQLWDNPISHNTQAQWIDTQTTHPISEPMEFQVITAEVFQEVIKKLHNWKAPGTDHIHNFWIKKFTHIHPYILKHINSFIANPHTMPPYITTGITHMLPKDTNNLKNPSNYRPITCLQTLYKIMTSCISHFIYSHAEKNSILVEQQKGCRKLSQGCKEQLSIDAVIMRQVQKQKKDLYSMYIDYKKAYDSIPHSWLLKILDIYEIHPTIVYFLECVMANWTTRLKLTTTTHKIETQVIKIRRGIFQGDALSPLWFCLAINPLSNILNSLDIGYPLQYIDADTDSLTRNNRINLNHLLYMDDIKLYAESKEQLYQLAEVTETFSMDVCMEFGIDKCKINSVKNGLIDQHNYTLQTGQTIDPLEETGCYRYLGYNQSRQIHDKETKSNLMQKFKHRLNSIMKTQLNSKNIVKAVNTYAVPILTYSFGIIKWSKSELKTLQRLINTTMSTHRKHHPKSCLQRLTLPRNDGGRGFIDVINLHNKQIQNIRYYFHCKADQSNLHKAIVHNDLNLTPLNLKDKSIQNNERLTDRQTRKNEWALKSLHGRHYHDLSHSHVDRNASNEWLHRGELFPETEGFMSAIQDQVIETRNYQKYIMKIRNVVDVCRRCNSASETIQHITGSCKAIVQTDYKHRHDQVANIVHQKLALKYNLIPTPSVPYYKYSPETILENTSHKLYFDRAILTDRTVHYNRPDITLIDKTNKTGYLIDIAVPNSHNIQTTIAEKLNKYIELKDDITRMWNLRKVTIVPIVLSTTGIIPNNLHNSLKELNLPKYTYITLQKAVILNTCRITRKFLQLNPTHQHSHTNTL

SEQ ID NO: 26141 - protein, 1472 aa, Achlyodes mithridates
MRLRSSNKVPQVGTRNGESRPELASSGSPTYSGEGTESLQLAQSSTAASRVNITSSSPSSSISSTHSLFQSPSSSPHSFENPSTSRSSSATPMSVDVEQEAEAIRLVPTTGTTKRARITWTNDMNKFIWRTYLEITQLETHTKKYLEPLFVRFTQSFPDIQTHRQRIGDQRRAIIRNRLLAPEILEEIKQEVIQNIQNKAPNTSKQNTQTPSSDLTDALSNSSSGSHSIATSYYHGRHNRINSQQNNILVNMKSTLTKTGKPRQRMQWTEDINRQLLQCYYSVTNNETNLTTYRPLLHKKFTELFPELNFVSEQRLADQIRVIHRNNLIPAKEREIIKKQTSKQNNDQNRTSNINNSIVTHNISDTLSPIGQDSTPHDDYHYGLTRSGHRVTLQNVSAEEMLSSPALSNNVTHTVTVPCESQQNMPNTQGQNDADINLEILITNTFSDVFDKFNNSDPTTRPYIPKQKSSKKFSKIVYYINSQTLPKHTHPEIDFNTLQTTIYCAAWTAAKLNGARLELNSPTERENTAPQNHSRKPKWQIRLERKIEDLRRKIGRLTQYIKGNRSTALNNHISNIIRQYKIHTTHEEHNSQLPHFLDTLKQKLSVTSSRLKRYKTCTLRKSQNIKFIHNEKQFYRKLSQSSSNDTQSNTTNSTFTTPTSEELHRFWSQLWDNPISHNTQAQWIDTQTTHPISEPMEFKVITAEVFQEVVKKLHNWKAPGTDHIHNFWIKKFTHIHPYILKHINNFIANPHTMPPYITTGITHMLPKDTNNLKNPSNYRPITCLQTIYKIMTSCISHFIYSHAEKNSILVEQQKGCRKLSQGCKEQLSIDAVIMRQVQKQKKDLYSMYIDYKKAYDSIPHSWLLKILDIYKIHPTIVYFLECAMANWTTRLKLTTTTHKIETQVIKIRRGIFQGDALSPLWFCLAINPLSNILNSLDIGYPLQYTDADTDSLTRNNKINLNHLLYMDDIKLYAETKEQLYQLAEVTETFSMDICMEFGIDKCKINSVKNGLIDQHNYTLQTGQSIDPLEETEYYRYLGYNQSRQIHYKEIKSNLMQKFKHRLNSIMKTQLNSKNIVKAVNTYAIPILTYSFGIIKWSKTELQALQRLINTTMSKHRKHHPKSCLQRLTLARNDGGRGFIDVNNLHNKQIKNLRYYFHCKADQSNLLKAIVHNDLNLTPLNLKDKSIQNNEILTDRQTRKDEWALKSLHGRHYHDLSHSHVDRNASNEWLHRGELFPETEGFMSAIQDQVIETRNYQKHIMKIRNVVDICRRCNSASETIQHITGSCKAIVQTDYKHRHDQVANIVHQKLALKHSLIPTPSVPYYKYSPETILENTSHKLYFDRAILTDRTVHFNRPDITLIDKTNKTGYLIDIAVPNSHNIQTTIAEKLNKYIELKDEITRMWNLRKVTIVPIVLSTTGVIPYNLHNSLKELNLSKYTYITLQKAVILNTCRITRKFLQLNPTHQHSHTNTL

SEQ ID NO: 26142 - protein, 906 aa, Thymelicus lineola
MQYMRGNRSKTLNDHISKILNEFKVHTIHENYNTQLAHFLDTLKQKLSVTSSRLKRYKTCTLRKKENSKFTLNEKQFYRKLSHLTSNVTKNDSDDPCNSSSTPTTDELHAFWSNIWSNPKTHNIHAEWIKNEEFLVSESEPMEFEIIPIDDFESVIKNLHNWKAPGTDNIHNFWLKKFTYIHPHVYKHIQNFIKNPQTIPLYITTGVTYMLPKDQCDPKNPAKYRPITCLQTIYKILTSCITQLIYSHVEKNGILAEQQKGCRKFSQGCKEQLLIDSVIMRQVQQKKKDLCSMYVDYKKAYDSVPHSWLLKILDIYKIHPTIITFLQNVMTNWTTRLRLTTSTIQVETQDIKIQRGIFQGDALSPLWFCLAINPLSNLLNSLDIGYPLQYTDNNTDSLTHKHLTRISHLLYMDDIKIYAETPESLSHLAEITEKFSVDVCMEFGIDKCRINSIKKGQTHQHHYTLQTGQTIDPLNENETYKYLGFNHSKNIQYKETKTHLIQQFKHRLNSVLKTHLNSINLVKAINTYAVPILTYSFGIIKWSNHELRTLQRLINTTMTKARKHHPRSCVQRLTLPRSDGGRGIIDIINLHNKQIKNLRSYFHHKTSTSNLYNAVAVNDHKYTPLNLQDRLPQINEKQTDLQTKKDEWARKTLHGRHYRDLGLVNVDKTASNEWLRRGELFPETEGFMLAIQDQVIETRNYQKHIMKISTVDTCRRCHSSSETIQHVISSCKSIVQTDYKHRHDQVVNIVHQKLALKYNLITTPPTPYYKYTPEIILDSRTHKLYFDRAILTDKTIHYNRPDITLIDKINKTAHLIDIAVPNTHNLQTTITEKLNKYTELKDEITRMWNLHKVTIVPIVISATGIIPNNLHQSIKELKLSRYLYIALQKAVILNTCRIARKFLQIE

SEQ ID NO: 26143 - protein, 1454 aa, Ochlodes sylvanus
MLREGRTLEAFSCILTNDQRSSSKTTIAMRLRSSNRVPQAGTSNGESRPGPTGPGCPTYSGEGIVSLPLVQAKTVTRQENITAPSPSSPISSTHSLFDSPRSSPHSFEYPTTSRSTTATPMSVTVEQEAKAINLAPTTDRRNRARIIFTEDMNKFIWRTYLTITKLEKHTKYIDSLFLQFKEKFPHISINKQKIGSQKRSIAKNIILTPEIMAEIKQNVIQSINHSSSYAPNHNTQAYVLETQNVLIDPESTQSTVTSVTNEIGKSSHPSSILENMRPATTKGGKQRQRMQWTDEVNKQLLKCYYIVTNNETELTTYRPLLHRKFSEIFPELNFISEQRLADQIRVINRNNRIPPPESEEIRKQVLEELHIHHPNINTPTSAPSQMALTSSVQSSQCLGPNQDNAPNYSFNTQQNNDEYMRQIQTTDKTCINKIFLETLEKFQNTDPTCRPYIPKQNSSEKFSEIVHHINSKVLPHHTSPEQDFVSLQTVIYCAAYTAVKFNGARLESEMPSRKEKSDTEPPVRWQIRLERKVENLRVKIGRLTQYIKGNRTTRLNTQIIQILKEFKVHTIHENHNTQLTHFLDTLKQKLSVTSSRLKRYKTCTLRKKQNSKFTLNEKQFYRKLNQDTSNATKNNSDDSCKSSFTLTSDELHNFWSQIWSNPITHNTHANWIKNENNSVGTEAESMEFETIPIDVFQSVIKRLHNWKAPGTDHIHNFWLKKFTHIHPYLYKHINNFMMNPQTIPLYITAGITYMLPKDQCELSDPAKYRPITCLQTIYKIITSCISQLIYTHVEKNRILAEQQKGCRKFSQGCKEQLVIDSIIMRQVQQKKKDLCSMYIDYRKAYDSVPHSWLLKILEIYKIHPTIVSFLRNIMTNWTTQLRLTTSSKLIETQTIKIQRGIFQGDALSPLWFCLAINPLSNLLNSFNIGYPLQYTDNNTDSLTHNHQTHLSHLLYMDDIKIYAETREDLSLLAEVTENFALDVCMDFGIDKCKINSVKKGQTSQHDYTLQTGDTIESLNEHETYKYLGYNQSKQIQYKKTKTHLTQQFKHRLNSVMNTQLNSKNIVKAVNTYAVPILTYSFGIITWSKQELQALQRLINTTMTKHRKHHPRSCVQRVTLPRSEGGRGIIDVINLHNRQIKSLRNYFHHKTVTSNLHNAIVQNDHKYTPLNLQDRLTQKNETQTDIQTKKDEWARKVLHGRYYHDLNLTNVDKAASNEWLNRGELFPETEGFMIAIQDQVIETRNYQKYIIKSSSTSDTCRRCHSASETIQHITSSCKSIAQTDYKHRHDQIANIVHQKLALKYHLITASPTPYYKYTPEIVLDNTTHKLYFDRAILTDKTIHYNRPDITLVDKINRTAHLIDIAVPNTHNIQTTIAEKLNKYTELKDEITRMWNLRKVTIVPIVVSATGIIPNQLHQAITELKLPKSLYITLQKATILNTCHITRKFLQTEHNL

SEQ ID NO: 26144 - protein, 1462 aa, Euphyes dion
MLREGRTLEAFSCTLANDQRSSSKTKIAMRLRSSNRLPQAGTSNGESRLGPTGSGSPTYSGEGIVSLPLVQTRTVTRKEIITTSSPLLHISSTHSLFESPRSSPHSFEYPSTSRSTTATPMSVTVEQEANAINLAPTTDSRNRARLTLTEDMNKFIWRSYLIITQLEKHTKYIDSLYLKFKEKFPHINISKQKIANQKRAIAKNIVLTPETMENIKHDVIQSINHLSSEAANHNTQAYTLNVPQNIRNTNANIGSDTQQVPSSTMGVNQSSHSDSILDNMRPVFTKGCKQRQRMQWTDEVNKQLLKCYYLVTNNETNLTTYRPLLHEKYSEIFPELNFISEQRLADQIRVIHRNNRIPPPEREIIREQALEITHNHNLNIITSTSYTPTQITITSTIQSNESLVSNHDNVPTHSLNTQQNNYEYTRPFYNTDAAHIDKTFLETFDKFKNTDPTSRPYIPKQNCSKKFSEIVHHINSKILPYHTHAEQDFASLQTVIYCAAYTAAKSNGARLELDMPNRKKDVDTETFVRKPKWQLRLERKVEDLRAKIGRLTQYMKGNRSTRLNSQITKILKEFKVHTIHENHNTQLSHFLDTLKQKLSVTSSRLKRYKTCTLRKKQNSKFTLNEKQFYRQLNQDTSNDTKTNSDDPRKSSFTLTPEELHDFWSRIWSNPETHNNHANWIEKENSIVADAESMEFETIPMEVFQSVLKKLHNWKAPGTDHIQNFWLKKFTHIHPYLYKHIHNFIKSPQTIPLYITEGITYMLPKDKCEPNNPAKYRPITCLQTIYKIITSCISQLIYFHIEKNGILAEQQKGCRKFSYGCKEQLVIDSVIMKQVQQKKKDLCSMYIDYKKAYDTVPHSWLLKILEIYKIHPTIVSFLKNMMVNWTTRLRLTTAAKRIETQDIKIQRGIFQGDALSPLWFCLAINPLSNLLNSFEIGYPLQHTDNNINSLSQGNQTHLSHLLYMDDIKIYAETPEDLCHLAAVTETFSLDVCMDFGIDKCKMNSVKKGQTYQHNYTLTTGDTIDPLNENETYKYLGYNQSKQIHYKETKTHLTQQFKHRLNSIMKTQLNSKNMVKAVNTYAVPILTYSFGIIAWSKQELQTLQRLVNSTMNKNRKHHPRSCVQRLTLPRSEGGRGIIDIANLHNRLIKSLRNYFHHKTVTSKLHNAVVQNDHKYTPLNLQDRLTQKNETQTDLQTKKDEWAHKVLHGRHYHDLNQTNVDKDASNEWLNRGELFPETEGFMIAIQDQVIETRNYQKYIMKVPNTTDTCRRCHSASETIQHITSSCKAIAQTDYKHRHDQIAKIVHQKLALKYQLITTPPLAYYKYTPEVILDNTTHKLYFDRAILTDRTIHYNRPDITLIDKINRTAHLIDIAVPNTNNIQTTIAEKLNKYTDLKDEIIRLWNLRKVTIVPIVVSATGIIPHKLHQSIKELKLPKSLYIALQKAAILNTCRITRKFLQTEQSNV

SEQ ID NO: 26145 - protein, 1369 aa, Anisynta dominula
MSVDVEHEAKAIDLAPTTGSTKRVRIKWTDDMNKFIWRTYLTITQLERHTKRYLVSLHLQFSEKFPHIQINRQKLGNQRRAIIKNGLLTPKIMEEIKQEVIQNMEIQKSQASKHDTQTPTSYHSHTSNSHHSNKASKLTSSNMSSSSNELKQLSATPPNNENIDLKHPHSSILENMRPSVTKSGKQRQRMQWTDVVNRQLLKCYYIVTNNETNLTTYRPLLHKKFTEIFPELNFITEQRLSDQVRVIKRNNRIPPKERDIIKRQALEENHDYQSHIKSPQLSTFTQIPPSSDNPIDSFVFTQGEQVVQEDVNIDGDAYSGIQCEHVKELCPNNTENNPHEATHIRVTFLQALEIFKNTDPTSRPYIPKQKSSRKLSKIIQYINLKILPIYTHVNQDFDTLQTVIYAAAWTAAKVNGARLELGTSSVREKTRVNTQGRNPKWLMRLERRVVELRVKIGRLTQYIKGNRNKKLENHILNILRDYKVHTTHEENNTQLIHFLDTLKQKLSVTSSRLKRYKMCTFRKSQNNNFTLNEKQFYRKLNQSTSNEAKSNLSASTTTTVSPEELHSFWSRLWENPKTHNTQAQWIDSETTYGAKTQPMEFEAVPIDVFQSVIKNLHNWKAPGSDHIHNFWLKKFTHIHLYIHKHINNFIINPRSMPLYITTGITHMLPKDQNDLKNPAKYRPITCLQTIYKIMTACISQLIYSHADKYNILAEQQKGCRKFSQGCKEQLIIDSVIMRQVQSKKKDLFSMYIDYKKAYDSVPHTWLLKILEIYKIHPTIVLFLKNLMTNWSTRLRLTTSTEQIETQNIRIQRGIFQGDALSPLWFCLAINPLSNLLNSSDIGYALEYIDNDSDLLTCKYKINLNHLMYMDDIKLYAETEEGLYHLAEITEKFSQDVSMEFGIDKCKINSVKNGLIFKHSYVMQTGQVIDPLDENENYKYLGYNQSKQIQYKETKANLTQQFKHRLNSVMKTHLNSKNIIKAVNTYAVPVLTYSFGIINWSKKELQTLQRVINTTMTKNRKHHPRSCVQRLTLPRSEGGRGIIDVSNLHNKQIKNLRNYFHQKTATSYLHNAIAQNDHKYTPLNLQDRTIQKNERQIDRQTKKDEWARKSLHGRHYRDLGLTNVDKIASNEWLNRGELFPETEGFILAIQDQVVETRNYQKHIMKLHRTVDTCRRCNSASETIQHITGSCKAIVQTDYKHRHDQIANIIHQKLAIKYRLIEAPPIPYYKYTPETVLNNTSYKLYFDRAILTDRTVHYNRPDITLIDKENRTAHLIDIAVPNTHNIQTTISEKLNKYIELKDEIARMWNLRKVTIVPIVISTTGVIPTNLHQSINELNLPKFTYLTLQKAAILNTCRIIRKFLQIDVTHTP

SEQ ID NO: 26146 - protein, 849 aa, Toxidia parvulus
MCTLRKSQNNNFTLNEKHFYRKLSQSTSNDAQNNLSGSTATTPSLEELHTFWSRLWENPRTHNTIAQWIDSEANYAAKTELMEFEAIPRDVFQSVIKNLHNWKAPGSDNIHNFWLKKFTHVHPYIYKHINNFIVNPHSMPLYITTGITYMLPKDHNDLRNPEKYRPITCLQTIYKIMTACISQLIYSHADKYNILAEQQKGCRKFSQGCKEQLVIDSVIMRQVQHNKKDLFSMYIDYKKAYDSVPHTWLLKILEIYKIHPKIIYFLETLMTNWSTRLRLTTPAGQIETQKIRIQQGIFQGDALSPLWFCLAMNPLSNLLNSSNIGYPLEYVDNDTDVVTRTHKIHLNHLMYMDDIKLYAETQEGLHHLAEETEKFSQDVGMEFGIDKCKINSVKNGQTFQHSYMMQTGQVIDPLDDNENYKYLGYNQLKQIQYKETKTHLTQQFKHRLNSIMKTQLNSKNIVKAVNTYAVPVLTYSFGIINWSMKELQTLQRIINTTMTKNRKHHPRSCVQRLTLPRNEGGRGIIDVSNLHNKQIKNLRNYFHHKTVISCLHNAIAQNDHKFTPLNLQDKTDQKNEKQTDRQTKKYEWSRKSLHGRHYRDLCLANVDKIASNEWLNRGELFPETEGFILAIQDQVVETRNYQKYIMKLHRTVDICRRCNSASETIQHITGACKAIAQTDYKHRHDQIANIIHQKLALKYRLIKAPPTPYYKYVPETVLNNTSHKLYYDRAILTDRTIHFNRPDITLIDKENKTALLIDIAVPNTHNIQTTITEKLNKYIELKDEITRMWNLRKVTIVPIVISTTGVVPINLHQSIQQLKLPKYTYLTLQKAAILNTCRITRKFLQIDTN

SEQ ID NO: 26147 - protein, 1458 aa, Ochlodes sylvanus
MLREGRTLEAFSCILTNDQRSSSKKIAMRLRSSNRLPQAGTSNGESRPGPTGSGSPTYSGEGTVSLPLVQNRTVARQENITASSPSSPISSNHSLFESPRSSPHSFEHPSTSRSSTATPMSVIVEQEAQAINLAPTTGTRSSARIIFTEDMNKFIWRTYLTITQLGKRTKYTDLLYLQFTEKYPHIQVNKLKIGNQKRAIANHKILTTEIMEEIKQDVMRSTDSSSFQTPNHNTLTLACISNNSQNIRNAYDPNQTQSTLTSVPNNNLCQPDSILENMRPPTTKAGKQRQRMQWTNDVNKQLLKCYYMVTNNETDLTTYRPQLYRMFTEIFPELINFVSEQRLADQIRVILRNNRIPPTEREVIRKQVLEENHNHHSNTILPTHTPTQAPSTSTVINQSPVSNHHNTRTHSRNTQANNDEFTRTHQLIHIEKTFEETLEKFKNTDPTSRPYIPKQNCSKFFSEIVHYINSKILPYRTHPDQDFLTLQTVIYCAAYTAAKSNGARIVELDMPSRRENVTTETLVRKPRWQIRLERKVEDLRAKIGRLTQYIKGNRSNSLNIHITKILKEFKVHTIHENNNIELIHFLDTLKQKLSVTSSRLKRYKACTLRKKQNNKFTLNEKQFYRNLHQGTSNETKHNSDDLYKSPSTPTGDQLHDFWSQIWSNPKIHNTDANWIKDENSLIAEANAMEFETIPLDIFQSVIKNLHNWKAPGTDHIHNYWLKKFTHIHPYLYKHIQNFIINPQTIPLYITTGITHMLPKDQCDTNNPAKYRPITCLQTIYKIITSCISQLIYSHVEKNRILAEQQKGCRKLSQGCKEQLVIDSVIMRQVQQKKADLCSMYIDYKKAYDSVPHSWLLQTLEIYKIHPKIVSFLRNIMANWTTRLRLTTFKNRIETPPIKIYRGIFQGDALSPLWFCLALNPLSNLLNSLDIGYPLQYDDNNTDSLTHKHLTRLNHLLYMDDIKIYAETQEGLSHLAEVTEKFSLDVCMDFGIDKCKINSVKKGRPHQHHYALQTGETIDPLSEGETYKYLGYNQSKQIQYKETKTHLIQQFKHRLNSVMKTQLNSKNLVKAINTFAIPILTYSFGIITWSNQELQTLQRLIHTTMTKNRKHHPRSCVQRITLPRKEGGRGIIDVTNLHNRQIKNLRNYFHQKIESSDLHNAVVQNDHKYTPLNLQDRLSQRNERQTDVQTKKDEWALKTLHGRHYRDLNLVNVDKAASNEWLNRGELFPETEGFMIAIQDQVVETRNYQKHIMKIHSTVDTCRRCQSASETIQHITSSCKAIAQTDYKHRHDQIANIVHQKLALKYNLITTPPIPYYKYTPEIILDNTTHKLYFDRAILTDRTIHYNRPDITLIDKINRTAHLIDIAVPNTHNIQTTIAEKLNKYTELKDEITRMWNLRKVTIVPIVISATGIIPNQLHHAISELKLPKFLYITLQKAAILNTCRITRKFLQTQQSTIN

SEQ ID NO: 26148 - protein, 1331 aa, Caltoris sirius
MSVTVEQEAKANDLVPNTGARPRARITWTEDMNKFIWRTYLTITKLEKCTKYIDSLYLQFKEKFPHIQIDKQKIGRQKRAIVTNKLLTSEILEEIKVEVTRTIARQSFHIPNEIVETYNHNKSHNSSKTNMTPECSLIQITSNSKEVVDLSPTGNILANMKPTVTKGGKQRQRMQWSDIVNKELLKCYYLVTNNETELTAYRPLLHRKFTEIFPELNFISEQRLSDQIRVILRHNRISPTDREIIKHQALEENHNNNSILSNSHRRSHTPTQVACSPTVGNQPIMLTQDSFPTCPLNGFQNDGEGIREQEYIEITFLEVLEQFKNTDPTLRPYIPKQKSSGKFSKLVHYINTKILPYHTHIDQDFLTLQTIIYCAALTAAKCNGSRIEINASNVKKLNEIPGRKPKWQTRLERKVENLRVKIGRLTQYMKGNRSTRLHSHISKIFNEYKVHTRHENHNTQLAHFLDTLKQKLSVSSSRLKRYKICTLRKKQNTQFTFNQKQFYRNLAQTTSNDETNDLQDKSNRATTLSPDELHGFWSRIWGRSKLHNKSAKWIENEACRLVDFVPMKFETIPMSIFQSVIKNLHNWKAPGTDHIHNFWLKKFTHIHSYLYKHINSFITNPHTIPPYITTGITHMLPKDLNELNNPAKYRPITCLQTTYKVITACISQLIYCHAANNNLLAEQQKGCRKFSQGCKEQLLIDSVIMKQAQHQKKDLYSMYVDYKKAYDSVPHSWLITILQIYKIHPTIVSFLENLMANWTTRLRLTTVSNKVETQIIKIQRGIFQGDSLSPLWFCLAINPLSNILNSYDIGYPLEYSDIDANLLTKTHIIRLNHLMYMDDIKIYSETQEGLHQLAETTEKFSRDVCMDFGIDKCKINSIKNGQTYQHHHILQTGQTIDPLNENETYRYLGYNQSKQIQYKETKSYLTQQFKHRLNSVMRTQLNSKNIVKAVNSYAVPVLTYSFGVINWSKVELQTLQRLINTTMTRNRKHHPRSCVQRLTLPRSQGGRGIIDVTNLHNKQIRTLRQYFHDKAAISILHNSVVQSDHKCTPLNLRDRSNQKNERLTDLQNKKDEWARKSLHGRHYHDLNLGNVDKNASNEWLNRGELFPETEGFMLAIQDQVVETRNYQKHIMKVHNTVDICRRCNGASETIQHITGSCKAIAQTEYKHRHDQIANVIHQKLALKYQLITTPATPYYKYTPQTILDNIHYKLYFDRAILTDKTIHYNRPDITLIDKVNKTAYLIDIAVPNTHNIQTTVAEKLTKYIELKDEITRMWNLRKVSIVPIVISTTGIVPISLHQSIKDLKLPKFIYLTLQKAAILNTCRITRKFLQM

SEQ ID NO: 26149 - protein, 1458 aa, Ochlodes sylvanus
MLREGRTLEAFSCILTNDQRSSSKKIAMRLRSSNRLPQAGTSNGESRPGPTGSGSPTYSGEGTVSLPLVQNRTVARQENITASSPSSPISSNHSLFESPRSSPHSFEHPSTSRSSTATPMSVIVEQEAQAINLAPTTGTRSSARIIFTEDMNKFIWRTYLTITQLGKRTKYTDLLYLQFTEKYPHIQVNKLKIGNQKRAIANHKILTTEIMEEIKQDVMRSTDSSSFQTPNHNTLTLACISNNSQNTRNAYDPNQTQSMLTSVPNNNLCQPDSILENMRPPTTKAGKQRQRMQWTNDVNKQLLKCYYMVTNNETDLTTYRPQLYRMFTEIFPELINFVSEQRLADQIRVILRNNRIPPTEREVIRKQVLEENHNHHSNTILPTRTPTQAPSTSTVINQSPVSNHHNTRTHSRNTQANNDEFTRTHQLIHIEKTFEETLEKFKNTDPTSRPYIPKQNCSKNFSEIVHYINSKILPYRTHPDQEFLTLQTVIYCAAYTAAKSNGARIVELDMPSRRENVTTETLVRKPRWQIRLERKVEDLRAKIGRLTQYIKGNRSNSLNIHITKILKEFKVHTIHENNNIELIHFLDTLKQKLSVTSSRLKRYKACTLRKKQNNKFTLNEKQFYRNLHQGTSNETKHNSDDLYKSPSTPTGDQLHDFWSQIWSNPKIHNTDANWIKDENSLIAEANAMEFETIPLDIFQSVIKNLHNWKAPGTDHIHNYWLKKFTHIHPYLYKHIQNFIINPQTIPLYITTGITHMLPKDQCDTNNPAKYRPITCLQTIYKIITSCISQLIYSHVEKNRILAEQQKGCRKLSQGCKEQLVIDSVIMRQVQQKKADLCSMYIDYKKAYDSVPHSWLLQTLEIYKIHPKIVSFLRNIMANWTTRLRLTTFKNRIETPPIKIYRGIFQGDALSPLWFCLALNPLSNLLNSLDIGYPLQYDDNNTDSLTHKHLTRLNHLLYMDDIKIYAETQEGLSHLAEVTEKFSLDVCMDFGIDKCKINSVKKGRPHQHHYALQTGETIDPLSEGETYKYLGYNQSKQIQYKETKTHLIQQFKHRLNSVMKTQLNSKNLVKAINTFAIPILTYSFGIITWSNQELQTLQRLIHTTMTKNRKHHPRSCVQRITLPRKEGGRGIIDVTNLHNRQIKNLRNYFHQKIESSDLHNAVVQNDHKYTPLNLQDRLSQRNERQTDVQTKKDEWALKTLHGRHYRDLNLVNVDKAASNEWLNRGELFPETEGFMIAIQDQVVETRNYQKHIMKIHSTVDTCRRCQSASETIQHITSSCKAIAQTDYKHRHDQIANIVHQKLALKYNLITTPPIPYYKYTPEIILDNTTHKLYFDRAILTDRTIHYNRPDITLIDKINRTAHLIDIAVPNTHNIQTTIAEKLNKYTELKDEITRMWNLRKVTIVPIVISATGIIPNQLHHAISELKLPKFLYITLQKAAILNTCRITRKFLQTQQSTIN

SEQ ID NO: 26150 - protein, 1344 aa, Euphyes dion
MSVTVEQEAQAINLTPTTGSRKRVRVSFTEDMNKFIWRTYLIITQLEKHTKYIDSLFLQFKEKFPDIRINKQKIGNQKRAIAKNKILTHETMEQIKQDVIQNINQSSSHASNHNTQAYVVNVSQNVTNADTNSININFDSTQATVTSFNTGANNSIRFGSILDNMRPAITKGGKQRQRMQWTDEVNKQLLKCYYLVTNNETELTTYRPLLQRKFSEIFPELNFISEQRLADQIRVIHRNNRIQPLEREIIRKQALEINHNHRSNIDTPIYTPTDIPFSSMAQSNQSLMSPQDNASTQRFNTQQSNNESTRTHTTDKTYIDEMFLEIFEKFKNTDPTSRPYIPRQNSSKRFFEIVHHINSKILPFHTHPEQDFVSLQSVIYCAAYTAAKCNGARLELDTPSRIDKVNTETLVRKPKWQLRLERKVENLRVKIGRVTQYIKGNRSTRLNTQISKVFKEFQVHSIHENHNTQISHFLDTLKQKLSVTSSRLRRYKTCTLRKKQNNKFTLNEKQFYRKLNQDTTNDTKNNSDDLRTTSSTPTSEALHNFWSQIWCNPKTHNAQASWIKNENSLVAEVEPMEFETIPIDVFQSVIKKLHNWKAPGTDHIHNFWLKKFTHIHSYLYKHIHNFIINPHTIPQYITTGITHMLPKDQCESDNPAKYRPITCLQTIYKVITACISELVYFHIEKNKILAEQQKGCRKLSQGCKEQLLIDSVIMRQVQQKKKNLYSMYVDYKKAYDSVPHSWLLKILEIYKIHPSIVFFLKNIMPNWTTRLRLTTSTEQIETQSIKIQRGIFQGDALSPLWFCLAINPLSNLLNSFDTGYPLQYTDNNTNSLTCTKLTHLSHLLYMDDIKIYAETQEDLSHLAEVTETFSLDVCMDFGIDKCKINSVKEGQTYQHNYTLQTGDTIDPLNENDTYKYLGYNQSKQIQYKETKAHLTQKFKHRLNTIMKTQLNSKNMVKAMNSYAIPILTFSFGIITWSKQELQTLQRLIHSTMTKNRKHHPRSCVQRLTLPRSEGGRGIIDIINLHNRQIKTLRNYFHHKSVTSNLHNAVVQNDNKYTPLNLQDRLIQKNEIQTDLQTKQDEWARKVLHGRHYHDLRLINVDKAASNEWLNRGELFPETEGFMIAIQDQVVETRNYQKYIMKIPSTVDTCRRCHSASETIQHIISSCKAIAQTDYKHRHDQIAKIIHQKLAFKYKLITAPPIPYYKYTPEIVLDNTTHKLYFDRAILTDRTIHYNRPDITLIDKVNKTAHLIDIAVPNTHNIQTTIAEKLNKYMDLKDEITRMWNLRKATIVPIVVSATGVIPHKLHQAINELKLPKSLYIALQKAAILNTCHITRKFLQTANNT

SEQ ID NO: 26151 - protein, 1474 aa, Piruna pirus
MRLRSRSIVPQAGTSNGESRPELASSGSPTYSGEGIDSLQLAQSSTAASRVKIITSPQSSPISSTHSLFQSPSSSPHSFENPLTSRSSTATPMSVAAEQEADATYLAPTTGTTKRARMTWTNDMNKFIWRTYLEVTQLETRMKRYLEPLYLRFKERYPHVNTHKQRLGDQRRAIIRNQLLAPGILEEIKQEVTQNIQNKTINIDNYENTETFSNINLPETHPFIINNGPSTQHDPNTQHNILTNMRPIVTKSGKHRQRMQWTDEVNRELLKCYYTVTNNETNLTTYRPLLHKKFTEIFPDLNFVSEQRLSDQVRVIHRNNRILPNEREVIKKQALQQNHVHTINTSSDTVTACTQIHTSSPHGNKQHNSPPIWGTHQNVKYTGNPPEPAGKHTMHTTTSLVADDVATCTTPVHCEMLENTSDTQGQLHRNTSRLETLHIAETFLLALDKFRNSDPTSRPYIPRQKSSKKFGAIVHHINMKILPEHTHADTDFDTLQTIIYCAAWTAAKVNGARVEVNIPLITENSTNKTRSRKPKWQIRLERKVEELRRNIGRLTQYMKGNKNTTLNNHVSNILNHYKIHTVHEEHNTQLAHFLDTLKQKLSVASSRLKRYKVCTLRKSQNIKFIHNQKQFYRNLNHFTSNNLHHLSPPNNPSNAFPTPTSEELHGFWSQLWDNPISHNTQTQWIENENTHSILESMEFEAIPIDIFQKVMKSLHNWKAPGSDHIHNFWWKKFTHIHSFLLKHINDFIVNPHKIPLYITTGLTHMIPKDPSNLNNPSNYRPITCLQTIYKIITSCISHLIYSHAEENNILAEQQQGCRKSSQGCKEQLTIDAVIMRQVQNKKKNLFSMYVDYKKAYDSVPHSWLLKILELYKIHPTLITFLQNIMTNWRTRLRLTTDSSQIETETIHVQRGIFQGDALSPLWFCLAINPLSNLLNTLDIGYPLECTNESADGLKHRKNKVHLSHLLYMDDIKLYAKTEEDLYKLVEVTEKFSQDIGMEFGIDKCKINSFKNGKIYQHSYIMQTGQTIYPLEETAHYKYLGYNQSKQIHYKETKSNLTQQFKHRLNSIMKTQLNSKNIIKAINTYAIPILTFSFGIINWSKSELQALQRVINITMTKHRKHHPNSCVQRMTLPRSEGGRGVIDIINLHSRLIKRLRNYFHGKADKSDLHNAIVQNDKHFTPLNLQDITIQYNEGLTDRQKKKDEWSRKSLHGRHFHDLSQANVDRIASNEWLHRGDLFPETEGFMLAIQDQVVETRNYRKYIMKLSNTVDVCRRCKSAPETIQHITGSCKAIVQTDYKYRHDQVAKIIHQKLALKYSLIPQSSVPYYKYIPETILDNSSHKLYFDRAILTDRTIHYNRPDITLIDKQNRTAHLIDIAVPNSHNIQPTITEKLNKYIELKDEITRMWNISKVTIVPIVLSTTGIIPTSLHHSINELNLPKYTYITLQKAVILNTCRITRKFLQLEQAPQDSHRNVT

SEQ ID NO: 26152 - protein, 1115 aa, Pellicia arina
MQQFDTTQHQIGTQVTINSSSLCNESSSSNRRNSLLLCDLSTEVLSSRSIVETETSTVVLSSNTNVIDTAETSNTLVNPHQHIGDNNTFDSQHITETFIESMNTFKNSDPTSRPYISKQKSSKKFARIVHYINSKILPDHLSIDTDFDTLQTIIYCAAWTAAKVNGSRIELSTSNTRENITNKTQKRKPKWQIRLEKKVEELRKNIGRLTQYMKGNRSNTLKNLGPHILQRYKVHSTHEQNNSQLAHFLDTLKQKLSLTSSRLKRYKMCTLRKTQNSRIVHNEKQFYRNLRLSTTNNIQNSSDSYTTATTPAVGEFHNFWSQIWENSVSHNIQTEWLESETKRYASTKSMEFGEISVEVFQLVIKSLHNWKAPGTDHIHNFWWKKLTYVHPFILKYINSFIINPHTIPYYITTGVTYMLPKNPKNLKSPSNYRPITCLQTIYKIITSCISQLIYSHAEKNNMLAEQQKGCRKFSQGCKEQLSIDAVIMRQVQNKKKNLYSMYVDYKKAYDSIPHSWLLQILEIYKINPTIINCLQNVMTKWNTHLRLTMGTQQLDTEKIKIQRGIFQGDALSPLWFCLAINPLSNLLNSLDVGYPLEYAQNNTDLLTGKNKFHLNHLLYMDDIKLYAETELDLYKLAEITEKFSKDIGMEFGIDKCKINSFQNGLIYQHQYVLQTGQIIDPLEETEYYKYLGYNQSKQIHHKEIKSNLSQQFKHRLNSICKTQLNAKNIVKAINTFAVPVLTFSFGIINWTKSELNSLQRNINTALTKHRKHHPKSCVQRLTLPRSEGGRGIIDITNLHNNLIKNLRKYFYCKADQSNLHNAVVQNDKKLTPLNLHDRALQENEQITDRQTKKEQWLQKSLHGRHLHDLSLNNVDRIASNEWLHRGELFPETEGFILAIQDQVIDTRNYQKHIMRIPNTLDICRRCNNASETIQHITGSCRAIVQTDYKHRHDQVAYIIHQKLASKYNLIAEPSVPYYKYTPENVLDNTSHKLYFDRAVLTDKTIHYNRPDIILVDKISRTAHLIDIAVPNTHNIQTTISEKLSKYVDLKDEITRMWNLRKVTIVPIVLSTTGIIPMSLHHSLKELHLPKFTYLTLQKAVILNTCRITRKFLHLH

SEQ ID NO: 26153 - protein, 1450 aa, Polyctor polyctor
MRLRSSYRVPQAGTRNGESRPELESAGSPTYSGEGIESLQLVQSSTVASRVNTTSSQSSYSSTHSLFQSPISSPCSFENPSTSRSSTTTPMSVDVEQEAKADYLAPTTGCTRRARLTWTNDMNKFIWRTYLEITQLETHTKRYLEPLYVKFKERFPHITTHKQRLGDQKRAIIRNQLLTPDTMEDIKQEVIKSLKNNPMNTLNQNTQTPSSKHISTLSNPQNVKQSSAVLSDKTADIAPNSQPENIVEYLKPAATKSGKPRQRMQWTDFINRELLKCYYIVTKNETDLTCYRTLLYKKFTEIFPELNFISEQRLSDQVRVIHRNNRIPAEERKLIKVQISQQNHMQQFDTNNQISTQLTANSTMNNKSSTSNYRNSSLLCGLNTEVLSSTSIVETETSTTIFDSNTNSLVNQHQHIGDNNTFDLQHITETFIQSLEKFKNSDPTTRPYIPKQKSSKKFAKIVHYINSKILPDHANADTDFDTLHTVIYCAAWTAAKINGSRLELSISNTGELAINKTQKRKPKWQIRLEKKVEELRKNIGRLTQYMKGNRSTPLKNLIPHILKRYKVHSTHEENNTQLTHYLDTLKQKLSLTSSRLKRYKVCTLRKNQNSKIVHNEKQFYRNLRLSTTNDTQNSSDNVSNTTVTIPTAGELHNFWSQLWENPVSHNTQTEWIESESKRYETTKSMEFGEIPMEVFQSVIKSLHNWKAPGTDHIHNFWLKKFTYVHTFILKYINSFIINPHTIPYYITTGVTYMLPKNPNNLNNPSNYRPITCLQTIYKVITSCISQLVYSHAEKNNMLAEQQKGCRKFSQGCKEQLSIDAVVMRQVQNKKKNLYSMYVDYKKAYDSIPHSWLLQILEIYKIHPTIINCLQNIMTKWNTHLRLTMGTQRLETEKIKIQRGIFQGDALSPLWFCLAINPLSNLLNSLDVGYALEYTDKNTDLLTEKCTFHLNHLLYMDDIKLYAETELDLHKLTEITEKFSKDVGMEFGIDKCKINSFQNGLIYQHHYVLQTGQVIDPLEETEHYKYLGYNQSKQIHHKETKSDLTQQFKHRLNSICKTQLNGRNIVKAINAFAVPVLTFSFGIINWTKSELNSLQRNINTTLTKHRKHHPKSCVQRLTLPRSEGGRGIIDITNLHNKLIKTLRKYFYCKADYSNLHNAVVQNDKKLTPLNLHDRSFKENEQIIDRQTKKDQWVQKSLHGRHLRDLNLSNVDRIASNEWLHRGELFPETEGFILAIQDQVIETRNYQKHIMRIPNTLDICRRCNNASETIQHITGSCKAIVQTDYKHRHDQVAYIIHQKLALKHKLIETPSVPYYKYTPENVLDNTSHKLYFDRAVLTDKTIHYNRPDIILVDKINKTAHLIDIAVPNSHNIQTTIAEKLAKYVDLKDEITRMWNLRKVNIVPIVLSSTGIIPTSLHYSIKELQLSKFTYLTLQKAVILNTCRITRKFLQSH

SEQ ID NO: 26154 - protein, 776 aa, Chamunda chamunda
MEFQMIPTEVFQSVIKSLHNWKAPGTDHIHNFWLKKFTYIHPFIFKHINNFIVNPHTIPLYITTGITHMLPKDPNNLKNPSNYRPITCLQTIYKIMTSCISQLIYSHTERNNILTEQQKGCRKFSQGCKEQLTIDAVIMRQVQNKKKDLCSMYIDYKKAYDSIPHSWLIKILEIYKIHPTIINFLQNVMTNWNTKLKLTTGSKQIETDIIRIKRGIFQGDTLSPLWFCLSINPLSHLLNSLDIGYPLEYVDIDTDLLTKNHKIYLNHLLYMDDIKLYAKTKEDLYQLVEVTEIFSSDIGMEFGIDKCKINSFTNGKIDQHCYLLQSGQTIDPLEETEYYKYLGYNQSKQIHHKETKSNLTQQFKHRLNSIMKSQLNSKNIVKAVNTFAIPILTFSFGIINWTKYELQTLQRVINTTMTKHRKHHPKSCVQRQTIPRSEGGRGIIDVTSLHNKLIKSLRSYFHCKSAQSTLHNAIVQNDKKLTPLNLQDRTTQNNERLTDRQTKKDEWARKSLHGRHYRDLNHNNVDRIASNEWLHRGELFPETEGFMLAIQDQVVETRNYQKHIMKIPNTVDICRRCNSASETIQHITGSCKTIVQTEYKHRHDQVANIIHQKLAFKYTLIGTPLVPYYKYNPETILDNSSHKLYFDRAILTDRTIHYNRPDITLIDKKNRTAHLIDISVPNTHNIQTTIAEKLNKYVELKDEITRMWNLRKVTIVPIVLSTTGIIPTSLHHSVKELNLPKNTYITLQKAVILNTCRITRKFLQLEPSHNSQTNTT

SEQ ID NO: 26155 - protein, 1486 aa, Morvina fissimacula
MTNGATVNPKTAMRLRSRNRVPQAGTSNGESRPELASAGSPTYSGEGIESLQLVQSCTAASRVNTKTSSPPSSSSSTYSLFHSANSSPCSYENPPTSSSSSSRSTPISVSVEQEANAIYLAPTTGTTKRARMIWTEEMNKFIWRTYLEITQLETLTKRYLEPLYLRFMEQFPHVNTHRQRIGDQRRAIIRNQLLPPNTMEEIRQEVIRKTQHKDINTATQNLQISSKHTLDHSENSTQTQLPTTSLNSLNSDKNPQLVNIVDSMRPPVTKAGKQRKRMQWTDNINRELLKCYYIVTNNETNLTTYRPRLHTMFIEIFPELNYISAQRLSDQIRVIHRNNRISPKERDLIKRQTLPQDELEESSTDNQIERTPVQILTDTYMPSDTVTIGNDKQIPLYSSHKEIAHSDNPVQTHTTPLQSNSTHVFPVSGVTLDTAGNLTHPIRDTSRLNILNITETFLEVLDKFKKSNPTSRPYIPKQKSSKKFSEIVNYINLKILPNHIHPEIEFDKLQTVIYCAALTATKVNGARIELKQSNSNEKTTAKMEDRKPKWQVRLEKRIENLRKSIGRLTQYMNGNRSTTLYNHILVILRQHKVHSTHEENNTQLEHFLDTLKQKLSVISSRLKRYKICTLRKTQNVNFIRNEKHFYRNLSLATSNISHSYTDKNPSNPSNTIPSPKELHGFWSQLWENPISHNTQAQWIEDENTRFDAIELMKFEEISLDVFLSVIKTLHNWKAPGTDHIHNFWWKKFTYIHPIILKHINTFIQNPHTTPSYITTGITHMLPKKPDNLQNPSNYRPITCLQTIYKIITSCISHLIYSHIEKGNILVEQQKGCRKFSQGCKEQLSIDAVIMRQVQAKKKDLFSMYVDYRKAYDSIPHSWLLKILDIYKIHPTIVNFLQNLMTSWKTRLSIATGTHRVETEVIKIQRGIFQGDALSPLWFCLSLNPLSNLLNSLNIGYPLEYTDQNTDIPTAKHRIHLNHLMYMDDIKLYAETHSDLNRLVEVTENFSQDIGMEFGIDKCKINSFKNGAIHQHNYQLQTGQIIDPLAETENYKYLGYIQSKQIHHKEIKSNLNQQFKHRLNSILKTQLNSKNIVKAVNTYAVPILTFSFGIIYWSKTELEKLQRVINTTLTRHRKHHPRSCVQRMTLPRSEGGRGIIDINYLHNKLIKSLRSYFHYKAMQSSLHNAIVQNDKKFTPLNLQDRTLQKNEQLTDRQTKKEDWLRKPLHGRHLRDLSLHNVDRSASNEWLHRGELFPETEGFILGIQDQVIETRNYQKHIMKIPNTVDICRRCNNASETIQHITGSCKAIVQTDYKHRHDQVAYIIHQKLATKYNLTTTPSVPYYKYTPENVLDNISHKLYFDRAILTDKTTHYNRPDITLIDKVNRTAHLIDIAVPNTHNIQTTIAEKLSKYIDLKDEITRMWNLRKVTIVPIVLSTTGIIPKSLHSSLKELNLPKLTYLTLQKAVILNTCRITRKFLQLDELSSPTNTK

SEQ ID NO: 26156 - protein, 1453 aa, Ernsta delagoae
MRLRSKYRVPQAGTRNGESCPVLLSAGCPTYSGEGIESLQLAQSSTAASRVNIPSPSSTISSTHSLFQSPISSPCSFENPSTSRSSTATPMSVDVEQEAKALQLAPTTGTTKRVRMTWTNEMNKFIWRTYLEITQLETHTKKYLDPLYLRFKQQFPHVKTHKQRLGDQKRAIVRNQLLTADTLEQIKKEVMQDLKNNKIGTLKLDNQIDPSKHDNIRTLTSPENTLQSSVTLFDHASNNPQSQPCNITNNIKPTLTKTGKPRQRMQWTDEVNRELLKCYYNVTKNETDFTSYRTKLYKEFIEIFPELNFLSEQRLSDQIRVIHRNNRISPHERQLMKIQQNHEKDRQNQVGVSPIQISSSKNSSLNDLYNLTPSGLNQEVVQPDVDEQVHLNPVRDGESQTALIFPELSETLDNITQETRRKTLDIKLITDTFTEALNTFENTDPTARPYIPKQKSSKKFAQIIHHINSKILPKYTHIDLDFNTLQTVIYCAAWTAAKMNGTRMTYSKPDVTESNINKKLKRKPKWQIRIEKRVEELRKNIGRLTQYIRGNRGPTLKRHILHIMKQYKVHSKHEENNTELTQFLDTLKQKLSLITSRLKRYKICTLRKNQNLKFIHNEKQFYRELRSSTSNDTQKSNHFPNTINNTPTSDELYSFWSKIWENPVSHNIQAPWVESEIRRGEGHVPMEFEEIPKDVFESVIKSLHNWKAPGTDHIHNFWIKKFTYIHPFILKHINNFIINPHLIPNYITAGVTYMLPKKPSDLNNPSNYRPITCLQTIYKIITSCISQIIYLHVEKNNVLAEQQKGCRKFSQGCKEQLLIDSVVMRQVQSKKKNLYSMYVDFKKAYDSVPHSWLLKVLEIYKIHPALVNFLQNLMAKWNTHLRLTTTTQHLETNVIKIQRGIFQGDALSPLWFCLAINPLSNLLNSLDIGYPLQYIEENTDLPTKNCKYPLNHLLYMDDIKLYADTEVNLNKLAEITEQFSHDIRMEFGLDKCKINSFKKGQIHSHSYVLQTGEIIEPLEELEHYKYLGYHQSKQINHKEIKYNLKQNFKHRLNSICKTQLNSKNTVKAINTYAVPILTYSFGIISWTKSELITLQRNINTTLTRHRKHHPKSCVQRLTLPRSEGGRGLIDVTNLHNKLILTLRNYFYHKATLSGLHNAIVQNDKKLTPLNLQDRTTQDNVKLTDRQTKKDQWLQKSLHGRHLRDLSHNNVDRIASNEWLHRGELFPETEGFMLGIQDQVIETRNYQKYIMKVPNTVDICRRCNSASETIQHITGSCKSIVQTDYKHRHDQVAYIIHQKLAIKYDLIDKSVVPYYKYTPDNILENTSHKLYFDRTILTDKTVHYNRPDITLIDKINKTAHLIDIAVPNSHNIHTTISEKLSKYVDLKDEITRMWKLRKVTIVPIVLSSTGIIPKSLHQSLDQLKLPKYTYLTLQKAVILNTCRITRKFLSDSSS

SEQ ID NO: 26157 - protein, 1049 aa, Carposina sasakii
MNDLTFMENGTPDKPDIDEIFLDVFEKIRHTDPTDRPFIPKQKSSKKFSEIMHYINTKILPVHTNTNSDFNTLQTIIYCAACTAAKVNGAKIVFDEGHVREGNASNHKKWRIPKWQKRLEKKVEALRTKIGRLSQYMNGIRTDTIKKHINNIIREYKIHTIHEEPNTQLTHYLDTLKQKLSVTSSRLRRYKACTLRKTQNNQFSNNQKQFYRNLNQYSTNQTQTSTDTNSTLSPEQQRLHSFWSQIWQSSQAHNDQAPWIEQEITNNLNTAEMEFKGVPIDTFRTVIKNLHNWKAPGSDNIHNFWYKRFTYIHPYLFNHINNFIEHPETLPKYITTGITHMLSKNNNDPTNPANYRPITCLQTIYKIITSCISHLIYNHIDKNNILAEEQKGCRKLSQGCKEQLTIDSVVMRQVQSKKKDLYTMYIDYKKAFDSVPHSWLVKTLEIYKIHPTIVYFLKNAMTNWTTRLLLKTPETAIETELIRIRRGIFQGDALSPLWFCLALNPLSNKLNKLKIGYQMQYSEEDVQTNIKRFRLNHLLYMDDIKLYAATEAELSQLAETTEKFSQDICMEFGIDKCKINSIKKGNLFKHNYELQSGHTIDPLNENESYKYLGYHQSKQIHHKEIKTNLTQQFRHRLNAVMKTHLSSRNIVKAVNSYAVPVLTYSFGIIYWTKHELQNLQRLIHTTMTRNRKHHPRSCVQRMTLPRKVGGRGLIDLTNLHNKQITSLRTYFHNKTSTSTLHNSISQNDCKYTPLNLQDRLIQKNQGQTDRQTKIDEWARKTLHGRHLHDLSQNHVDREASNEWLSRGELFPETEGFMLAIQDQVIETRNYQKYIIKTRNIVDTCRRCNSASETIQHITGACKSIVQTEYKHRHDQIANIIHQKLARKYNLTQQPATPYYKYTPETILENTSYKLYFDRAILTDKTIHYNRPDITFIDKENKSAQLIDIAVPNTHNLQVTISEKLNKYVELKDEISRMWKLQKVAVVPIVISTTGVVPKQLRSSLKTLDLPVATYITLQKAVILNTCRITRKFLQLQNTESSEVNTVHLA

SEQ ID NO: 26158 - protein, 1468 aa, Carposina sasakii
MKAQNKEHLPQEGTGRAGESLPELMYPGSPTYSGGGNSLPSRYHLRPRPGGQNRGVTVLATASSSSLQAKPSSPISSTHSLFESPNSSPHSYIFPLLSRPSTISPISVDVEQVADAAEIAPTTGKNKRVRMTWTHEMNRFIWRTYLIITELEKYTKRYLEPLYLQFREKFPDIHVSKQRIGDQRRSIINNRLLSPKILAEIKHDVIETLKLHNTDTLHSMSNNISTSGSTNNDQHRIQQPSTSLNLPNVDSSILTSIKPQSTKAGKQRQRMCWTDAINRELLKCYYIVTDNETNLTSYRPLLYRKFIEIFPELYFISEQRLSDQIRVIKRGNRIPPMEVELIRKHATQQNRDTETHANTSQSPTHTYHSLSDTQIQIQSSCTPSSLQLQDTPNNTPYSITVLNNLQDMNGLSSNTDNIPMNDLTFMENGTPDKPDIDEIFLDVFEKIRHTDPTDRPFIPKQKSSKKFSEIMHYINTKILPVHTNTNSDFNTLQTIIYCAACTAAKVNGAKIVFDEGHVREGNASNHKKWRIPKWQKRLEKKVEALRTKIGRLSQYMNGIRTDTIKKHINNIIREYKIHTIHEEPNTQLTHYLDTLKQKLSVTSSRLRRYKACTLRKTQNNQFSNNQKQFYRNLNQYSTNQTQTSTDTNSTLSPEQQRLHSFWSQIWQSSQAHNDQAPWIEQEITNNLNTAEMEFKGVPIDTFRTVIKNLHNWKAPGSDNIHNFWYKRFTYIHPYLFNHINNFIEHPETLPKYITTGITHMLSKNNNDPTNPANYRPITCLQTIYKIITSCISHLIYNHIDKNNILAEEQKGCRKLSQGCKEQLTIDSVVMRQVQSKKKDLYTMYIDYKKAFDSIPHSWLVKTLEIYKIHPTIVYFLKNAMTNWTTRLLLKTPETAIETELIRIRRGIFQGDALSPLWFCLALNPLSNKLNKLKIGYQMQYSEEDVQTNIKRFRLNHLLYMDDIKLYAATEAELSQLAETTEKFSQDICMEFGIDKCKINSIKKGNLFKHNYELQSGHTIDPLNENESYKYLGYHQSKQIHHKEIKTNLTQQFRHRLNAVMKTHLSSRNIVKAVNTYAVPVLTYSFGIIYWTKHELQNLQRLIHTTMTRNRKHHPRSCVQRMTLPRKVGGRGLIDLTNLHNKQITSLRTYFHNKTSTSTLHNSISQNDCKYTPLNLQDRLIQKNQGQTDRQTKIDEWARKTLHGRHLHDLSQNHVDREASNEWLSRGELFPETEGFMLAIQDQVIETRNYQKYIIKTRNIVDTCRRCNSASETIQHITGACKSIVQTEYKHRHDQIANIIHQKLARKYNLTQQPATPYYKYTPETILENTSYKLYFDRAILTDKTIHYNRPDITFIDKENKSAQLIDIAVPNTHNLQVTISEKLNKYVELKDEISRMWKLQKVAVVPIVISTTGVVPKQLRSSLKTLDLPVATYITLQKAVILNTCRITRKFLQLQNTESSEVNTVHLA

SEQ ID NO: 26159 - protein, 1113 aa, Piruna pirus
MLVTCCFRQLFNRPPKPKSPRELQRVYNDVLYPDSHVQMHVLSLSSSTNTQVPPVHREVLSEPISIQSQHDKDANILEALHITETFSHVLLKFRNTDPTTRPYIPKQKSSRNFAEIVNYINSKILPNHLHTDTDFDTLQTVIYCAAWTAAKINGARIELNTPHIVQNTSEKATGRKPKWQIRLERRVEELRVKIGRLTQYMKGNRNITLNKHISAILKQYKIHTTHEENNTQLSHFLDTLKQKLSVTSSRLKRYKNCTLRKSQNIKFIHNEKQFYRTLSKSTSNDTQSININPTNPIYNSPTSEELYCFWSRLWDNPTTHNKQAQWIEDEASNPKLTEMMEFQVIPIEVFQSVIKGLHNWKAPGTDNIHNFWLKKFTSTHGLIHKHINNFIVNPHSIPLFITTGITHMIPKDPNNLADPSNYRPITCLQTIYKIMTSCLCQLMYNHADNNNIFAEQQKGCRKLSQGCKEQLTIDAVVMRQVQSKKKDLCSMYVDYKKAYDSVPHSWLLNILKIYKIHPTIVNCLDSVMKKWNTRLRFSTDSQQIETQTIKIQRGIFQEDALSPLWFCLAINPLSNLLNSLNIGYPLEYNDSDTDLLPRQHKIKLNHLLYIDDIKLYAENKEDLYQLAKVTENFSKDIGMEYGIDKCKINSFKNGIIKQHNYILQTIDPLGENEHYKYLGYNQSKQIHYKETKCNLIQQFKHRLNSIMKTQINSKNIVKAVNTYAIPILTFSFGIINWSKYELQTLQRIINTTMNKHRKHHPKSCVQRLILPRSDGGRGVIDVPNLHNKVINSLRNYFHYKALQSSLHNAIVQNDKKFTPLNLQDKKLQRNEKLTDRQTKKDEWAQKSLHGRHYRDLSLSYVDRIASNEWLHRGELFPETEGFMLAIQDQVVETRNYQKHIMKIRNTVDVCRRCNSASETIQHITGSCKAIVQTDYKHRHDQVANIIHQKLAIKYKLIQPVSVPYYKYSPETILGNSSHKLYFDREILTDRTIHFNRPDITLIDKKNKTAHLIDIAVPNSHSITTTISEKLNKYLELKDEIARMWNLRKVTIVHVVLSTTGIIPTTLHHSIKELNLPRYTYITLQKAVILNTCRITRKFLQLEKDQHNSFTNTM

SEQ ID NO: 26160 - protein, 914 aa, Gorgopas trochilus
MRGNRSTVLSKHILQILKQYKVHSIHEENNTQLSHFLDTLKQKLSLTSSRLKRYRTCTLRKNQNTNFSHNEKQFYRNLHTFTSNDTQNTNDNSSNTLPETPTTDELHGFWSQLWENSVSHNAQASWIEYEVKRCEETEPMEFGEITKEVFDSVIKSLHNWKAPGTDNIHNFWLKKFTFIHPFILKHVNNFILNPHTIPHYITTGITHVLPKNRNNLKNPSNYRPITCLQTMYKVITSCISHLIYLHVEKSNILAEQQKGCRKFSQGCKEQLSIDAVIMRQVQNKKKNLCSMYIDFKKAYDSVPHSWLIKILEIYKIHPSIINFLQNLMANWNTHLRLTTDSQRLETKGIKIQRGIFQGDALSPLWFCLAVNPLSTLLNSLNIGYPLEYIDENTDLLTKECKFHLNHLLYMDDIKLYAETEENLNKLAETTETFSDDICMEFGVDKCKINSFRKGQIYQHNYTLQTGEIISPLEEMQHYRYLGYNQSKQIHYKETKSNLTQQFKHRLNSICKTQLNSKNIVKAINTYAIPILTYSFGIINWTKTELNSLQRIINTTMTKHRKHHPKSCIQRLTLPRSEGGRGIIDVNNLHNKLINTLRNYFHYKAVPSKLHNSIAQNDKKLTPLNLCDRTLQGNRPLTDRQTKKDQWLRKSLHGRHLRDLSHTNVDRIASNEWLHRGELFPETEGFILAIQDQVIETRNYQKHIMKIPNVVDICRRCSSASETIQHITGSCKAIVQTDYKHRHDQVAHIIHQKLALKHNLITTPSVPYYKYTPDNILDNTSHKLYFDRTILTDKTVHYNRPDITLIDKINKTALLIDIAVPNSHNIQTTIAEKLSKYVELKDEITRMWNLQKVTIVPVVLSTTGIIPTSLHQSLKELQLPKLTYLTLQKAVILNTCRITRKFLQIDQNSSPSNTT

SEQ ID NO: 26161 - protein, 1435 aa, Dalla quadristriga
MRLRSSSKVPQAGTSNGESRPELASSGSPTYSGEGTESLLLAQSNTAASRVNTTASSPSSPISSTHSLFQSPSSSPHSYENPSTSRSTTATPMSVAAEQEAEAIELAPTTGITKRARMTWTNDMNKFIWRTYLEITQLETLTKRYLDPLYLRFKEEFPHFNTHKQRIGDQRRAIIRNKLLSPDTIKEIKQEVMHDMQNKTINTVNQNTQTFSSKHTNTENTPQSQSPTIPFNNISNDLDPQISSGNTVANMRPTVTKTGKQRQRMQWTHDTNRELLKCYFIVTDNETNLTTYRPLLHKKFTEIFPELNFVSEQRLSDQVRFIRRNNRISPEERQLIKNQALQQSYVHQINSDIQIGSTCRHVSANPSVLNKNATPCVNNQDSTSCSLHQEVAYSGTHVETHATPVFSYGENHTPVFCNIQDYTADNISHHERGTCRLDTKNITETFLDVLDKFKHSDPTSRPYIPKQKSSKKFAEIVHYINSKILPNHTHANIEFDTLQTIIYCAAWTAAKVNGARIELDNPNVAENTTAKTQGRKPKWQIRLERKVEDLRKNIGRLTQYIKGNRNTTLNNHILYILKQYKVHTIHEENNTQLAHFLDTLKQKLSVTSSRLKRYKICTLRKSQNIKFIHNEKQFYRKLNLSTSNDTQSNIGNPLNLDVTTPTSEELHGFWSQLWNNRVSHNTQAQWIEFETTHNNLTESMEFEVIPIDVFQSVIKALHNWKAPGTDHIHNFWLKKFTYIHPYILKHINNFIINPHSIPSYITTGITHMLPKDPNNLKNPSNYRPITCLQTIYKIITSCISHLIYSHVEKSNILAEQQKGCRKFSQGCKEQLSIDAVIMRQVQNKKKDLCSMYVDYKKAYDSIPHSWLLKILEVYKIHPTLVTFLQNLMTTWNTRLRLTTASHQLETEIIKIKRGIFQGDALSPLWFCLAINPLSNLLNSLDIGYPLEYIDENTDLLTRKHKIHLNHLLYMDDIKLYAETELDLCQLAEVTEKFSQDIGMEFGIDKCKINSFKNGQLHQHTYVLQTGQSIDPLEETEHYKYLGYNQSKQIHHKETKTNLTQQFKHRLNSILKTQLNSKNIVKAVNTYAVPLLTFSFGIIYWSKSELQTLQRIINKTMTKHRKHHPKSCVQRLTLPRSDGGRGIIDVTNLHNKLIKSLRNYFHCKATQSNLHNAIVQNDKKFTPLHLQDRTLQKNELLTDRQTKKDEWLRKSLHGRHYRDLSLSNVDRIASNDWLHRGELFPETEGFILAIQDQVIETRNYQKHIMKIPNTVDICRRCNSASETIQHITGSCKAIVQTDYKHRHDQVAYIIHQKLALKYSLIVTPSVPYYKYTPETILDNTSHKLYFDRAILTDKTIHYNRPDITLIDKINKTAHLIDISVPNSHNLQTTIAEKFCKYINLKEEITRMWNLRKVTTVPIVLSTTGITPTSLSIWCIF

SEQ ID NO: 26162 - protein, 1440 aa, Piruna aea
MRLRSSKRVPQAGTSNGESRPELASSGSPTYSGEGTESLQLAQSNAAASRVNIITSSPSSPISSTHSLFQSPSSSPHSFENPPSSRSSTATPMSVAAEQEAEASDLAPTTGTTKRARMTWTVEMNKFIWRTYLEITQLETHNKRYLEPLYLRFHEKFPHVKTHKQRIGDQRRAILRNKLLTPEIMEEIKHEVTQSIQNDTVNTVNPHQTTSTNLIQTLNHSENSSKLPNNFSQSVNNNQNQQGNILANMKPAVTKAGKNRQRMQWTNEANIHLLKCYYIVTKNETDLTTYRPLLHKKFTEMFPELNFISEQRLSDQIRVIHRNNRIPPKEREIIRRQVLAQNYDQQLNIDNVPLTTLTQTTVNPPVLDNVDKISTSLNHKETMRSENHLVTHDTLVLHGNATHTSPVLVQETLRSQEQYNRNNSGLETLHITETFIEVLDKFKNSDPTSRPFIPKQKSSRKFAQIIHYINLKILPSHINSDSDFTTLQTVIYCAAMTAAKLNGSRVELNKPGVTEGTSANRRSRIPKWQVRLERKVEDFRSQIGRLTQYMKGNRSTTLNKHISNILRQHRVHSTHEGDNTVLAHFLDTLKQKLSVTSSRLKRYRICTLRKSQNTTFKYSEKQFYRKINQSTNNETHTGTANSSSPANIPPTSEELHSFWSRLWDNPISHNSHAQWLETEIINNTKTEPMKFDVISVEIFQSVIKNLHNWKAPGTDHIHNYWLKKFTSIHPFILKHINNFIINPHTVPLYITTGITYMLPKDTNNLQNPSSYRPITCLQTIYKVITSCISKLIYSHIENNDILAEQQKGCRKFSQGCKEQLSIDAVIMRQVQTKKKNLCTMYIDYKKAYDSTPHSWLLKILEVYKIHPTIINFLQNIISNWRTRLRLTTDSQQIESEIIKIQRGIFQGDALSPLWFCLTINPLSNLLNSLGIGYPLEYDDKETDSLTIKNRIHLSHLLYMDDIKLYAETKESLSRMAEITEKFSRDICMEFGIDKCKINSFKSGQILAHSYVLQTGEIINPLEETEHYKYLGYNQSKQIHYKETKSHLTQQFKHRLNSIMKTQLNSKNIVKAVNSYAIPVLTFSFGIINWSKYELKALQRVINTTMTKHRKHHPKSCVQRLTLPRSDGGRGFIDITNLHNKLIKNLRNYFYCKTIKSKLHNAIVQNDKKFTPLNLQDRTPQKNEKLTDRQTKKEEWHQKSLHGRHYCDLSLNNVDRIASNEWLHRGELFPETEGFMLAIQDQVIETRNYRKHIMKIPNTVDRCRRCNSASETIQHITGSCKAIVQTDYKYRHDQVAHIIHQKLALKYSLISTPPVPYYKYTPEIILDGKSHKLYFDRAILTDKTIHYNRPDIVLVDKINRTAHLIDIAVPNSHNVQTTISEKLSKYVDLKDEITRMWNLRKVTIVPIVLSTTGIIPMTLHHSRNELNLPKLTYGEGATIAQ

SEQ ID NO: 26163 - protein, 833 aa, Leptidea sinapis
MFAYSTLHAKKDDHSSLTQKIKSNCSDPNIFGNILNSNQNSKFNIFRKVEQKVNDGDVKGAASILFSNDILAPDSNETLLALQSKHPSPDANCGIPEPFFSDNHLRANDGDVLKAIMSFKTGSAGGPDGLTPQHLKDLVCPSTGDAGRALLEDIVLLVNLMLSGKVNTEITEILYGANICALKKKDGGIRPIAVGCTFRRLVSKICCKHISPFLSTKFIPTQLGFGCKSGCEAAVHAARTFLERNSGDVFLKLDVKNAFNSVDRGALLREVKNSIPSIYHYIWQCYSKPSKLLFKNHNIWSSVGCQQGDPLGPAIFSLAIHSAITKLKSKFNVWYLDDGTLGGEVDSVLDDLKVVIESFSSIGLELNFSKCELFIGENFQISDRVDISNKFNVLAPNIKVLDNSLDLLGAPLFPVSIPTILNDHIKKVNNVSDRLLKINSHMALTIIRSCLFVPKFTYLLRSSPLWKFPNLLDVIDISLKNILETVLNCAFTDRAWSQASLPIRFGGLGTRKVSGVALPAFLSSVHSAQPLVTRIVNHVPGNSEIVYLNEANNAWLNIANIQNFPDDLKCQKAWDALLCKSAFDDLLISSTDITERARLLAVTQNESGFWLQALPSAPIGTLLDNMTLSICVSLRLGIKLNEPHQCRCGVQVDALGRHGLSCLKSAGRISRHASINEVIRRAFAALNIPAVFEPNGITRRDGKRPDGMTLVAWARGRALVWDATCVDTLAPSHVHVTSVGAGAAASTAEDSKRRKYVGLSESYIFVPFGVETLGPWGPEARRMFKILSSRLNKATGNPSAGSYFGQRISLAIQRGNAASILGTLPRNDSFNFM

SEQ ID NO: 26164 - protein, 953 aa, Leptidea sinapis
MSDNNLNINNVCNQASDLVKCDLCSPTRYFRGARGLKIHIGKKHSSALVSDIHHSTLPSTNNAYHVTTNFSELLGKLKNSVPVVKRIPKGARITVATALSKVIRSTVNQNSKDSWEHLFMFAYSTLHAKKDDHSSLTQKIKSNCSDPNIFGNILNSNQNSKFNIFRKVEQKVNDGDVKGAASILFSNDILAPDSNETLLALQSKHPSPDANCVIPEPSFSDNHLRANDGDVLKAIMSFKTGSAGGPDGLTPQHLKDLVCPSTGDAGRALLEDIVLLVNLMLSGKVNTEITEILYGANICALKKKDGGIRPIAVGCTFRRLVSKICCKHISPFLSTKFIPTQLGFGCKSGCEAAVHAARTFLERNSGDVFLKLDVKNAFNSVDRGALLREVKNSIPSIYHYIWQCYSKPSKLLFKNHNIWSSVGCQQGDPLGPAIFSLAIHSAITKLKSKFNVWYLDDGTLGGEVDSVLDDLKVVIESFSSIGLELNFSKCELFIGENFQISDRVDITNKFNVLAPNIKVLDKNSLDLLGAPLFPVSIPTILNDHIKKFNNVSDRLLKINSHMALTIIRSCLFVPKFTYLLRSSPLWKFPNLLDVIDISLKNILETVLNCAFTDRAWSQASLPIRFGGLGTRKVSGVALPAFLSSVHSAQPLVTRIVNHVSGNSEIVYLNEANNAWLNIANIQNFPDDLKCQKAWDALLCKSAFDDLLISSTDITERARLLAVTQNESGFWLQALPSAPIGTLLDNMTLSICVSLRLGIKLNEPHQCRCGVQVDALGRHGLSCLKSAGRISRHASINEVIRRAFAALNIPAVLEPNGITRRDGKRPDGMTLVAWARGRALVWDATCVDTLAPSHVHVTSVGAGAAASTAEDGKRRKYVGLSESYIFVPFGVETLGPWGPEARRMFKILSSRLNKATGNPSAGSYFGQRISLAIQRGNAASILGTLPRNDSFNFM

SEQ ID NO: 26165 - protein, 953 aa, Leptidea sinapis
MSDNNLNINNVCSQASDLVKCDLCSPTRYFRGARGLKIHTGKKHSSALVSDIHHSTLPSTNNAYHVTTNFSELLGKLKNSVPVVKRIPKGARITVATALSKVIRSTVNQNSKDSWEHLFMFAYSTLHAKKDDHSSLTQKIKSNCSDPNIFGNILNSNQNSKFNIFRKVEQKVNDGDVKGAASILFSNDILAPDSNETLLALQSKHPSPDANCVIPEPSFSDNHLRANDGDVLKAIMSFKTGSAGGPDGLTPQHLKDLVCPSTGDAGRALLQDIVLLVNLMLSGKVNTEITEILYGANISALKKKDGGIRPIAVGCTFRRLVSKICCKHISPFLSSKFIPTQLGFGCKSGCEAAVHAARTFLERNSGDVFLKLDVKNAFNTVDRGALLREVKNSIPSIYHYIWQCYSKPSKLLFKNHNIWSSVGCQQGDPLGPAIFSLAIHSAITKLKSKFNVWYLDDGTLGGEVDSVLDDLKVVIESFSSIGLELNFSKCELFIGENFQISDRVDITNKFNVLAPNIKVLDKNSLDLLGAPLFPVSIPTILNDHIKKFNNVSDRLLKINSHMALTIIRSCLFVPKFTYLLRSSPLWKFPNLLDVIDISLKNILETVLNCAFTDRAWSQASLPIRFGGLGTRKVSGVALPAFLSSVHSAQPLVTRIVNHVPGNSEIVYLNEANNAWLNIANIQNFPDDLKCQKAWDALLCKSAFDDLLISSTDIAERARLLAVTQNESGFWLQALPSAPIGTLLDNMTLSICVSLRLGIKLNEPHQCRCGVQVDALGRHGLSCLKSAGRISRHASINEVIRRAFAALNIPAVLEPNGITRRDGKRPDGMTLVAWARGRALVWDATCVDTLAPSHVHVTSVGAGAAASTAEDSKRRKYVGLSESYIFVPFSVETLGPWCPEARRMFKILTSRLNKATGNPSAGSYFGQRISLAIQRGNAASILDTLPRNDSFNFM

SEQ ID NO: 26166 - protein, 949 aa, Leptidea sinapis
MSDNNLNINNVCNQASDLVKCDLCSPTRYFRGARGLKIHTGKKHSSALVSDIHHSTLPSTNNAYHVTTNFSELLGKLKNSVPVVKRIPKGARITVATALSKVIRSTVNQNSKDSWEHLFMFAYSTLHAKKDDHSSLTQKIKSNCFDPNIFGNFLNSNQNSKFNIFRKVEQKVNDGDVKGAASILFSNDILAPDSNETLLALQSKHPSPDANCVILEPSFSDNHLRANDGDVLKAIMSFKTGSAGGPDGLTPQHLKDLVCPSTGDAGRDIVLLVNLMLSGKVNTEITEILYGATICALKKKDGGIRPIAVGCTFRRLVSKICCKHISPFLSTKFIPTQLGFGCKSGCEAAVHAARTFLKRNSGDVFLKLDVKNAFNSVDRGALLREVKNSIPSIYHYIWQCYSKPSKLLFKNHNIWSSVGCQQGDPLGPAIFSLAIHSAITKLKSKFNVWYLDDGTLGGEVDSVLDDLKVVIESFSSIGLELNFSKCELFIGENFQISDRVDITNKFNVLAPNIKVLDKNSLDLLGAPLFPVSIPTILNDHIKKFNNVSDRLLKINSHMALTIIRSCLFVPKFTYLLRSSPLWKFPNLLDVIDISLKNILETVLNCAFTDRAWSQASLPIRFGGLGTRKVSGVALPAFLSSVHSAQPLVTRIVNHVPGNSEIVYLNEANNAWLNIANIQNFLDDLKSQKAWDALLCKSAFDDLLISSTDITERARLLAVTQNESGFWLQALPSAPIGTLLDNMTLSICVSLWLGIKLNEPHQCRCGVQVDALGRHGLSCLKSAGRISRHASINEVIRRAFAALNIPAVLEPNGITRRDGKRPDRMTLLAWAQGRALVWDATCVDTLAPSHVHVTSVGAGAAASTAEDSKRRKYVGLSESYIFVPFGVETLGPWGPEARRMFKILSSRLNKATGNPSAGSYFGQRISLAIQRGNAASILGTLPRNDSFNFM

SEQ ID NO: 26167 - protein, 953 aa, Leptidea sinapis
MSDNNLNINNVCNQASDLVKCNLCSPTRYFRGARGLKIHIGKKHSSALVSDIHHSTLPSTNNAYHVTTNFSELLGKLKNSVPVVKRIPKGARITVATALSKVIRSTVNQNSKDSWEHLFMFAYSTLHAKKDDHSSLTQKIKSNCSDPNIFGNILNSNQNSKFNIFRKVEQKVNDGDVKGAASILFSNDILAPDSNETLLALQSKHPSPDANCVIPEPSFSDNHLRANDGDVLKAIMSFKTGSAGGPDGLTPQHLKDLVCPSTGDAGRALLEDIVLLVNLMLSGKVNTEITEILYGANICALKKKDGGIRPIAVGCTFRRLVSKICCKHISPFLSTKFIPTQLGFGCKSGCEAAVHAARTFLERNSGDVFLKLDVKNAFNSVDRGALLREVKNSIPSVYHYIWQCYSKPSKLLFKNHNIWSSVGCQQGDPLGPAIFSLAIHSAITKLKSKFNVWYLDDGTLGGEVDSVLDDLKVVIESFSSIGLELNFSKCELFIGENFQISDRVDITNKFNVLAPNIKVLDKNSLDLLGAPLFPVSIPTILNDHIKKFNNVSDRLLKINSHMALTIIRSCLFVPKFTYLLRSSPLWKFPNLLDVIDISLKNILETVLNCAFTDRAWSQASLPIRFGGLGTRKVSGVALPAFLSSVHSAQPLVTRIVNHVSGNSEIVYLNEANNAWLNIANIQNFPDDLKCQKAWDALLCKSAFDDLLISSTDITERARLLAVTQNESGFWLQALPSAPIGTLLDNMTLSICVSLRLGIKLNEPHQCRCGVQVDALGRHGLSCLKSAGRISRHASINEVIRRAFAALNIPAVLEPNGITRRDGKRPDGMTLVAWARGRALVWDATCVDTLAPSHVHVTSVGAGAAASTAEDSKRRKYVGLSESYIFVPFGVETLGPWGPEARRMFKILSSRLNKATGNPSAGSYFGQRISLAIQRGNAASILGTLPRNDSFNFM

SEQ ID NO: 26168 - protein, 953 aa, Leptidea sinapis
MSDNNLNINNVCNQASDLVKCDLCSPTRYFRGARGLKIHIGKKHSSALVSDIHHSTLPSTNKAYHITTNFSELLGKLKNSVPVVKRIPKGARITVATALSKVIRSTVNQNSKDSWEHLFMFAYSTLHAKKDDHSSLTQKIKSNCSDPNIFGNILNSNQNSKFNIFRKVEQKVNDGDVKGAASILFSNDILAPDSNETLLALQSKHPSPDANCVIPEPSFSDNHLRANDGDVLKAIMSFKTGSAGGPDGLTPQHLKDLVCPSTGDAGRALLEDIVLLVNLMLSRKVNTEITEILYGANICALKKKDGGIRPIAVGCTFRRLVSKICCKHISPFLSTKFIPTQLGFGCKSGCEAAVHAARTFLERNSGDVFLKLDVKNAFNSVDRGALLREVKNSIPSIYHYIWQCYSKPSKLLFKNHNIWSSVGCQQGDPLGPAIFSLAIHSAITKLKSKFNVWYLDDGTLGGEVDSVLDDLKVVIESFSSIGLELNFSKCELFIGENFQISDRVDITNKFNVLAPNIKVLDKNSLDLLGAPLFPVSIPTILNDHIKKFNNVSDRLLKINSHMALTIIRSCLFVPKFTYLLRSSPLWKFPNLLDVIDISLKNILETVLNCAFTDRAWSQASLPIRFGGLGTRKVSGVALPAFLSSVYSAQPLVTRIVNHVPDNSEIVYLNEANNAWLNIANIQNFPDDLKCQKAWDALLCKSAFDDLLISSTDITERARLLAVTQNESGFWLQALPSAPIGTLLDNMTLSICVSLRLGIKLNEPHQCRCGVQVDALGRHGLSCLKSAGRISRHASINEVIRRAFAALNIPAVLEPNGITRRDGKRPDGMTLVAWARGRALVWDATCVDTLAPSHVHVTSVGAGAAASTAEDSKRRKYVGLSESYIFVPFGVETLGPWGPEARRMFKILSSRLNKATGNPSAGSYFGQRISLAIQRGNAASILGTLPRNDSFNFM

SEQ ID NO: 26169 - protein, 834 aa, Leptidea sinapis
MFAYSTLHAKKDDHSSLTQKIKSNCSDPNIFGNILNSNQNSKFNIFRKVEQKVNDGDVKGAASLLFSNDILAPDSNETLLALQSKHPSPDANCVIPEPSFSDNHLRANDGDVLKAIMSFKTGSAGGPDGLTPQHLKDLVCPSSGDAGRALLEDIVLLVNLMLSGKVNTEITEILYGANICALKKKDGGIRPIAVGCTFRRLVSKICCKHISPFLSTKFIPTQLGFGCKSGCEAAVHAARTFLERNSGDVFLKLDVKNAFNSVDRGALLREVKNSIPSIYHYIWQCYGKPSKLLFKNHNIWSSVGCQQGDPLGPAIFSLAIHSAITKLKSKFNVWYLDDGTLGGEVDSVLDDLKVVIESFSSIGLELNFSKCELFIGENFQISDRVDITNKFNVLAPNIKVLDKNSLDLLGAPLFPVSIPTILNDHIKKFNNVSDRLLKINSHMALTIIRSCLFVPKFTYLLRSSPLWKFPNLLDVIDISLKNILETILNCAFTDRAWSQASLPIRFGGLGTRKVSGVALPAFLSSVHSAQPLVTRIVNHVPGNSEIVYLKEANNAWLNIANIQNFPDDLKCQKAWDALLCKSAFDDLLISSTDITERARLLAVTENESGFWLQALPSAPIGTLLDNMTLSICVSLRLGIKLNEPHQCRCGVQVDALGRHGLSCLKSAGRISRHASINEVIRRAFAALNIPAVLEPNGITRRDGKRPDGMTLVAWARGRALVWDATCVDTLAPSHVQVTSVGAGAAASTAEDSKRRKYVGLSESYIFVPFGVETLGPWGPEARRMFKILSSRLNKATGNPSAGSYFGQRISLAIQRGNAASILGTLPRNDSFNFM

SEQ ID NO: 26170 - protein, 953 aa, Leptidea sinapis
MSDNNLNINNVCNQASDLVKCDLCSPTRYFRGARGLKIHTGKKHSSALVSDIHHSTLPSTNNAYHVTTNFSELLGKLKNSVPVVKRIPKGARITVATALSKVIRSTVNQNSKDSWEHLFMFAYSTLHAKKDDHSSLTQKIKSNCSDPNIFGNILNSNQNSKFNIFRKVEQKVNDGDVKGAASILFSNDILAPDSNETLLALQSKHPLPDANCVIPEPSFSDNHLRANDGDVLKAIMSFKTGSAGGPDGLTPQHLKDLVCPSTGDAGRALLEDIVLLVNLMLSGKVNTEITEILYGANICALKKKDGGIRPIAVGCTFRRLVSKICCKHISPFLSTKFIPTQLGFGCKSGCEAAVHAARTFLEKNSGDVFLKLDVKNAFNSVDRGALLREVKNSIPSIYHYIWQCYSKPSKLLFKNHNIWSSVGCQQGDPLGPAIFSLAIHSAITKLKSKFNVWYLDDGTLGGEVDSVLDDLKVVIESFSSIGLELNFSKCELFIGENFQISDRVDIINKFNVLAPNIKVLDKNSLDLLGAPLFPVSIPTILNDHIKKFNNVSDRLLKINSHMALTIIRSCLFVPKFTYLLRSSPLWKFPNLLDVIDISLKNILETVLNCAFTDRAWSQASLPIRFGGLGTRKISGVALPAFLSSVHSAQPLVTRIVNHVPGNSEIVYLNEANNAWLNIANIQNFPDDLKCQKAWDALLCKPAFDDLLISSTDITEPARLLAVTQNESGFWLQALPSAPIGTLLDNMTLSICVSLRLGIKLNEPHQCRCGVQVDALGRHGLSCLKSAGRISRHASINEVIRRAFAALNIPAVLEPNGITRRDGKRPDGMTLVAWARGRALVWDATCVDTLAPSHVHVTSVGAGAAASTAEDSKRRKYVGLSESYIFVPFGVETLGPWGPEARRMFKILSSRLNKATGNPSAGSYFGQRISLAIQRGNAASILGTLPRNDSFNFM

SEQ ID NO: 26171 - protein, 955 aa, Leptidea sinapis
MSDNNLNLCLYNVCNQASDLVKCDLCSPTRYFRGARGLKIHIGKKHSSALVSDIHHSTLPSTNKAYHVTTNFSELLGKLKNSVPVVKRIPKGARITVATALSKVIRSTVNQNSKDSWEHLFMFAYSTLHAKKDDHSSLTQKIKSNCSDPNIFVNILNSNQNSKFNIFRKVEQKVNDGDVKGAASILFSNDILAPDSNETLLALQSKHPSPDANCVIPEPSFSDNHLRANDGDVLKAIMSFKTGSAGGPDGLTPQHLKDLVCPSTGDAGRALLEDIVLLLNLMLSGKVNTEITEILYGANICALKKKDGGIRPIAVGCTFRRLVSKICCKHISPFLSTKFIPTQLGFGCKSGCEAAVHAARTFLERNSGDVFLKLDVKNAFNSVDRGALLREVKNSIPSIYHYIWQCYSKPSKLLFKNHNIWSSVGCQQGDPLGPAIFSLAIHSAITKLKSKFNVWYLDDGTLGGEVDSVLDDLKVVIESFSSIGLELNFSKCELFIGENFQISDRVDITNKFNVLAPNIKVLDKNSLDLLGAPLFPVSIPTILNDHIKKFNNVSDRLLKINSHMALTIIRSCLFVPKFTYLLRSSPLWKFPNLLDVIDISLKNILETVLNCAFTDRAWSQASLPIRFGGLGTRKVSGVALPAFLSSVYSAQPLVTRIVNHVPGNSEIVYLNEANNAWLNIANIQNFPDDLKCQKAWDALLCKSAFDDLLISSTDITERARLLAVTQNESGFWLQALPSAPIGTLLDNMTLSICVSLRLGIKLNEPHQCRCGVQVDALGRHGLSCLKSAGRISRHASINEVIRRAFAALNIPAVLEPNGITRRDGKRPDGMTLVAWARGRALVWDATCVDTLAPSHVHVTSVGAGAAASTAEDSKRRKYVGLSESYIFVPFGVETLGPWGPEARRMFKILSSRLNKATGNPSAGSYFGQRISLAIQRGNAVSILGTLPRNDSFNFM

SEQ ID NO: 26172 - protein, 834 aa, Leptidea sinapis
MFAYSTLHAKKDDHSSLTQKIKSNCSDPNIFGNILNSNQNSKFNIFRKVEQKVNDGDVKGAASILFSNDILAPDSNETLLALQSKHPSPDANCVIPEPSFSDNHLRANDGDVLKAIMSFKTGSAGGPDGLTPQHLKDLVCPSTGDAGRALLEDIVLLVNLMLSGKVNTEITEILYGANICALKKKDGGIRPIAVGCTFRRLVSKICCKHISPFLSTKFIPTQLGFGCKSGCEAAVHAARTFLERNSGDVFLKLDVKNAFNSVDRGALLREVKNSIPSIYHYIWQCYSKPSKLLFKNHNIWSSVGCQQGDPLGPAIFSLAIHSAITKLKSKFNVWYLDDGTLGGEVDSVLDDLKVVIESFSSIGLELNFSKCELFIGENFQISDRVDITNKFNVLAPNIKVLDKNSLDLLGAPLFPVSIPTILNDHIKKFNNVSDRLLKINSHMALTIIRSCLFVPKFTYLLRSSPLWKFPNLLDVIDISLKNILETVLNCAFTDRAWSQASLPIRFGGLGTRKVSGVALPAFLSSVYSAQPLVTRIVNHVPGNSEIVYLNEANNAWLNIANIQNFPDDLKCQKAWDALLCNSAFDDLLISSTDITERARLLAVTQNESGFWLQALPSAPIGTLLDNMTLSICVSLRLGIKLNEPHQCRCGVQVDALGRHGLSCLKSAGRISRHASINEVIRRAFAALNIPAVLEPNGITRRDGKRPDGMTLVAWARGRALVWDATCVDTLAPSHVHVTSVGAGAAASTAEDSKRRKYVGLSESYIFVPFGVETLGPWGPEARRMFKILSSRLNKATGNPSAGSYFGQRISLAIQRGNAASILGTLPRNDSFNFM

SEQ ID NO: 26173 - protein, 953 aa, Leptidea sinapis
MSDNNHIINNVCSQASDLVKCDLCSPTRYFRGARGLKIHTGKKHSSALVSDIHYSTLPLTNNAYHVTTNFSELLGKLKNSVPVVKRIPKGARITVATALSKVIRSTVNQNSKDSWEHLFMFAYSTLHAKKNDHSSLTQKIKSNCSDPNIFGNILNSKQNSKFNIFRKVEQKVNDGDVKGAASILFSNDILAPDSNETLLALQSKHPSPDANCDIPEPSFSDNHLRANDGDVLKAIMSFKTGSAGGPDGLTPQHLKDLVCPSTGDAGRALLEDIVLLVNLMLSGKVNTEITEILYSANICALKKKDGGIRPIAVGCTFRRLVSKICCKHISPFLSTKFIPTQLGFGCKSGCEAAVHAARTFLERNSDDVFLKLDVKNAFNSVDRGALLREVKNSIPSIYHYIWQCYSKPSKLLFKTHNIWSSVGCQQGDPLGPAIFSLAIHSAITKLKSKFNVWYLDDGTLGGEVDSVLDDLKVVIESFSSIGLELNFSKCELFIGENFQISDRVDITNKFNVLAPNIKVLDKNSLHLLGAPLFPVSIPTILNDHIKKFNNVSDRLLKINSHMALTIIRSCLFVPKFTYLLRSSPLWKFPNLLDVIDISLKNILETVLNCAFTDRAWSQASLPIRFGGLGTRKVSGVALPAFLSSVHSAQPLVTRIVNHVPGNSEIVYLNEANNAWLNIAKIQNFPDDLKCQKAWDALLCKSAFDDLLISSTDITERARLLAVTENESGFWLQALPSAPIGTLLDNMTLSICVSLRLGIKLNEPHQCRCGVQVDALGRHGLSCLKSAGRISRHASINEVIRRAFAALNIPAVLEPNGITRRDGKRPDGMTLVAWARGRALVWDATCVDTLAPSHVQVTSVGAGAAASTAEDSKRRKYVGLSESYIFVPFGVETLGPWGPEARRMFKILSSRLNKATGNPSAGSYFGQRISLAIQRGNAASILGTLPRNDSFNFM

SEQ ID NO: 26174 - protein, 834 aa, Leptidea sinapis
MFAYSTLHAKKDDHSSLTQKIKSNCSDPNIFGNILNSNQNSKFNIFRKVEQKVNDGDVKGAASILFSNDILAPDSNETLLALQSKHPSPDANCVIPEPSFSDNHLRANDGDVLKAIMSFKTGSAGGPDGLTPQHLKDLVCPSTGDAGRALLEDIVLLVNLMLSGKVNTEITEILYGANICALKKKDGGIRPIAVGCTFRRLVSKICCKHISPFLSTKFIPTQLGFGCKSGCEAAVHAARTFLERNSGDVFLKLDVKNAFNSVDRGALLREVKNSIPSIYHYIWQCYSKPSKLLFKNHNIWSSVGCQQGDPLGPAIFCLAIHSAITKLKSNFNVWYLDDGTLGSEVDSVLDDLKVVIESFSSIGLELNFSKCELFIGENFQISDRVDITNKFNVLAPNIKVLDKNSLDLLGAPLFPVSIPTILNDHIKKFNNVSDRLLKINSHMALIIIRSCLFVPKFTYLLRSSPLWKFPNLLDVIDISLKNILETILNCAFTDRAWSQASLPIRFGGLGTRKVSGVALPAFLSSVHSAQPLVTRIVNHVPGNSEIVYLNEANNAWLNIANIQNFPDDLKCQKAWDALLCKSAFDDLLISSTDITERARLLAVTENESGFWLQALPSAPIGTLLDNMTLSICVSLRLGIKLNEPHQCRCGVQVDALGRHGLSCLKSAGRISRHASINEVIRRAFAALNIPAVLEPNGITRRDGKRPDGMTLVAWARGRALVWDATCVDTLAPSHVQVTSVGAGAAASTAEDSKRRKYVGLSESYIFVPFGVETLGPWGPEARRMFKILSSRLNKATGSPSAGSYFGQRISLAIQRGNAASILGTLPRNDSFNFM

SEQ ID NO: 26175 - protein, 953 aa, Leptidea sinapis
MSDNNININNVCSQASDLVKCDLCSPTRYFRGARGLKIHIGKKHSSALVSDIHHSTLPSTNNAYHVTTNFSELLGKLKNSVPVVKRIPKGARITVATALSKVIRSTVNQNSKDSWEHLFMFAYSTLHAKKDDHSSLTQKIKSNCSDPNIFGNILNSNQNSKFNIFRKVEQKVNDGDVKGAASILFSNDILAPDSNETLLALQSKHPSPDANCVIPEPSFSDNHLRANDGDVLKAIMSFKTGSAGGPDGLTPQHLKDLVCPSTGDAGRALLEDIVLLVNLMLSGKVNTEITEILYGANICALKKKDGGIRPIAVGCTFRRLVSKICCKHISPFLSTKFIPTQLGFGCKSGCEAAVHAARTFLERNSGDVFLKLDVKNAFNSVDRGALLREVKNSIPSIYHYIWQCYSKPSKLLFKNHNIWSSVGCQQGDPLGPAIFSLAIHSAITKLKSKFNVWYLDDGTLGGEVDSVLDDLKVVIESFSSIGLELNFSKCELFIGENFQISDRVDITNKFNVLALNIKVLDKNSLDLLGAPLFPVSIPTILNDHIKKFNNVSDRLLKINSHMALTIIRSCLFVPKFTYLLRSSPLWKFPNLLDVIDISLKNILETVLNCAFTDRAWSQASLPIRFGGLGTRKVSGVALPAFLSSVHSAQPLVTRIVNHVSGNSEIVYLNEANNAWLNIANIQNFPDDLKCQKAWDALLCKSAFDDLLISSTDITERARLLAVTQNESGFWLQALPSAPIGTLLDNMTLSICVSLRLGIKLNEPHQCRCGVQVDALGRHGLSCLKSAGRISRHASINEVIRRAFAALNIPAVLEPNGITRRDGKRPDGMTLVAWARGRALVWDATCVDTLAPSHVHVTSVGAGAAASTAEDSKRRKYVGLSESYIFVPFGVETLGPWGPEARRMFKILSSRLNKATGNPSAGSYFGQRISLAIQRGNAASILGTLPRNDSFNFM

SEQ ID NO: 26176 - protein, 947 aa, Aporia crataegi
MSQNQNLVKCELCSLPCYFKGKRGLSIHIGRKHNTTLCPVADVSAGPSGPSNNTPPVLAKDFIHVLGSLKGAVLTVKRVPKGARISVATALSHIIQKVVSKNTKSSWEHLFTFAYNILHVERDGRGSLTQKIKDNCSNATFSFDDSIIRSHVNSKFNLFRKVEQKINDGDLKGAASILFSNDTLAPDSPETLLALRSKHPLPAPNCQLPDPPSLSDNNLQISDNDVLDAIMSFKSGSAGGLDGITPQHLKDLVCVTNGDAGRDLLSDIKHLVNHMLSGRVPAEIVPILYGANMCALKKKDGGIRPIAVGCTFRRLVSKIACKHISATLSSKFIPVQLGFSCKGGCEAAVHATRTFIQNNVGDVLLKLDVKNAFNSVDRGSLLKEIKNNIPLVYNYLWQCYSNTSKLIFKNHIINSSVGCQQGDPLGPAIFSLAIHPIISRLYSKLNVWYLDDGTLGGDVNSVIDDLKAVIEGFDSIGLELNFSKCELFIDDKIPFDVRNNIINKFNTLAPNLKIVDKTSLRLLGAPVLNDSVPSVLQEHIDKFVNMSDRLVKINSHMALTIIRYCLFVPKFTYLLRSSPCWQFPNLLKVADLSLKNLLSLILNCSFTEQAWTQGTLPVRYGGLGIRQITSVALPAFLSSAYSTQVLVTKIVPCNLSTSNIAYVSEARTAWLNIIDEIPKDLKCQRLWDEPICKSVFEQLISSADMQERARLLAVSQIESGFWLQALPSAPIGTLLDNLSLSIAVSLRLGLKCTVPHQCRCGALVDTLGRHGLSCLKSAGRFSRHSSINDVIRRAFVSVNVPAILEPNGIIRSDGRRPDGMTLVAWSRGKALVWDATCVDTLASSHLHATSVAASGAASIAESNKRRKYESLMDSYIFVPFGVETLGPWGPEARRLFKEISTRLVETTGNPKAGSYFGQRVSIAIQRGNAASILGTHPNGFDEPFVFL

SEQ ID NO: 26177 - protein, 947 aa, Aporia crataegi
MSQNQNLVKCELCSLPCYFKGKRGLSIHIGRKHNTTLCPVADVSAGPSGPSNNTPPVSAKDFIHVLGSLKGAVLTVKRVPKGARISVATALSHIIQKVVSKNTKSSWEHLFTFAYNILHVERDGRGSLTQKIKDNCSNATFSFDDSIIRSHVNSKFNLFRKVEQKINDGDLKGAASILFSNDTLAPDSPETLLALKSKHPLPAPNCQLPDPPSLSDNNLQISDNDVLDAIMSFKSGSAGGLDGITPQHLKDLVCVTNGDAGRDLLSDIKHLVNHMLSGRVPAEIVPILYGANMCALKKKDGGIRPIAVGCTFRRLVSKIACKHISATLSSKFIPVQLGFSCKGGCEAAVHATRTFIQNNAGDVLLKLDVKNAFNSVDKGSLLKEIKNNIPLVYNYLWQCYSNTSKLIFKNHIINSSVGCQQGDPLGPAIFSLAIHPIISRLNSKLNVWYLDDGTLGGDVNSVIDDLKAVIEGFDSIGLELNFSKCELFIDDEIPFDVRNNIINKFNTLAPNLKIVDKTSLRLLGAPVLNDSVPSVLQQHIDKFVNMSDRLIKINSHMALTIIRYCLFVPKFTYLLRSSPCWQFPNLLKVADLSLKNLLSLILNCSFTEQAWTQGTLPVRYGGLGIRQITSVALPAFLSSAYSTQVLVTKIVHCNLSTSNIAYVSEARTAWLNIIDEIPKDLKCQRLWDEPICKSVFEQLISSADMQERARLLAVSQIESGFWLQALPSAPIGTLLDNLSLSIAVSLRLGLKCTVPHQCRCGALVDTLGRHGLSCLKSAGRFSRHSSINDVIRRAFVSVNVPAILEPNGIIRSDGRRPDGMTLVAWSRGKALVWDATCVDTLASSHLHATSVAAGGAASIAESNKRRKYESLMDSYIFVPFGVETLGPWGPEARRLFKEISTRLVETTGNPKAGSYFGQRVSIAIQRGNVASILGTHPNGFDEPFVFL

SEQ ID NO: 26178 - protein, 947 aa, Aporia crataegi
MSQNQNLVKCELCSLPCYFKGKRGLSIHIGRKHNTTLCPVADVSAGPSGPSNNTSPVSAKDFIHVLGSLKGAVLTVKRVPKGARISVATALSHIIQKVVSKNTKSSWEHLFTFAYNILHVERDGRGSLTQKIKDNCSNATFSFDDSIIRSHVNSKFNLFRKVEQKINDGDLKGAASILFSNDTLAPDSPETLLALKSKHPLPAPNCQLPDPPSLSDNNLQISDNDVLDAIMSFKSGSAGGLDGITPQHLKDLVCVTNGDAGRDLLSDIKHLVNHMLSGRVPAEIVPILYGANMCALKKKDGGIRPIAVGCTFCRLVSKIACKHISATLSSKFIPVQLGFSCKGGCEAAVHATRTFIQNNAGDVLLKLDVKNAFNSVDRGSLLKEIKNNIPLVYNYLWQCYSNTSKLIFKNHIINSSVGCQQGDPLGPAIFSLAIHPIISRLNSKLNVWYLDDGTLGGDVNSVIDDLKAVIEGFDSIGLELNFSKCELFIDDKIPFDVRNNIINKFNTLAPNLKIVDKTSLRLLGAPVLNDSVPSVLQEHIDKFVNMSDRLVKINSHMALTIIRYCLFVPKFTYLLRSSPCWQFPNLLKVADLSLKNLLSLILNCSFTEQAWTQGTLPVRYGGLGIRQITSVALPAFLSSAYSTQVLVTKIVPCNLSTSNIAYVSEARTAWLNIIDEIPKDLKCQRLWDEPICKSVFEQLISSADMQERARLLAVSQIESGFWLQALPSAPIGTLLDNLSLSIAVSLRLGLKCTVPHQCRCGALVDTLGRHGLSCLKSAGRFSRHSSINDVIRRAFVSVNVPAILEPNGIIRSDGRRPDGMTLVAWSRGKALVWDATCVDTLASSHLHATSVAAGGAASIAESNKRRKYESLMDSYIFVPFGVETLGPWGPEARRLFKEISTRLVETTGNPKAGSYFGQRVSIAIQRGNVASILGTHPNGFDEPFVFL

SEQ ID NO: 26179 - protein, 947 aa, Aporia crataegi
MSQNQNLVKCELCSLPCYFKGKRGLSIHIGRKHNTTLCPVADVSAGPSGPSNNTPPVSAKDFIHVLGSLKGAVLTVKRVPKGARISVATALSHIIQKVVSKNTKSSWEHLFTFAYNILHVERDGRGSLTQKIKDNCSNATFSFDDSIIRSHVNSKFNLFRKVEQKINDGDLKGAASILFSNDTLAPDSPETLLALKSKHPLPAPNCQLPDPPSLSDNNLQISDNDVLDAIMSFKSGSAGGLDGITPQHLKDLVCVTNGDAGRDLLSDIKHLVNHMLSGRVPAEIVPILYGANMCALKKKDGGIRPIAVGCTFRRLVSKIACKHISATLSSKFIPVQLGFSCKGGCEAAVHATRTFIQNNAGDVLLKLDVKNAFNSVDRGSLLKEIKNNIPLVYNYLWQCYSNTSKLIFKNHIINSSVGCQQGDPLGPAIFSLAIHPIISRLNSKLNVWYLDDGTLGGDVNSVIDDLKAVIEGFDSIGLELNFSKCELFIDDEIPFDVRNNIINKLNTLAPNLKIVDKTSLRLLGAPVLNDSVPSVLQEHIDKFVNMSDRLIKINSHMALTIIRYCLFVPKFTYLLRSSPCWQFPNLLKVADLSLKNLLSLILNCSFTEQAWTQGTLPVRYGGLGIRQITSVALPAFLSSAYSTQVLVTKIVPCNLSTSNIAYVSEARTAWLNIIDEIPKDLKCQRLWDEPICKSVFEQLISSADMQERARLLAVSQIESGFWLQALPSAPIGTLLDNLSLSIAVSLRLGLKCTVPHQCRCGALVDTLGRHGLSCLKSAGRFSRHSSINDVIRRAFVSVNVPAILEPNGIIRSDGRRPDGMTLVAWSRGKALVWDATCVDTLASSHLHATSVAAGGAASIAESNKRRKYESLMDSYIFVPFGVETLGPWGAEARRLFKEISTRLVETTGNPKAGSYFGQRVSIAIQRGNVASILGTHPNGFDEPFVFL

SEQ ID NO: 26180 - protein, 947 aa, Aporia crataegi
MSQNPNLVKCELCSLPCYFKGKRGLSIHIGRKHNTTLCPVADVSAGPSGPSNNTPPVSAKDFIHVLGSLKGAVLTVKRVPKGARISVATALSHIIQKVVSKNTKSSWEHLFTFAYNILHVERDGRGSLTQKIKDNCSNATFSFDDSIIRSHVNSKFNLFRKVEQKINDGDLKGAASILFSNDTLAPDSPETLLALKSKHPLPAPNCQLPDPPSLSDNNLQISDNDVLDAIMSFKSGSAGGLDGITPQHLKDLVCVTNGDAGRDLLSDIKHLVNHMLSGRVPAEIVPILYGANMCALKKKDGGIRPIAVGCTFRRLVSKIACKHISATLSSKFIPVQLGFSCKGGCEAAVHATRTFIQNNAGDVLLKLDVKNAFNSVDRGSLLKEIKNNIPLVYNYLWQCYSNTSKLIFKNHIINSSVGCQQGDPLGPAIFSLAIHPIISRLNSKLNVWYLDDGTLGGDVNSVIDDLKAVIEGFDSIGLELNFSKCELFIDDEIPFDVRNNIINKFNTLAPNLKIVDKTSLRLLGAPVLNDSVPSVLQQHIDKFVNMSDRLIKINSHMALTIIRYCLFVPKFTYLLRSSPCWQFPNLLKVADLSLKNLLSLILNCSFTEQAWTQGTLPVRYGGLGIRQITSVALPAFLSSAYSTQVLVTKIVPCNLSTSNIAYVSEARTAWLNIIDEIPKDLKCQRLWDEPICKSVFEQLISSADMQERARLLAVSQIESGFWLQALPSAPIGTLLDNLSLSIAVSLRLGLKCTVPHQCRCGALVDTLGRHGLSCLKSAGRFSRHSNINDVIRRAFVSVNVPAILEPNGIIRSDGRRPDGMTLVAWSRGKALVWDATCVDTLASSHLHATSVAAGGAASIAESNKRRKYESLMDSYIFVPFGVETLGPWGPEARRLFKEISTRLVETTGNPKAGSYFGQRVSIAIQRGNVASILGTHPNGFDEPFVFL

SEQ ID NO: 26181 - protein, 947 aa, Aporia crataegi
MSQNQNLVKCELCSLPCYFKGKRGLSIHIGRKHNTTLCPVADVSAGPSGPSNNTPPVSAKDFIHVLGSLKGAVLTVKRVPKGARISVATALSHIIQKVVSKNTKSSWEHLFTFAYNILHVERDGRGSLTQKIKDNCSNATFSFDDSIIRSHVNSKFNLFRKVEQKINDGDLKGAASILFSNDTLAPDSPETLLALRSKHPLPAPNCQLPDPPSLSDNNLQISDNDVLDAIMSFKSGSAGGLDGITPQHLKDLVCVTNGDAGRDLLSDIKHLVNHMLSGRVPAEIVPILYGANMCALKKKDGGIRPIAVGCTFRRLVSKIACKHISATLSSKFIPVQLGFSCKGGCEAAVHATRTFIQHNAGDVLLKLDVKNAFNSVDRGSLLKEIRNNIPLVYNYLWQCYSNTSKLIFKNHIINSSVGCQQGDPLGPAIFSLAIHPIISRLNSKLNVWYLDDGTLGGDVNSVIDDLKAVIEGFDSIGLELNFSKCELFIDDKIPFDVRNNIINKFNTLAPNLKIVDKTSLRLLGAPVLNDSVPSVLQEHIDKFVNMSDRLVKINSHMALTIIRYCLFVPKFTYLLRSSPCWQFPNLLKVADLSLKNLLSLILNCSFTEQAWTQGTLPVRYGGLGIRQITSVALPAFLSSAYSTQVLVTKIVPCNLSTSNIAYVSEARTAWLNIIDEIPKDLKCQRLWDEPICKSVFEQLISSADMQERARLLAVSQIESGFWLQALPSAPIGTLLDNLSLSIAVSLRLGLKCTVPHQCRCGALVDTLGRHGLSCLKSAGRFSRHSSINDVIRRAFVSVNVPAILEPNGIIRSDGRRPDGMTLVAWSRGKALVWDATCVDTLASSHLHATSVAASGAASIAESNKRRKYESLMDSYIFVPFGVETLGPWGPEARRLFKEISTRLVETTGNPKAGSYFGQRVSIAIQRGNAASILGTHPNGFDEPFVFL

SEQ ID NO: 26182 - protein, 947 aa, Aporia crataegi
MSQNQNLVKCELCSLPCYFKGKRGLSIHIGRKHNTTLCPVADVSAGPSGPSNNTPPVSAKDFIHVLGSLKGAVLTVKRVPKGARISVATALSHIIQKVVSKNTKSSWEHLFTFAYNILHVERDGRGSLTQKIKDNCSNATFSFDDSIIRSHVNSKFNLFRKVEQKINDGDLKGAASILFSNDTLAPDSPETLLALRSKHPLPAPNCQLPDPPSLSDNNLQISDNDVLDAIMSFKSGSAGGLDGITPQHLKDLVCVTNGDAGRDLLSDIKHLVNHMLSGRVPAEIVPILYGANMCALKKKDGGIRPIAVGCTFRRLVSKIACKHISATLSSKFIPVQLGFSCKGGCEAAVHATRTFIQNNAGDVLLKLDVKNAFNSVDRGSLLKEIKNNIPLVYNYLWQCYSNTSKLIFKNHIINSSVGCQQGDPLGPAIFSLAIHPIISRLNSKLNVWYLDDGTLGGDVNSVIDDLKAVIEGFDSIGLELNFSKCELFIDDKISFDVRNNIINKFNTLAPNLKIVDKTSLRLLGAPVLNDSVPSVLQEHIDKFVNMSDRLVKINSHMALTIIRYCLFVPKFTYLLRSSPCWQFPNLLKVADLSLKNLLSLILNCSFTEQAWTQGTLPVRYGGLGIRQITSVALPAFLSSAYSTQVLVTKIVPCNLSTSNIAYVSEARTAWLNIIDEIPKDLKCQRLWDEPICKSVFEQLISSADMQERARLLAVSQIESGFWLQALPSAPIGTLLDNLSLSIAVSLRLGLKCTVPHQCRCGALVDTLGRHGLSCLKSAGRFSRHSSINDVIRRAFVSVNVPAILEPNGIIRSDGRRPDGMTLVAWSRGKALVWDATCVDTLASSHLHATSVAASGAASIAESNKRRKYESLMDSYIFVPFGVETLGPWGPEARRLFKEISTRLVETTGNPKAGSYFGQRVSIAIQRGNAASILGTHPNGFDEPFVFL

SEQ ID NO: 26183 - protein, 902 aa, Aporia crataegi
MSQNQNLVKCELCSLPCYFKGKRGLSIHIGRKHNNTLCPVADVSAGPSGPSNNAPPVSAKDFIHVLGSLKGAVLTVKRVPKGARISVATALSHIIQKVVSKNTKSSWEHLFTFAYNILHVERDGRGSLTQKIKDNCSNATFSFDDSIIRSHVNSKFNLFRKVEQKINDGDLKGAASILFSNDTLAPDSPETLLALKSKHPLPAPNCQLPDPPSLSDNNLQISDNDVLDAIMSFKSGSAGGLDGITPQHLKDLVCVTNGDAGRDLLSDIKHLVNHMLSGRVPAEIVPILYGANMCALKKKDGGIRPIAVGCTFRRLVSKIACKHISATLSSKFIPVQLGFSCKGGCEAAVHATRTFIQNNAGDVLLKLDVKNAFNSVDRGSLLKEIKNNIPLVYNYLWQCYSNTSKFIFKNHIINSSVGCQQGDPLGPAIFSLAIHPIISRLNSKLNVWYLDDGTLGGDVNSVIDDLKAVIEGFDSIGLELNFSKCELFIDDKIPFDVRNNIINKFNTLAPNLKIVDKTSLRLLGAPVHNDSVPSVLQEHIDKFVNMSDRLVKINSHMALTIIRYCLFVPKFTYLLRSSPCWQFPNLLKVADLSLKNLLSLILNCSFTEQAWTQGTLPVRYGGLGIRQITSVALPAFLSSAYSTQVLVTKIVPCNLSTSNIAYVSEARTAWLNIIDEIPKDLKCQRLWDEPICKSVFEQLISSADMQERARLLAVSQIESGFWLQALPSAPIGTLLDNLSLSIAVSLRLGLKCTVPHQCRCGALVDTLGRHGLSCLKSAGRFSRHSSINDVIRRAFVSVNVPAILEPNGIIRSDGRRPDGMTLVAWSRGKALVWDATCVDTLASSHLHATSVAAGGAASIAESNKSENMKVSWILIFSFLLEWRLWVHGGQKRVDCLKRYRRA

SEQ ID NO: 26184 - protein, 947 aa, Aporia crataegi
MSQNQNLVKCELCSLPCYFKGKRGLSIHIGRKHNTTLCPVADVSAGPSGPSNNTSPVSAKDFIHVLGSLKGAVLTVKRVPKGARISVATALSHIIQKVVSKNTKSSWEHLFTFAYNILHVERDGRGSLTQKIKDNCSNATFSFDDSIIRSHVNSKFNLFRKVEQKINDGDLKGAASILFSNDTLAPDSPETLLALKSKHPLPAPNCQLPDPPSLSDNNLQISDNDVLDAIMSFKSGSAGGLDGITPQQLKDLVCVTNGDAGRDLLSDIKHLVNHMLSGRVPAEIVPILYGANMCALKKKDGGIRPIAVGCTFRRLVSKIACKHISATLSSKFIPVQLGFSCKGGCEAAVHATRTFIQNNAGDVLLKLDVKNAFNSVDRGSLLKEIKNNIPLVYNYLWQCYSNTSKLIFKNHIINSSVGCQQGDPLGPAIFSLAIHPIISRLNSKLNVWYLDDGTLGGDVNSVIDDLKAVIEGFDSIGLELNFSKCELFIDDKIPFDVRNNIINKFNTLAPNLKIVDKTSLRLLGAPVLNDSVPSVLQEHIDKFVNMSDRLVKINSHMALTIIRYCLFVPKFTYLLRSSPCWQFPNLLKVADLSLKNLLSLILNCSFTEQAWTQGTLPVRYGGLGIRQITSVALPAFLSSAYSTQVLVTKIVPCNLSTSNIAYVSEARTAWLNIIDEIPKDLKCQRLWDEPICKSVFEQLISSADMQERARLLAVSQIESGFWLQALPSAPIGTLLDNLSLSIAVSLRLGLKCTVPHQCRCGALVDTLGRHGLSCLKSAGRFSRHSSINDVIRRAFVSVNVPAILEPNGIIRSDGRRPDGMTLVAWSRGKALVWDATCVDTLASSHLHATSVAAGGAASIAESNKRRKNESLMDSYIFVPFGVETLGPWGPEARRLFKEISTRLVETTGNPKAGSYFGQRVSIAIQRGNVASILGTHPNGFDEPFVFL

SEQ ID NO: 26185 - protein, 1175 aa, Thyatira batis
MIWNDEVNTFIMRSYYYITKLETDRTMYCSRLYDTFKSQYPNINVSAQRIADQRRVIIRNKRLSDVQLNKIKNEVAEQIKNDESLAGTTPIENITSQISHNTPHTYHSTHSIDILSQSQTQDPSLNSVTEICLTQPSQIESTAQNLMSTSFEDVLIDSDTQNLIEQLETAITQFSGTDPTTRPKLPKLKENHKLYILIGIFNKHIIHNFYRQDSNLLDIHTLIYCSALVISRKIGYKIENERSHSKTRKTKYSDPPWKTRIENDIKKLRANIGVLTQYINNNRTKKVLKKIDIIFNKFKVHSSHENENNRPEEYLDTLKQKLSLKANRLARYNKALQRKQDNKLFTTNEKVFYRNLNNTYQTQNNPKIPTESELKDYWGKLWEKNGEHSDNASWIKDEERNWETIEEMEFSEITREEIQAIIGRTKNWKSPGCDGIHNFWYKKFHTLHGVLAKNITDIITETEILPNCFTLGVTYMLPKSQNTTDPTQYRPITCLPTIYKIITSCITNKINKHLELNNILTEEQKGCRQNHKGCKEQLVIDMTILKHASTHNRNLHLTYIDYRKAFDSVPHSWLVRVLQIYKINPTIINFLENTMENWRTRLHLSTKNKQIITDEVSIGTGIFQDDSLSPLWFCLALNPLSHLLTQSNIGYKLTTATFISHLMYMDDIKLFAKSDKDMKNLVDITVNFSNDIRMTFGIEKCKTLHLQKGKVIGGNYEIGEEINITAMEGNDTYKYLGIQQAKYINHKQIKEELSVEYYRRINLICKKKFNSKKFIKAINTAIPVLTYSFGIIKWTHTDIKRLQVKTRTIFTKHNYLHPKSAIERLTVKREKGGRGLIDLQILWNKQIQNIRTFFYNKGTRSKIHLATIESDSNYTPLNLKEGIREIDLTPEELEKQKHQAWRQKVLHGRHIHDLEQPHIDMEASNKWLKMGSLFPETEGFMIAIQDQVINTRNYKKFILKDPNIQTDRCRKCNSQSETIQHITGACPNLAQNDYTHRHNQIANYIHQKLAFKFNLISGKPLPYYVYSPKPVLENIHHKIYFDRAILTDKTIHFNRPDITLLNKHDNTAFLIDIAVPNTHNIQKTISDKIHKYTDLKAEIMRIWKLDRVFIVPLIISSTGVISKHLKQYLQQLDLPESSLITMQKAAILNTCRIVRKLLQETPTSISLPHTENHLV

SEQ ID NO: 26186 - protein, 1264 aa, Thyatira batis
METRSKRLRIGPLPGGDRRGTPGADAGCFSMRTVSGEELNRRASTDKDITAEQNSPQSLRSDSPAEDVSQAAFATQPATTKAGKTRVRMIWNDEVNTFIMRSYYYITKLETDRTMYCSRLYDTFKSQYPNINVSAQRIADQRRVIIRNKRLSDVQLNKIKNEVAEQIKNEESLAGTTPIENITSQICHNTPHTYHPTHSIDILSQSQTQDPSLNSVTEICLTQPSQTELTGQNLMSTSFEDVLIDSDTQNLIEQLETAITQFSGTDPTTRPKLPKLKENHKLYILIGIFNKHIIHKFYRQDSNLLDIHTLIYCSALVISRKIGYKIENERTHSKTRKTKYSDPPWKTRIENDIKKLRANIGVLTQYINNNRTKKVLKKVDIIFNKFKVHSSHENENNRPEEYLDTLKQKLSLKANRLARYNKALQRKQDNKLFTTNEKVFYRNLNNTYQTQNNPEIPSESELKGYWGKLWEKNGEHNDNANWIKDEERNWETIEEMEFSEITKEEMQAIIGRTKNWKSPGCDGIHNFWYKKFHTLHGILAKNITDIITETEILPNFFTLGVTYMLPKSQNTTDPTQYRPITCLPTIYKIITSCITNKINKHLELNNILTEEQKGCRQNHKGCKEQLVIDMTILKHASTHNRNLHLTYIDYRKAFDSVPHSWLVRVLQLYKINPTIINFLENTMVNWRTRLHLSTKNKQIITDEVSIGTGIFQGDSLSPLWFCLALNPLSHLLTQSNIGYKLTTTTSISHLMYMDDIKLFAKSDKDMKNLVDITVNFSNDIRMTFGIEKCKTLHLQKGKVIGGNYEIGEEINITAMEGNDTYKYLGIQQAKSINHKQIKEELSVEYYRRINLICKKKLYSKNFIKAINTYAIPVLTYSFGIIKWTHTDIKRLQIKTRTIFTKHNYLHPKSAIERLTVKREKGGRGLIDLQILWNKQIQNIRTFFYNKGTRSKIHLATIESDSNYTPLNLKEGIREIDLTPEEIEKQKHQAWRQKVLHGRHIHDLEQPHIDMEASNKWLKMGSLFPETEGFMIAIQDQVVNTRNYKKFILKDPNIQTDRCRKCNSQSETIQHITGACPNLAQNDYTHRHNQIANYIHQKLAFKFNLISGKPLPYYVYSPKPVLENIHHKIYFDRAILTDKTIHFNRPDITLLNKHDNTAFLIDIAVPNTHNIQKTISDKIHKYTDLKDEIMRIWKLDRVFIVPLIISSTGVISKHLKQYLQQLDLPESALITMQKAAILNTCRIVRKFLQETPPSISLPHTENHLV

SEQ ID NO: 26187 - protein, 1262 aa, Thyatira batis
METRSKRLRIGPLPGGDRRGTPGADAGCFSMRTVSGEELNRRASTDKDITAEQNSPQSLRSDSPAEDVSQAAFATQPATTKAGKTRVRMIWNDEVNTFIMRSYYYITKLETDRTMYCSRLYDTFKSQYPNINVSAQRIADQRRVIIRNKRLSDVQLNKIKNEVAEQIKNEESLAGTTPIENITSQICHNTPHTYHPTHSIDILSQSQTQDPSLNSVTEICLTQPSQTELTGQNSTSFEDVLIDSDTQNLIEQLETAITQFSGTDPTTRPKLPKLKENHKLYILIGIFNKHIIHKFYRQDSNLLDIHTLIYCSALVISRKIGYKIENERTHSKTRKTKYSDPPWKTRIENDIKKLRANIGVLTQYINNNRTKKVLKKVDIIFNKFKVHSSHENENNRPEEYLDTLKQKLSLKANRLARYNKALQRKQDNKLFTTNEKVFYRNLNNTYQTQNNPEIPSESELKGYWGKLWEKNGEHNDNANWIKDEERNWETIEEMEFSEITKEEMQAIIGRTKNWKSPGCDGIHNFWYKKFHTLHGILAKNITDIITETEIVPNFFTLGVTYMLPKSQNTTDPTQYRPITCLPTIYKIITSCITNKINKHLELNNILTEEQKGCRQNHKGCKEQLVIDMTILKHASTHNRNLHLTYIDYRKAFDSVPHSWLVRVLQIYKINPTIINFLENTMVNWRTRLHLSTKNKQIITDEVSIGTGIFQGDSLSPLWFCLALNPLSHLLTQSNIGYKLTTTTSISHLMYMDDIKLFAKSDKDMKSLVDITVNFSNDIRMTFGIEKCKTLHLQKGKVIGGNYEIGEEINITAMEGNDTYKYLGIQQAKSINHKQIKEELSVEYYRRINLICKKKLYSKNFIKAINTYAIPVLTYSFGIIKWTHTDIKRLQIKTRTIFTKHNYLHPKSAIERLTVKREKGGRGLIDLQILWNKQIQNIRTFFYNKGTRSKIHLATIESDSNYTPLNLKEGIREIDLTPEEIEKQKHQAWRQKVLHGRHIHDLEQPHIDMEASNKWLKMGSLFPETEGYMIAIQDQVVNTRNYKKFILKDPNIQTDRCRKCNSPSETIQHITGACPNLAQNDYTHRHNQIANYIHQKLAFKFNLISGKPLPYYVYSPKPVLENIHHKIYFDRAILTDKTIHFNRPDITLLNKHDNTAFLIDIAVPNTHNIQKTISDKIHKYTDLKDEIMRIWKLDRVFIVPLIISSTGVISKHLKQYLQQLDLPESALITMQKAAILNTCRIVRKFLQETPPSISLPHTENHLV

SEQ ID NO: 26188 - protein, 1264 aa, Thyatira batis
METRSKRLRIGPLPGGDRRGTPGADAGCFSMRTVSGEELNRRASTDKDITAEQNSPQSLRSDSPAEDVSQAAFATQPATTKAGKTRVRMIWNDEVNTFIMRSYYYITKLETDRTMYCSRLYDTFKSQYPNINVSAQRIADQRRVIIRNKRLSDVQLNKIKNEVAEQIKNEESLAGTTPIENITSQICHNTPHTYHPTHSIDILSQSQTQDPSLNSVTEICLTQPSQTELTGQNLMSTSFEDVLIDSDTQNLIEQLETAITQFSGTDPTTRPKLPKLKENHKLYILIGIFNKHIIHKFYRQDSNLLDIHTLIYCSALVISRKIGYKIENERTHSKTRNTKYSDPPWKTRIENDIKKLRANIGVLTQYINNNRTKKVLKKVDIIFNKFKVHSSHENENNRPEEYLDTLKQKLSLKANRLARYNKALQRKQDNKLFTTNEKVFYRNLNNTYQTQNNPEIPSESELKGYWGKLWEKNGEHNDNANWIKDEERNWETIEEMEFSEITKEEIQAIIGRTKNWKSPGCDGIHNFWYKKFHTLHGILAKNITDIITETEILPNFFTLGVTYMLPKSQNTTDPTQYRPITCLPTIYKIITSCITNKINKHLELNNILTEEQKGCRQNHKGCKEQLVIDMTILKHASTHNRNLHLTYIDYRKAFDSVPHSWLVRVLQIYKINPTIINFLENTMVNWRTRLHLSTKNKQIITDEVSIGTGIFQGDSLSPLWFCLALNPLSHLLTQSNIGYKLTTTTSISHLMYMDDIKLFAKSDKDMKNLVDITVNFSNDIRMTFGIEKCKTLHLQKGKVIGGNYEIGEEINITAMEGNDTYKYLGIQQAKSINHKQIKEELSVEYYRRINLICKKKLYSKNFIKAINTYAIPVLTYSFGIIKWTHTDIKRLQIKTRTIFTKHNYLHPKSAIERLTVKREKGGRGLIDLQILWNKQIQNIRTFFYNKGTRSKIHLATIESDSNYTPLNLKEGIREIDLTPEELEKQKHQAWRQKVLHGRHIHDLEQPHIDMEASNKWLKMGSLFPETEGFMIAIQDQVVNTRNYKKFILKEPNIQTDRCRKCNSQSETIQHITGACPNLAQNDYTHRHNQIANYIHQKLAFKFNLISGKPLPYYVYSPKPVLENIHHKIYFDRAILTDKTIHFNRPDITLLNKHDNTAFLIDIAVPNTHNIQKTISDKIHKYTDLKDEIMRIWKLDRVFIVPLIISSTGVISKHLKQYLQQLDLPESSLITMQKAAILNTCRIVRKFLQETPPSISLPHTENHLV

SEQ ID NO: 26189 - protein, 888 aa, Abrostola tripartita
MYLILKNSYRVHSQHEEPNLSNEQFLDTLKQKFNAAASRLKRYICCTLRKTQNTQFTSNEKQFYRSLLADREHIRSTESILLPTPSADELHGFRSGIWAVPVHHNSEADWLQANNTNVTELIAPMNFEQIPLDIFIQILKKAHNWKAPGSDRIHNYWYKKLTTIHPLLYNHINDFIQTPNIIPSFVTQGLTYMIPKDTDHQNPAKYRPITCLQTIYKILTACIAELIHKHVSENNILAEEQKGCRKRSQGCKEQLIIDTVAMKQAIAMKKEINTMYIDYKKAFDSVPHSWLLQVLRHYKIHPQLISFLENSMHHWTTKLKTVGLTSTVTAEIPIRRGIFQGDALSPLWFCLALNPLSHMLNRSNSGYEITTPHKLTSLSHLMYMDDIKLYSSSSQALHRLADITQTFSNDICMEFGIDKCKTFSVKHGKIVPNSYILESGVTIEPLEPNTFYKYLGFLQARQINQKGTKQELKGKFRHRLNTLLRSQLNSRNLTKAINSYAIPLLTYSFGSISWTQCDLHNLQRVINTSLTAHRKHHPRSCVQRMTLSRHEGGRGVIDVVNLHNKLITSLRKYFFERSENSEIHDVVTAADKHFTPLNLSDRNPQRNERIIDTKDKIASWQQKSLHGRHRHDLQQPHVDKAASNAWLLRGELFPETEAFMMAIQDQVIDTRNYQKHIIRNPSLLTDTCRHCHASSETIQHITSACRSLAQSDYKHRHDQVASIIHQHLAHKFHFIPKKTPYYKYKPDTILENHNFKIYWDRTIITDKTIHYNRPDITVHNKMNKTVYLIDIAVPNTHNVQSTISEKLTKYQELAIELKRQWRAVTIHIVPIVISATGIIPKSLQRSLDVLEVPKHTFITLQKAVILNTCRLTRKFLTSSSISSAYTIT

SEQ ID NO: 26190 - protein, 1019 aa, Lymantria monacha
MRQKKSWNSSKITLQRYRNSSPCNRPYIPKQKPSKKLAGIVNFVNTCILPHYTSMAHDFSLTQTIIYCAAYTVATCNGSKIKDTNTLPTQNSNKIPNWQKRMQRKIENLRRDIARLIEYSRGNRSNRLVTFVEKIKNKHRTHTHHEDPNITNEQFLDTLKQKLNAATTRLRRYLNCTRRKIQNTQFTYNEKLFYRNLASNTQNYSGRTTLARSTQIVPIQDLHSFWSDIWSESVSHNTEAQWLGSYSASMTTVRPMEFQHIPLEIFMRVLNKTHNWKAPGRDRIHNYWYKKFTTIHHLLYNYINTFIHTPDKMPRYFTQGITYMISKDSDYQNPAKYRPITCLQTIYKILTACIVELIHQHITDNNILYQEQKGCQKNSQGCKEQLIIDSVAMKQAIMKKRNINTMYVDYKKAFDSVPHSWLLYVIRQNKIHPQIINFLNHSMQHWSTMINTIGHSNVATSEIPIRRGIFQGDALSPLWFCLALNPLSHLLKKSNLGYTITTLHKRTTLTHLMYMDDIKLYSGSTQSLHRLADITQTFSNDIRMEFGIDKCKTFSVRNGEVIQNSYTLDTGHTIESLEFNTFYKYLGFNQARQIEQTETKTTLKVNFRHRLNILFRSQLNSRNLIKAINSYAIPILTYSFGIIHWTQTDLLNLQRIINTTLTAHRKHHPRSCVQRITLPRDEGGRGIVDIMNLHNNIISTLRKYFHQHADYTTFCKIVSLADKRLTPLNLADRNPQRKERTVSIKDKIAIWEQKSLHGRHRNDLQLSYIDKAASNAWLRRGELFPETEAFMMAIQDQVLDTRNYQKYIIRTPNLPTDTCRHCHLNSETIQHITSACKSLTQTDYKHRHDQVASIVHQHLAHKYRFIQKKTAYYKYKPDTILENNRHKLYWDRTIITDKTIHFNRPDITLFDKESKTAYLIDIAVPNTHNIQTTISEKLSKYQELAIELKCQWHAETVHIVPIVLSATGIIPKSLKRSLNILQMPQYTVHMLQKAVILNTCRLTRKFFTTSTISAINTMC

SEQ ID NO: 26191 - protein, 1367 aa, Lymantria dispar
MVLTRSSSKRPQVLGGTRSSSVIDGRQAEAGPRGAKNPRVTRSNRQTTKAIHTDSDSISEISSETSPFRSVDSPSSSPFSYQTSLSSSITNTLEDVVQKAHATTPAPASSANRARKKWSEEINKFIWRTYLIATKLNTSKIYLDHLYHEFTQKYPNMNASKQRLGDQCRAIIRNNLLPQYILNNIHAEVTTYLQQTQNNISNQTNNRNQEITGSRRKWTVEYNESIVRNYYKITELGHNKTAYRRPLHQAVINEHPELSEVSEQRISDQLRVVLNNKMINDQRLQEIRNEVLCNLNSHSHNTVTREGIQETEAHTLDILLADQSTEIPEQSSQTQTAVEPEDEHRIDTYNTEKITEQFKITLDKYKNSNPCNRPYIPKQKTSKKLARIVNFVNTCILPHYTSIGNDFSFIQTIIYCAAYTVVVCNGSKIKDTDTIHLKNLNRIPSWQKRIQKKIQGLRRDIGRLTEYIRGNRSNRVIKLVEEIKNKHRIHAHHEDPNLTNEQFLDTLKQKLNATSSRLKRYLNCTRRKTQNSRFNNNEKLFYRTLACNTVNNTERTRIDRPTQTPPIADLHSFWSDIWSAPVSHNIEAQWLGSYSTTISAISPMEFRHIPLEIFMRVLNKTHNWKAPGSDRIHNYWYKKFSTMHHLLYNHINTFIHTPDKMPRYFTQGITYMIPKDNDRLNPAKYRPITCLQTIYKILTACIAELIHQHIISNNILCQEQKGCKKNSQGCKEQLIIDSVAMKHAIIKKKNINTMYVDYKKAFDSVPHTWLLYVIQQYKIHPHITNFLKHSMRLWSTTIKTIECSSIATPEIPIRRGIFQGDALSPLWFCLALNPLSHLLNKSNLGYTITTSHKLTTLTHLMYMDDIKLYSGSTQSLHRLADITQSFSNDVRMEFGMDKCKTFSVTNGKITQKRYLLDTGQTIEPLEFNTFYKYLGFNQARQIEQTETKKSLKLNFRHRLNILFRSQLNSRNLIKAINSYAIPILTYSFGIINWTQSDLLNLQRIINTTLTAHRKHHPRSCVQRMTLPRDEGGRGIVDIMNLHNKQISSLRNYFHQHSDDNTLCKTISLTDRHLTPLNLADRNPQRKERTINIKDKITIWQKKSLHGRHRQDLQLPYIDKVESNAWLRRGELFPETEAFMMAIQDQVIDTRNYQKHIIRAPNLPTDTCRHCHLSSETIQHITSACKSLAQSDYKHRHDQVASIVHQHLAHKYNFIQKKTAYYKYKPNNILENNRYRLYWDRTIITDKTIHFNRPDITLFEKENKIAYLIDIAVPNTHNIQSTISEKLSKYQELAIELKRQWHAETIHIVPIVLSATGIIPKSLQRSLSLLQMPQHAVHIIQKAVILNTCRLTRKFLTTSSISATHTIC

SEQ ID NO: 26192 - protein, 1377 aa, Lymantria monacha
MVLTRSSSKRPQVLGGSSSSTVIDGSQAETGSRGAKNPRATKPNRQATKAIHTDSDSISEINSEITSPFKSIETPCSSPFSLQTSLSSISTAASEDVVQKADATTSAPASSKNRARKRWSEEMNTFIWRTYLIATKLNTSKIYLDHLYHEFTHKYPHMNASKQRLGDQCRAIIRNNLLSQETLDNINTEVITYLQQTQNNSNLSNSSNRQMIGRRRKWTVEYNESIIRHYYKITRLGENRTAYRRPLHQAIINEHPELSEVSEQRISDQLRAILNNKMISDERLQEIRSDVICNHNSHNHSTENVLIMTTRAEPQEVETQAHTLDIPLTNQSTMEENSEQSLYTHTTLKFQNNHKLDNYETEKIMEQFKITLQRYRNSSPCNRPYIPKQKPSKKLAGIVNFVNTCILPHYTSMAHDFSFTQTIIYCAAYTVATCNGSKIKDTNTLPTQNSNKIPNWQKRMQRKIENLRRDIARLIEYSRGNRSNRLVTFVEKIKNKHRTHTHHEDPNITNEQFLDTLKQKLNAATTRLRRYLNCTRRKIQNTQFTYNEKLFYRNLASNTQNYSGRTTLARSTQIVPIQDLHSFWSDIWSESVSHNTEAQWLGSYSASMTTVRPMEFQHIPLEIFMRVLNKTHNWKAPGRDRIHNYWYKKFTTIHHLLYNYINTFIHTPDKMPRYFTQGITYMISKDSDYQNPAKYRPITCLQTIYKILTACIAELIHQHITDNNILYQEQKGCQKNSQGCKEQLIIDSVAMKQAIMKKRNINTMYVDYKKAFDSVPHSWLLYVIRQNKIHPQIINFLNHSMQHWSTMINTIGHSNVATSEIPIRRGIFQGDALSPLWFCLALNPLSHLLKKSNLGYTITTLHKRTTLTHLMYMDDIKLYSGSTQSLHRLADITQTFSNDIRMEFGIDKCKTFSVRNGEVIQNSYTLDTGHTIESLEFNTFYKYLGFNQARQIEQTETKRTLKVNFRHRLNILFRSQLNSRNLIKAINSYAIPILTYSFGIIHWTQTDLLNLQRIINTTLTAHRKHHPRSCVQRITLPRDEGGRGIVDIMNLHNNIISTLRKYFHQHADYTTFCKIVSLADKRLTPLNLADRNPQRKERTVSIKDKIAIWEQKSLHGRHRNDLQLSYIDKAASNAWLRRGELFPETEAFMMAIQDQVLDTRNYQKYIIRTPNLPTDTCRHCHLNSETIQHITSACKSLAQTDYKHRHDQVASIVHQHLAHKYRFIQKKTAYYKYKPDTILENNRHKLYWDRTIITDKTIHFNRPDITLFDKESKTAYLIDIAVPNTHNIQTTISEKLSKYQELAIELKCQWHAETVHIVPIVLSATGIIPKSLKWSLNILQMPQYTVHMLQKAVILNTCRLTRKFFTTSTISAINTMC

SEQ ID NO: 26193 - protein, 1367 aa, Lymantria dispar
MVLTRSSSKRPQVLGGTRSSSVIDGRQAEAGPRGAKNPRVTRSNRQTTKAIHTDSDSISEISSETSPFRSVDSPSSSPFSYQTSLSSSITNTLEDVVQKAHATTPAPASSANRARKKWSEEMNKFIWRTYLIATKLNTSKIYLDHLYHEFTQKYPNMNASKQRLGDQCRAIIRNNLLPQYILNNIHAEVTTYLQQTQNNISNQTNNRNQEITGSRRKWTIEYNESIVRNYYKITELGHNKTAYRRPLHQAVINEHPELSEVSEQRISDQLRVVLNNKMINDQRLQEIRNEVLCNLNSHSHNTVTREGIQETEAHTLDILLADQSTEISEQSSQTQTAVEPEDEHRIDTYNTEKITEQFKITLDKYKNSNPCNRPYILKQKTSKKLARIVNFVNTCILPHYTSIGNDFSFIQTIIYYAAYTVVVCNGSKIKDTDTIHLKNLNRIPSWQKRIQKKIQGLRRDIGRLTEYIRGNRSNRVIKLVEEIKNKHRIHAHHEDPNLTNEQFLDTLKQKLNATSSRLKRYLNCTRRKTQNSQFNNNEKFFYRTLACNTVNNTERTTIDRPTQTPPIADLHSFWSDIWSAPVSHNNEAQWLGSYSTTISAISPMEFRHIPLEIFMRVLNKTHNWKAPGSDRIHNYWYKKFSTMHHLLYNHINTFIHTPDKMPRYFTQGITYMIPKDNDRLNPAKYRPITCLQTIYKILTACIAELIHQHIISNNILCQEQKGCKKNSQGCKEQLIIDSVAMKHAIIKKKKINTMYVDYKKAFDSVPHTWLLYVIQQYKIHPHITNFLKHSMRLWPTTIKTIECSSIATPEIPIRRGIFQGDALSPLWFCLALNPLSHLLNKSNLGYTITTSHKRTTLTHLMYMDDIKLYSGSTQSLHRLADITQSFSNDVRMEFGIDKCKTFSVTNGKITQNSYILDTGQTIEPLEFNTFYKYLGFNQARQIEQTETKKSLKLNFRHRLNILFRSQLNSWNLIKAINSYAIPILTYSFGIINWTQSDLLNLQRIINTTLTAHRKHHPRSCVQRMTLPRDEGGRGIVDIMNLHNKQISSLRNYFHQHSDDNTLCKTISLTDRHLTPLNLADRNPQRKERTINIKDKITIWQKKSLHGRHRQDLQLPYVDKVESNAWLRRGELFPETEAFMMAIQDQVIDTRNYQKHIIRAPNLPTDTCRHCHLSSETIQHITSACKSLAQSDYKHRHDQVASIVHQHLAHKYNFIQKKTAYYKYKPNNILENNRYRLYWDRTIITDKTIHFNRPDITLFEKENKIVYLIDIAVPNTHNIQSTISEKLSKYQELAIELKRQWHAETIHIVPIVLSATGIIPKCLQRSLSLLQMSQHAVHIIQKAVILNTCRLTRKFLTTSSISATHTIC

SEQ ID NO: 26194 - protein, 1367 aa, Lymantria dispar
MVLTRSSSKRPQVLGGTRSSSVIDGRQAEAGPRGAKNPRVTRSNRQTTKAIHTDSDSISEISSETSPFRSVDSPSSSPFSYQTSLSSSITNTLEDVVQKAHATTPAPASSANRARKKWSEEMNKFIWRTYLIATKLNTSKIYLDHLYHEFTQKYPNMNASKQRLGDQCRAIIRNNLLPQYILNNIHAEVTTYLQQTQNNISNQTNNRNQEITGSRRKWTIEYNESIVRNYYKITELGHNKTAYRRPLHQAVINEHPELSEVSEQRISDQLRVVLNNKMINDQRLQEIRNEVLCNLNSHSHNTVTREGIQETEAHTLDILLADQSTEISEQSSQTQTAVEPEDEHRIDTYNTEKITEQFKITLDKYKNSNPCNRPYIPKQKTSKKLARIVNFVNTCILPHYTSLGNDFSFIQTIIYCAAYTVVVCNGSKIKDTDTIHLKNLNRIPSWQKRIQKKIQGLRRDVGRLTEYIRGNRSNRVIKLVEEIKNKHRIHAHHEDPNLTNEQFLDTLKQKLNATSSRLKRYLNCTRRKTQNSQFNNNEKLFYRTLACNTVNNTERTTIDRPTQTPPIADLHSFWSDIWSAPVSHNIEAQWLGSYSTTISAISPMEFRHIPLEIFMRVLNKTHNWKAPGSDRIHNYWYKKFSTMHHLLYNHINTFIHTPDKMPRYFTQGITYMIPKDNDRLNPAKYRPITCLQTIYKILTACIAELIHQHIISNNILCQEQKGCKKNSQGCKEQLIIDSVAMKHAIIKKKNINTMYVDYKKAFDSVPHTWLLYVIQQYKIHPHITNFLKHSMRLWSTTIKTIECSSIATPEIPIRRGIFQGDALSPLWFCLALNPLSHLLNKSNLGYTITTSHKRTTLTHLMYMDDIKLYSGSTQSLHRLADITQSFSNDVRMEFGIDKCKTFSVTNGKITQNSYILDTGQTIEPLEFNTFYKYLGFNQARQIEQTETKKSLKLNFRHRLNILFRSQLNSWNLIKAINSYAIPILTYSFGIINWTRSDLLNLQRIINTTLTAHRKHHPRSCVQRMTLPRDEGGRGIVDIMNLHNKQISSLRNYFHQHSDDNTLCKTISLTDRHLTPLNLADRNPQRKERTINIKDKITIWQKKSLHGRHRQDLQLPYVDKVESNAWLRRGELFPETEAFMMAIQDQVIDTRNYQKHIIRAPNLPTDTCRHCHLSSETIQHITSACKSLAQSDYKHRHDQVASIVHQHLAHKYNFIQKKTAYYKYKPNNILENNRYRLYWDRTIITDKTIHFNRPDITLFEKENKIVYLIDIAVPNTHNIQSTISEKLSKYQELAIELKRQWHAETIHIVPIVLSATGIIPKSLQRSLSLLQMPQHAVHIIQKAVILNTCRLTRKFLTTSSISATHTIC

SEQ ID NO: 26195 - protein, 1390 aa, Hypolimnas misippus
MVLTRSSSKRPQVPGGPSTSTGNDGSQSGAAPRGAKNLRVAAPPRQTTMASNTDSDNASDKIRSSISSSPSSLFESPSSSPQNFSSSSSSSQMSSQLSTFSPMSEDVVQKVPALKPVPASGTNRVRKKWSEEMNRFIWRTYLIATKLRTSKVYLDHLHHEFSIKYPQMKASRQRLGDQCRAIDRNNLLSQETLEHIKNEVTEYLQQNQNKHSHTTLHTLPLTQPHNNNQRMSGQRRRWTNELNESIVKNYYRITELGENRSAYRKPLHQAVLAEFPELSEVSEQRISDQLRVIFNSKMISDQRLEEIRQEISSHFRSQHTTLLNNSEHTHLELNNQVCTQNNNIDLHLFNRTIELENINSNSLTSPESQQIINCFDPEIIKEQFQITIDKFLNTNPIARPYIPKQKTSRKLALIVNFINEKIIPSNMSIEQDFETTHTIIYCAAYTAAVCNGCKIKDEINPPNQNKKRIPAWQKRLEKKIQDIRRDIARLTEYIRGNGSNRLKLLVENIKNKHRIHSQHEEPNIDNEQFLDTLKQKLNAASSRLKRYLNCTLRKNQNSQFINNEKQFYRTLTSDTQRLSTTQPAASTLTSVKLHSFWSNIWASPIHHNRHAEWLETDRNFIDSITAMNSEHIPFEVFEYVLKKTHNWKAPGSDRIHNYWYKKFTTIHPLLHKHINNFIQSPDKLPNYLTKGLTYMIPKDTDYQNPAKYRPITCLQTFYKILTGCITELIYEHITTNNILTEEQKGCRKSSQGCKEQLIIDSVTMKHAITTKKDIYTMYIDYKKAFDSVPHSWLLYILDHYKIHPQLITFLKSSMQHWATILKTTGIASYETSEISIRRGIFQGDALSPLWFCLAINPLSRMLNNSNLGYTITIPHKHINLSHLMYMDDIKLYSFTKQSLHQLADITQTFSNDIHMEFGIEKCKTFSIKDGKITPNSYTLDSGAIIEPLELHTSYKYLGFQQAQKINQKVTKRDLTKRFKHRLNILSRSQLNFLNLSKAINSYAISILTYSFGIINWPQAELLNLQRLINTTLTVHRKRHPRSCIQRMTLPREEGGRGIIDITNLHNKQITTLRQYFHQRAEHSSLHEIVTLADKHHTPLNLVDKNTQRKERIVDLKEKIASWQQKSLHGRHRHDLQLPFVDKTASNAWLQRGELFPETEAFMMAIQDQVMDTRNYQKHIIRSPNLPTDTCRHCHANSETIQHITSACRALAQTDYKHRHDQIASIIHQHIAHKHNFIPKKNPYYKYKPNPILENSNCKLYWDRTIITDKTIHYNRPDITLHHKSTKTIYLIDVAIPNTHNIQSTMSEKLAKYQDLAIELKRQWRADTVHIVPIVISSTGIIPKSLQRSLDILQVPKHTLFTIQKAVILNTCRLTRKFLTTSSVSSAYNTI

SEQ ID NO: 26196 - protein, 1377 aa, Lymantria monacha
MVLTRSSSKRPQVLGGSSSSTVIDGSQAETGSRGAKNPRATKPNRQATKAIHTDSDSISEINSEITSPFKSIETPCSSPFSLQTSLSSISTAASEDVVQKADATTSAPASSKNRARKRWSEEMNTFIWRTYLIATKLNTSKIYLDHLYYEFTHKYPHMNASKQRLGDQCRAIIRNNLLSQETLDNINTEVITYLQQTQNNSNLSNSSNRQMIGRRRKWTVEYNESIIRHYYKITRLGENRTAYRRPLHQAIINEHPELSEVSEQRISDQLRAILNNKMISDERLQEIRSDVICNHNSHNHSTENVLIMTTRAEPQEVETQAHTLDIPMTNQSTMEENSEQSLYTHTTLKFQNNHKLDNYETEKIMEQFKITLQRYRNSSPCNRPYIPKQKPSKKLAGIVNFVNTCILPHYTSMAHDFSLTQTIIYCAAYTVATCNGSKIKDTNTLPTQNSNKIPNWQKRMQRKIENLRRDIARLIEYSRGNRSNRLVTFVEKIKNKHRTHTHHEDPNITNEQFLDTLKQKLNAATTRLRRYLNCTRRKIQNTQFTYNEKLFYRNLASNTQNYSGRTTLARSTQIVPIQDLHSFWSDIWSESVSHNTEAQWLGSYSASMTTVRPMEFQHIPLEIFMRVLNKTHNWKAPGRDRIHNYWYKKFTTIHHLLYNYINTFIHTPDKMPRYFTQGITYMVSKDSDYQNPAKYRPITCLQTIYKILTACIAELIHQHITDNNILYQEQKGCQKNSQGCKEQLIIDSVAMKQAIMKKRNINTMYVDYKKAFDSVPHSWLLYVIRQNKIHPQIINFLNHSMQHWSTMINTIGHSNVATSEIPIRRGIFQGDALSPLWFCLALNPLSHLLKKSNLGYTITTLHKRTTLTHLMYMDDIKLYSGSTQSLHRLSDITQTFSNDIRMEFGIDKCKTFSVRNGEVIQNSYTLDTGHTIESLEFNTFYKYLGFNQARQIEQTETKRTLKVNFRHRLNILFRSQLNSRNLIKAINSYAIPILTYSFGIIHWTQTDLLNLQRIINTTLTAHRKHHPRSCVQRITLPRDEGGRGIVDIMNLHNNIISTLRKYFHQHADYTTFCKIVSLADKRLTPLNLADRNPQRKERTVSIKDKIAIWEQKSLHGRHRNDLQLSYIDKAASNAWLRRGELFPETEAFMMAIQDQVLDTRNYQKYIIRTPNLPTDTCRHCHLNSETIQHITSACKSLAQTDYKHRHDQVASIVHQHLAHKYRFIQKKTAYYKYKPDTILENNRHKLYWDRTIITDKTIHFNRPDITLFDKESKTAYLIDIAVPNTHNIQTTIFEKLSKYQELAIELKCQWHAETVHIVPIVLSATGIIPKSLKRSLNILQMPQYTVHMLQKAVILNTCRLTRKFFTTSTISAINTMC

SEQ ID NO: 26197 - protein, 1367 aa, Lymantria dispar
MVLTRSSSKRPQVLGGTRSSSVIDGRQAEAGPRGAKNPRVTRSNRQTTKAIHTDSDSISEISSETSPFRSVDSPSSSPFSYQTSLSSSITNTLEDVVQKAHATTPAPASSANRARKKWSEEMNKFIWRTYLIATKLNTSKIYLDHLYHEFTQKYPNMNASKQRLGDQCRAIIRNNLLPQYILNNIHAEVTTYLQQTQNNICNQTNNRNQEITGSRRKWTVEYNESIVRNYYKITELGHNKTAYRRPLHQAVINEHPELSKVSEQRISDQLRVVLNNKMINDQRLQEIRNEVLCNLNSHSHNTVTREGIQETEAHTLDILLADQSTEISEQSSQTQTAVEPEDEHRIDTYNTEKITEQFKITLDKYKNSNPCNRPYIPKQKTSKILARIVNFVNTYILPHYTSIGNDFSFIQTIIYCAAYTVVVCNGSKIKDTDTIHLKNLNRIPSWQKRIQKKIQGLRRDIGRLTEYIRGNRSNRVIKLVEEIKNKHRIHAHHEDPNLTNEQFLDTLKQKLNATSSRLKRYLNCTRRKTQNSQFNNNEKLFYRTLACNTVNNTKRTTIDRPTQTPPIADLHSFWSDIWSAPVSHNIKAQWLGSYSTTISAISPMEFRHIPLEIFMRVLNKTHNWKAPGSDRIHNYWYKKFSTMHHLLYNHINTFIHTPDKMPRYFTQGITYMIPKDNDRLNPAKYRPITCLQTIYKILTACIAELIHQHIISNNILCQEQKGCKKNSQGCKEQLIIDSVAMKHAIIKKKNINTMYVDYKKAFDSVPHTWLLYVIQQYKIHPHITNFLKHSMRLWSTTIKTIECSSIATPEIPIRRGIFQGDALSPLWFCLALNPLSHLLNKSNLGYTITTSHKRTTLTHLMYMDDIKLYSGSTQSLHRLADITQSFSNDVRMEFGMDKCKTFSVTNGKITQNSYILDTGQTIEPLEFNTFYKYLGFNQARQIEQTETKKSLKLNFRHRLNILFRSQLNSRHLIKAINSYAIPILTYSFGIINWTQSDLLNLQRIINTTLTAHRKHHPRSCVQRMTLPRDEGGRGIVDIMNLHNKQISSLRNYFHQHSDDNTLCKTISLTDRHLTPLNLADRNPQRKERTINIKDKITIWQKKSLHGRHRQDLQLPYVDKVESNAWLRRGELFPETEAFMMAIQDQVIDTRNYQKHIIRAPNLPTDTCRHCHLSSETIQHITSACKSLAQSDYKHRHDQVASIVHQHLAHKYNFIQKKTAYYKYKPNNILENNRYRLYWDRTIITDKTIHFNRPDITLFEKENKIAYLIDIAVPNTHNIQSTISEKLSKYQELAIELKRQWHAETIHIVPIVLSATGIIPKSLQRSLSLLQMPQHAVHIIQKAVILNTCRLTRKFLTTSSISATHTIC

SEQ ID NO: 26198 - protein, 1390 aa, Hypolimnas misippus
MVLTRSSSKRPQVPGGPSTSTGNDGSQSGAAPRGAKNLRVAAPPRQTTMASNTDSDNASDKIRSSISSSPSNLFESPSSSPQNFSSSSSSSQMSSQLSTFSPMSEDVVQKAPALKPVPASGTNRVRKKWSEEMNRFIWRTYLIATKLRTSKVYLDHLHHEFSIKYPQMKASRQRLGDQCRAIDRNNLLSQETLEHIKNEVTEYLQQNQNKHSHTTLHTLPLTQPHNNNQRMSGQRRRWTNELNESIVKNYYRITELGENRSAYRKPLHQAVLAEFPELSEVSEQRISDQLRVIFNSKMISDQRLEEIRQEISSHFRSQHTTLLNNSEHTHLELNNQVCTQNNNIDLHLFNRTIELENINSNSLTSPESQQIINCFDPEIIKEQFQITIDKFLNTNPIARPYIPKQKTSRKLALIVNFINEKIIPSNMSIEQDFETTHTIIYCAAYTAAVCNGCKIKDEINPPNQNKKRIPAWQKRLEKKIQDIRRDIARLTEYIRGNGSNRLKLLVENIKNKHRIHSQHEEPNIDNEQFLDTLKQKLNAASSRLKRYLNCTLRKNQNSQFINNEKQFYRTLTSDTQRLSTTQPAASTLTSVKLHSFWSNIWASPIHHNRHAEWLETDRNFIDSITAMNSEHIPFEVFEYVLKKTHNWKAPGSDRIHNYWYKKFTTIHPLLHKHINNFIQSPDKLPNYLTKGLTYMIPKDTDYQNPAKYRPITCLQTFYKILTGCITELIYEHITTNNILTEEQKGCRKSSQGCKEQLIIDSVTMKHAITTKKDIYTMYIDYKKAFDSVPHSWLLYILDHYKIHPQLITFLKSSMQHWATILKTTGIASYETSEISIRRGIFQGDALSPLWFCLAINPLSRMLNNSNLGYTITIPHKHINLSHLMYMDDIKLYSFTKQSLHQLADITQTFSNDIHMEFGIEKCKTFSIKDGKITPNSYTLDSGAIIEPLELHTSYKYLGFQQAQKINQKVTKRDLTKRFKHRLNILSRSQLNFLNLSKAINSYAISILTYSFGIINWPQAELLNLQRLINTTLTVHRKRHPRSCIQRMTLPREEGGRGIIDITNLHNKQITTLRQYFHQRAEHSSLHEIVTLADKHHTPLNLVDKNTQRKERIVDLKEKIASWQQKSLHGRHRHDLQLPFVDKTASNAWLQRGELFPETEAFMMAIQDQVMDTRNYQKHIIRSPNLPTDTCRHCHANSETIQHITSACRALAQTDYKHRHDQIASIIHQHIAHKHNFIPKKNPYYKYKPNPILENSNCKLYWDRTIITDKTIHYNRPDITLHHKSTKTIYLIDVAIPNTHNIQSTMSEKLAKYQDLAIELKRQWRADTVHIVPIVISSTGIIPKSLQRSLDILQVPKHTLFTIQKAVILNTCRLTRKFLTTSSVSSAYNTI

SEQ ID NO: 26199 - protein, 1300 aa, Lymantria monacha
MQFSLQTSPSSISTAASEDVVQKADATTSAPASSKNRARKRWSEEMNTFIWRTYLIATKLNTSKIYLDHLYHEFTHKYPHMNASKQRLGDQCRAIIRNNLLSQETLDNINTEVITYLQQTQNNSNLSNSSNRQMIGRRRKWTVEYNESIIRHYYKITRLGENRTAYRRPLHQAIINEHPELSEVSEQRISDQLRAILNNKMISDERLQEIRSDVICNHNSHNHSTENVLIMTTRSEPQEVEAQAHTLDIPLTNQSTMEENSEQSLYTHTTLKFQNNHKLDNYETEKIMEQFKITLQRYRNSSPCNRPYIPKQKPSKKLAGIVNFVNTCILPHYTSMAHDFSLTQTIIYCAAYTVATCNGSKIKDTNTLPTQNSNKIPNWQKRMQRKIENLRRDIARLIEYSRGNRSNRLVTFVEEIKNKHRTHTHHEDPNITNEQFLDTLKQKLNAATTRLRRYLNCTRRKIQNTQFTYNEKLFYRNLASNTQNYSGRTTLARSTQIVPIQDLHSFWSDIWSESVSHNTEAQWLGSYSASMTTVRPMEFQHIPLEIFMRVLNKTHNWKAPGRDRIHNYWYKKFTTIHHLLYNYINTFIHTPDKMPRYFTQGITYMISKDSDYQNPAKYRPITCLQTIYKILTACIAELIHQHITDNNILYQEQKGCQKNSQGCKEQLIIDSVAMKQAIMKKRNINTMYVDYKKAFDSVPHSWLLYVIRQNKIHPQIINFLNHSMQHWSTMINTIGHSNVATSEIPIRRGIFQGDALSPLWFCLALNPLSHLLKKSNLGYTITTLHKRTTLTHLMYMDDIKLYSGSTQSLHRLADITQTFSNDIRMEFGIDKCKTFSVRNGEVIQNSYTLDTGHTIESLEFNTFYKYLGFNQARQIEQTETKRTLKVNFRHRLNILFRSQLNSRNLIKAINSYAIPILTYSFGIIHWTQTDLLNLQRIINTTLTAHRKHHPRSCVQRITLPRDEGGRGIVDIMNLHNNIISTLRKYFHQHADYTTFCKIVSLADKRLTPLNLADRNPQRKERTVSIKDKIAIWEQKSLHGRHRNDLQLSYIDKAASNAWLRRGELFPETEAFMMAIQDQVLDTQNYQKYIIRTPNLPTDTCRHCHLNSETIQHITSACKSLAQTDYKHRHDQVASIVHQHLAHKYRFIQKKTAYYKYKPDTILENNRHKLYWDRTIITDKTIHFNRPDITLFDKESKTAYLIDIAVPNTHNIQTTISEKLSKYQELAIELKCQWHAETVHIVPIVLSATGIIPKSLKRSLNILQMPQYTVHMLQKAVILNTCRLTRKFFTTSTISAINTMC

SEQ ID NO: 26200 - protein, 1309 aa, Mellicta athalia
MVLTRSSSKRPQVPGGPSTRTGCDGNQSGAEPRGAKNLRVATLSRQTTMASNTDNDNASDIYIDPVPSTSLTLPDTSPKPHKLLPVLEDVVQEASAKEPGPASSSFCARKKWSKEMNKFIWRTYLIATKLRTNRVYLDYLHHEFSIKYPHMQASRQRLGDQCRAIERNKLLSQEILEQITKEVTEYLQETQKPLTQNKHMQPHLQPHSNSQQRSGHRRKWTNELNEAIVRNYYEITELGINRTAYRRPLHQAVLTEYPELSEVSEQRISDQLRVIFNSKMISDQRLEEIRQNIAKNRTTHTFTSNQSSTLIHSIEPENTSSDLDNINFHSQKHSIEQVNINPNTQPHSEVQQSFTSVDSEKIQEQFLSVMNKFQNINPINRPYIPKQKTSRKLAHIVNFIDKNVIPHHISIEQDFETTHMIIYCAAYTAAISNGSRIKDVIKPHTPKNNRLPAWQKRLEKKIKDLRRDIARLIEYIRGNRSNRLTLLVEDIKNRHRIHSQHEEPNNSNEQFLDTLKQKLNAASSRLKRYLNCTLRKTQNSQFKNNEKQFYRNLTNNTQRLTTQDTISGPTAEELHSFWSNIWATPLYHNPNALCLESDYDSTNSITPMIFNDIPIEIFQFVLKKTHNWKAPGSDQIHNYWYKKFTTIHPLLHKHINDFIQSPEKLPKFITKGITYMIPKDTDYQNPAKYRPITCLQTFYKILTACIAELIQQHITNNNILTEEQKGCRKSSQGCKEQLIIDSITMKHAISSKNDINTMYIDYKKAFDSVPHSWLLHVLHHYKIHPQIINFLENSMRNWSTTLKTTGLGEIAIPEIPIRRGIFQGDAFSPLWFCLALNPLSKMLNGSNLGYTITTPQKNTTLSHLMYMDDIKLYSNSVQSLHNLADITQTFSNDIHMEFGIEKCKTLSIQNGKITPNQYILNSGQIIEPLDMYTSYKYLGFHQTRKIHQTETKKELKQKFKYRLNILFRSQLNSLNLSKAINTYSIPILTYSFGIIKWSQTDLKNLQRLINTTLTASRKRHPRSSIQRMTLPRVEGGRGIIDIVNLHNKQITTLRQYFHQRKEASNAWLQRGELFPETEAFMIAIQDQIIDTRNYQKHIIHAPNLITDMCRHCHANSETIQHITSACRTLAQTDYKHRHDQIASIIHQQLAHKYKFIQKKDPYYKYKPNQTLENSNCKLYWDRTIITDKTIHYNRPDITLHDKTSNTIYLIDIAVPNTHNIQSTISEKLTKYQDLAIELKRSWKADTVHIVPIVISATGIIPKSLKLSLDILQLPKYTLDSLQKATILNTCRITRKFLTTSSISSACVTL

SEQ ID NO: 26201 - protein, 1390 aa, Helicoverpa armigera
METRSKKKRIGPLPGGDRRGTPGADAGCLSMRSVSGEELSRRAPTIQYATAEVSLEVDRMSSPIEPYSPSTISYVPSLSSSPSIVSFNIENTPMSDGNVPHTPLPEDVAQEAQAAEPAPASGTSRARKRWSEEMNKFIWRTYLIATKLNTSKIYLQQLHSEFSQKYPEMQASRQRLGDQCRAIIRSKLLPQETLDQIKNDVTIYLQQTHTEPNIQPHTHNQQGAGQRRRWTTEQNECIVRNYYKITELGQNRTAYRQPLFQAVIAERPELTGVTEQRISDQLRVIFNNNMISQERLKEIQNEISNNSIHTCNTITDPTQYVTHTNQSRNEEVVEYSSLNHTQLSPIPLTPTQTPQTHSQLQPETEENHSYLTCDTEKIREQFTTAIDKFSNTNPTNRPYIPKQKSSRKLAQIVDYINTKLLREHISKEQDFNTTHTIIYCAAYTAAICNGAKIRDLTTTTNSPPKKIPMWQKRLQKKIQELRRDIARLSEYIKGQRSSRLIVLVEIIKHKHHVHSQHEEPNLSNEEFLDTLKQKLNAAASRLKRYINCTLRKRQNSEFKNNEKLFYRHLTSDTQSNTRRETRQTQTPNATELHRFWANIWSESIDHNTTADWLDSDTDLINRITPMQFEHIPVDIFTRVLNKTHNWKAPGSDQIHNYWYKKFTTLHPLLHNHINDFLQTPNSMPHFLTQGLTYMIPKDANDYLNPAKYRPITCLQTIYKIITGCLAEHFHEHITKNNILAEEQKGCRKRSQGCKEQLVIDSVAMKVAIAKKKDIHTMYIDYRKAFDSVPHSWLLKVLQHYKIHPQIIDFLHCSMQHWNTTLKTIGHSSIVTEEIPIRRGIFQGDALSPLWFCLALNPLSYILNRSNFGYTINTPHKHITITHLMYMDDIKLFSDTTQSLHRLADITQSFSNDIRMDFGIDKSKTFSVSKGEIVQNSYTLDSGNIIEPLEPHASYKYLGFQQARQIKQKDSKDSLKKTFKHRLNILFRSQLNSRNTCKAINSYAIPVLTYSFGIINWSQSDLHNLQRIINTTLTAHRKHHPRSCVQRMTLPRTEGGRGIIDIVNLHNKQITNLRQYFHHHSQHSTLHEVITLTDNHLTPLNLTNRNQQRNERIVDAKEKIATWKQKSLHGRHYHDLQQPHVDKQASNAWLQRGELFPETEAFMMAIQDQVIDTRNYQKYIIRVPNIITDTCRRCHSCPETIQHITSACRSLAQTDYKHRHDQVAAIVHQHIAHKLNFIDRKIAYYKYKPSTIHENNNYRLYWDRTIITDKTIHFNRPDITLYDKNTKTAFLIDIAIPNTHNVQSTIAEKLTKYQDLAIELKRQWQAQTINIVPVVISSTGVIPKSLKRSLDILQIPQYISHIIQKAVILNTCRITRKFLTTSSVTATYSIS

SEQ ID NO: 26202 - protein, 1093 aa, Euproctis similis
MISDEKLQQIRHNVASNRHIQHNRSLYNTPTQTVPLTEEPNIDSASPNMSPQTNQSVYITHTQATTRAQIDHGAVSYEPEKVKEQFKITLDKYRNTDPCTRPYIPRQKPSRKLSELVNFINKDIIPQNISLEFDFETIQTVIYSAAITVAVCNGSKIRDTNISTNSKPNIIPAWQKRLQKKIQGYRKDIGRLTDFIRGNRSNRLITYVEKIKRSNTIHSQHEESNVTNEQYLDTLKQKLNVAASRLKRYVNCTLRKTQNRQFINNEKYFYRMLTANTQYNSNETRHEPTALLTNELHNFWFNIWAKPVNHNTDAQWLLINTETTNPISPMSFENIPLDTFVGVLKKTHNWKAPGSDRIHNYWYKKFTATHSILYKHLNTFIDSPHKMPSYFTQSITYMIPKDNDYLNPTKYRPITCLQTIYKILTACISELIHQHVSKNNILHQEQKGCRKNAKGCKEQLIIDTVVMKHALTKKKNINTMYIDYRKAFDSVPHSWLLYVLKQNKIHPQITNFLEISMQHWSTTLKTIGKYSTNTPNIPIRRGIFQGDALSPLWFCLALNPLSHLLNSSKLGYKITSTDTHTTLTHLMYMDDIKLYSESTEYLHRLADLTQIFSTDIRMEFGIDKCKTFTVTDGKIEERSYVLDTGAVIEPLGLNNSYKYLGFNQAKEINQKETKEMLKKNFRHRLNMIFRSQLNSRNLTKAINSYAIPILTYSFGIIDWSQNDLLNLQRIINTTLTTHRKHHPRSCVQRMVLPREVGGRGIINIQNLHNKQITSLRHYFHQQSDHCKLCKVITGADRRLTPLNLSDRNTQKKERIISSKDLMIKWQQKSLHGRHYNDLQLNYVDKKASNAWLLRGELFPETEAFLIAIQDQVIDTRNYQKYIIRTPNLPTDSCRHCHSSPETIQHITSACKSLAQNDYKHRHDQIASIIHQHLAHKHKFIEEKTPYYKYKPDSVLENVTCRLYWDRTIITDKTVHYNRPDITLFEKDTKTVYLIDIAVPNTHNIQNTISEKLTKYQDLAIELKRQWQAETIHIVPIVISATGIVPKSLHNSMKILQMPKHSLHLLQKAVILNTCRLTRKFLTTSSLSSAYTIT

SEQ ID NO: 26203 - protein, 822 aa, Euproctis similis
MLTANTQYNSNEIRSDPQTPLANELHNFWSNIWAKPVSHNIDAQWLLSNSEENNLISPMSFENILLDVFVAVLKKNHSWKAPGSDKIHNYWYKKFTSTHPMLYKHLNIFIESPHKMPPYFTQGITYMMPKDNDYLNPTKYRPITCLQTIYKILTACISELIHRHVFKNNILYQEQKGWRKNGKGCKEQLIIDSVAMKHALTKKRNVSTMYIDYRKAFDSVPHSWLLYVLKQNKIHPHINNFFEISMQQWSTTLKTIGKSSIVTPNIPIRRGIFQGDALSPLWFCLALNPLSYLLNTSKLGYKITSAHTNTTLTHLMYMDDIKLYSDSIQSLHRLADLTQTFSADIGMEFGIDKCKTFSFTDGNIEQHSYILNTGAIIEPLGLNNFYKYLGFNQAKEINQNETKETLKKNFKHRLNIILRSQLNSRNLTKAINSYAIPILTYSFGIIDWTQNDLLNLQRIINTTLTTHRKHHPRSCIQRMILPREEGGRGIINVQNLHNKQITSLRRYFHQQSDFSKLCEVVTLADRRLTPLNLADRSTQRKEKIASSKDLMTKWQQKSLHGRHYNDLQLNYVDKKASNAWLQRGELFPETEAFLIAIQDQVIDTRNYQKYIIRAPNLPTDSYRHCHSCPETIQHITSACKSLAQNDYKHRHDQVASIIHQHLVHKHKFIEEKTPYYKYKPDTVLENNNCRLYWDRTIITDKTIHYNRPDITLYEKDNKTVYLIDIAVPNTHNIQNTISEKLTKYQDLAIELKRQWQVETIHIVPVVISATGIIPKSLHHSINILQMPQHALHLLQKAVILNTCRLTRKFLTTSSFSSAYTIT

SEQ ID NO: 26204 - protein, 1045 aa, Euproctis similis
MSPQTNQSVYITHTQATTRAQIDHGAVSYEPEKVKEQFKITLDKYRNTDPCTRPYIPRQKPSRKLSELVNFINKDIIPHNISLEFDFETIQTVIYSAAITVAVCNGSKIRDTNISTNSKPNIIPAWQKRLQKKIQSYRKDIGRLTEFIRGNRSNRLITYVEKIKRSNTIHSQHEESNVTNEQYLDTLKQKLNVAASRLKRYVNCTLRKTQNRQFINNEKYFYRMLTANTQYNSNETRHEPTALLTNELHNFWSNIWAKPVNHNTDAQWLLINTETTNPISPMSFENIPLDTFVGILKKTHNWKAPGSDRIHNYWYKKFTATHSILYKHLNTFIDSPHKMPSYFTQGITYMIPKDNDYLNPTKYRPITCLQTIYKILTACISELIHQHVSKNNILHQEQKGCRKNAKGCKEQLIIDTVVMKHALTKKKNINTMYIDYKKAFDSVPHSWLLYVLKQNKIHPQITNFLEISMQHWSTTLKTIGKYSTNTPNIPIRRGIFQGDALSPLWFCLALNPLSHLLNSSKLGYKITSTDTNTTLTHLMYMDDIKLYSESTEYLHRLADLTQIFSTDIRMEFGIDKCKTFTVTDGKIEERSYVLDTGAVIEPLGLNNSYKYLGFNQAKEINQKETNEMLKKNFRHRLNMIFRSQLNSRNLTKAVNSYAIPILTYSFGIIDWSQNDLLNLQRIINTTLTTHRKHHPRSCVQRMVLPREVGGRGIINIQNLHNKQITSLRHYFHQQSDHCKLCKVITGADRRLTALNLSDRNTQKKERIISSKDLMIKWQQKSLHGRHYNDLQLNYVDKKASNAWLLRGELFPETEAFLIAIQDQVIDTRNYQKYIIRTPNLPTDSCRHCHSSPETIQHITSACKSLAQNDYKHRHDQIASIIHQHLAHKHKFIEEKTPYYKYKPDSVLENVTCRLYWDRTIITDKTVHYNRPDITLFEKDTKTVYLIDIAVPNTHNIQNTISEKLTKYQDLAIELKRQWQAETIHIVPVVISATGIVPKSLHNSMNILQMPKHSLHLLQKAVILNTCRLTRKFLTTSSLSSAYTIN

SEQ ID NO: 26205 - protein, 1377 aa, Euproctis similis
MVLTRSSTKRPQVLGEPSSSTACDGGQVATGLRGAKNLRGANTTRQTTQARSTDTELPSETSSTISSPFRSFESPSSSLISYKSSSLPPPSTLSLMSEDVVQSAPAVSAPASDKNRARKKWTQEMNEFIWRTYLTATKLNTRQKYLDHLHQQFTHKFPQMQASRQRLGDQCRAIVRNKLLPQEILDRLKQEVATHLNQTENEETIEICSDLILGSNQSNIHRRKWTPEENESIIRNYYEITELGKNRTAYRRPLHQAVINDHPQLSAVSEQRISDQLRAILNNKMISDEKLQQIRHNVASNRHIQHNRSLYNTPTQTVPLTEEPNIDSASPNMSPQINQSVYITHTQATTRAQTDHGAVSYEPEKVKEQFKITLDKYRNTDPCTRPYIPRQKPTRKLSELVNFINKDIIPHNISLEFDFETIQTVIYSAAITVAVCNGSKIRDTNISTNSKPNIIPAWQKRLQKKIQGYRKDIGRLTEFIRGNRSNRLITYVEKIKRSNTIHSQHEESNVTNEQYLDTLKQKLNVAASRLKRYVNCTLRKTQNRQFINNEKYFYRMLTANTQYNSNETRHEPTALLTNELHNFWSNIWAKPVNHNTDAQWLLINTETTNPISPMSFENIPLDTFVGILKKTHNWKAPGSDRIHNYWYKKFTATHSIIYKHLNTFIDSPHKMPSYFTQGITYMIPKDNDYLNPTKYRPITCLQTIYKILTACISELIHQHVSKNNILHQEQKGCRKNAKGCKEQLIIDTVVMKHALTKKKNINTMYIDYKKAFDSVPHSWLLYVLKQNKIHPQITNFLEISMQHWSTTLKTIGKYSTNTPNIPIRRGIFQGDALSPLWFCLALNPLSHLLNSSKLGYKITSTDTHTTLTHLMYMDDIKLYSESTEYLHRLADLTQIFSTDIRMEFGIDKCKTFTVTDGKIEERSYVLDIGAVIEPLGLNNSYKYLGFNQAKEINQKEAKEMLKKNFRHRLNMIFRSQLNSRNLTKAVNSYAIPILTYSFGIIDWSQNDLLNLQRIINTTLTTHRKHHPRSCVQRMVLPREVGGRGIINIQNLHNKQITSLRHYFHQQSDHCKLCKVITGADRRLTPLNLSDRNTQKKERIISSKDLMIKWQQKSLHGRHYNDLQLNYVDKKASNAWLLRGELFPETEAFLIAIQDQVIDTRNYQKYIIRTPNLPTDSCRHCHSSPETIQHITSACKSLAQNDYKHRHDQVASIIHQHLAHKHKFIEEKTPYYKYKPDSVLENVTCRLYWDRTIITDKTVHYNRPDITLFEKDTKTVYLIDIAVPNTHNIQNTISEKLTKYQDLAIELKRQWQAETIHIVPVVISATGIVPKSLHNSMNILQMPKHSLHLLQKAVILNNCRLTRKFLTTSSLSSAYTIT

SEQ ID NO: 26206 - protein, 1377 aa, Euproctis similis
MVLTRSSTKRPQVLGEPSSSTACDGGQVATGLRGAKNLRGANTTRQTTQARSTDTELPSETSSTISSPFRSFESPSSSLISYKSSSLPPPSTLSLMSEDVVQSAPAVSAPASDKNRARKKWTQEMNEFIWRTYLTATKLNTRQKYLDHLHQQFTHKFPQMQASRQRLGDQCRAIVRNKLLPQEILDRLKQEVATHLNQTENEETIEICSDLILGSNQSNIHRRKWTPEENESIIRNYYEITELGKNRTAYRRPLHQAVINDHPQLSAVSEQRISDQLRAILNNKMISDEKLQQIRHNVASNRHIQHNRSLYNTPTQTVPLTEEPNIDSASPNMSPQINQSVYITHTQATTRAQTDHGAVSYEPEKVKEQFKITLDKYRNTDPCTRPYIPRQKPTRKLSELVNFINKDIIPHNISLEFDFETIQTVIYSAAITVAVCNGSKIRDTNISTNSKPNIIPAWQKRLQKKIQGYRKDIGRLTEFIRGNRSNRLITYVEKIKRSNTIHSQHEESNVTNEQYLDTLKQKLNVAASRLKRYVNCTLRKTQNRQFINNEKYFYRMLTANTQYNSNETRHEPTALLTNELHNFWSNIWAKPVNHNTDAQWLLINTETTNPISPMSFENIPLDTFVGILKKTHNWKAPGSDRIHNYWYKKFTATHSIIYKHLNTFIDSPHKMPSYFTQGITYMIPKDNDYLNPTKYRPITCLQTIYKILTACISELIHQHVSKNNILHQEQKGCRKNAKGCKEQLIIDTVVMKHALTKKKNINTMYIDYKKAFDSVPHSWLLYVLKQNKIHPQITNFLEISMQHWSTTLKTIGKYSTNTPNIPIRRGIFQGDALSPLWFCLALNPLSHLLNSSKLGYKITSTDTHTTLTHLMYMDDIKLYSESTEYLHRLADLTQIFSTDIRMEFGIDKCKTFTVTDGKIEERSYVLDIGAVIEPLGLNNSYKYLGFNQAKEINQKEAKEMLKKNFRHRLNMIFRSQLNSRNLTKAVNSYAIPILTYSFGIIDWSQNDLLNLQRIINTTLTTHRKHHPRSCVQRMVLPREVGGRGIINIQNLHNKQITSLRHYFHQQSDHCKLCKVITGADRRLTPLNLSDRNTQKKERIISSKDLMIKWQQKSLHGRHYNDLQLNYVDKKASNAWLLRGELFPETEAFLIAIQDQVIDTRNYQKYIIRTPNLPTDSCRHCHSSPETIQHITSACKSLAQNDYKHRHDQVASIIHQHLAHKHKFIEEKTPYYKYKPDSVLENVTCRLYWDRTIITDKTVHYNRPDITLFEKDTKTVYLIDIAVPNTHNIQNTISEKLTKYQDLAIELKRQWQAETIHIVPVVISATGIVPKSLHNSMNILQMPKHSLHLLQKAVILNTCRLTRKFLTTSSLSSAYTIT

SEQ ID NO: 26207 - protein, 1367 aa, Autographa gamma
MVQTRSSTKRPQVPGGSSSSSGDDGSQPAARPRGAKNLREAISPRQTTTATNMEPEMQSDTDRNSATPSPFSVFESPSSSPQFYQASSRSSTVSPVPEDVVQEASATISAPATGTNRARKRWTQEMNKFIWRTYLIATKLNTSKLYLDHLYHEFSQTYPQMEASRQRLGDQCRAIVRNQLLAQDILDSIKDEVAALLQQPQTVSVTLSLTQNTTQRGHRRKWTTEYNETIVRNYYEITKLGENRSAYRQPLHQSVIAEHPELSEVSEQRVSDQLRVVLNNKMISEQRLNQIRDQVAIRLNLARDSDENRSLNSSIHTRNTDETNSPTVTTQLLESQLQSPIEVHENIVPRILDSEKIREQFRATLHKFEDTNPNMRPYIPKQKTSRKQAQIVQFINTEILPQYIKADQNFETFHTIIYCAAYTAAICNGTKIREGDNSPNQNKRRVPAWQKRLQKKILETRKDIARMSEYIRGNRSSRIITLVEAIKNKHRIHSQHEEPNTNNEHFLDTLKQKLNAAASRLKRYLNCTLRKTQNAQFLNNQKQFYRNLSLHTQNFRNTEYTAPAPSADDLCEFWSSIWAVPVQHNSEADWLRTDCNVRDKITEMQFEHIPFDVFMYVLKKTQNWKAPGSDRIHNYWYKKLTSIHPLLYNHINYFIQTPDLIPKFVTQGITYMIAKDTEHQNPAKYRPITCLQTVYKILTACVAELIHKHSSENDILSEEQKGCRKSSQGCKEQLIIDSVAMKQAIAQKRDINTMYIDYRKAFDSVPHSWLIHVLRHYKVHSSLIHFLEKSMQRWSTRLRTVGCTYTETDEIPIRRGIFQGDALSPLWFCLALNPLSHMLNRSASGYDITTPQKNINLTHLMYMDDIKLFSNTPQALHQLADITQLFSNDVRMEFGIDKCKTLSVQRGQIIPNNYVLDSGDVIEPLETNTSYKYLGFQQARQIHQKETKQDLKTKFRHRLNGIFRSQLSSRNLCQAINSYAIPVLTYSFGLITWTQNELLCLQRIINTSLTSHRKHHPRSCVQRMTLPRDEGGRGIIDVGNLHNKQISTLRHYFYEHAERSTLHEVVTIADKHLTPLNLADRNQQRNERIIDMKEKIASWQQKSLHGRHRHDLQQPHVDKVMSNAWLRRGELFPETEAFMMAIQDQVIDTRNYQKYIIRNPNFANDSCRHCHSGSETIQHITSACRSLAQSDYKHRHDQVAAIIHQHLAHKHNFIPKKDPYYKYKPDAILENRNYKIYWDRTIITDRTIHFNRPDITFHHKINKTVYLIDIAVPNTHNLQSTISEKLSKYQDLAIELKRQWHAETIHVIPIVVSATGIIPKSLQRCLDVLDIPKHTLNTIQKAVILNTCRLTRKFLTTSSVSVGFTTN

SEQ ID NO: 26208 - protein, 1213 aa, Autographa gamma
MEASRQRLGDQCRAITRNKLLPQNILDDIKNEVAILLGQTQLDEITPSLMSLPVTSQPGQRRKWTTEYNESIITNYYRLTELGENRSAYRQPLYQAVIAEHPELSEVSEQRISDQLRVVLNNKMISEQRLTELRDQVANSLRLSRNDVENNLHFTSPHLTDDTQEPNLQSPSVTSQLLESQLQTPLELQNTIITSNLDVEKIKDQFKISLGKFRDTDPTRRPYIPKQKTSRKQAQIVHLINMHVLPDYIKSDQSFETTHTVIYCAAYTAAICNGTKIREGDNTPNQNKRRVPAWQRRLQKKILNIRRDIGRMTEYIKGNRSNRLITLVEVIKNKYRIHSQHEEPNSSNEHFLDTLKQKLNAATSRLKRYINCTLRKTQNSQFANNQKQFYRNLSASTQHLRTSDSTAPGPSADDLHDFWSSIWAVPVQHNSEADWLQAGCNTTDNITQMEFDHIPLDVFMYVLKKTHNWKAPGSDGIHNYWYKKFTSVHPVLYNHINNFIQTPNIIPRFVTQGLTYMIPKDTDHQDPAKYRPITCLQTVYKILTACIAELIHKHSSKNNILSEEQKGCRKSSQGCKEQLIIDSVAMKQAISMKKDINTMYVDYRKAFDSVPHSWLLHILRHYKIHHLLIQFLENSMQHWTTRLKTLGCMHTETSEIPIRRGIFQGDALSPLWFCLALNPLSHALNSCDGGFDITAPHKRVSLTHLMYMDDIKLYSNTPQSLHRLADMTQAFSNDIHMKFGTDKCKTLSVRRGQVVPNFYTLDSGETVEPLEANTTYKYLGFQQARQIHQKETKQELKRKFKHRLNTLFRSQLNSRNLSQAINSYAIPVLTYSFGLINWTQSDLVNLQRTINTSLTTHRKHHPRSCVQRMTLPRDEGGRGVIDIVNLHNKQISTLRSYFYEYSDRSSLHEIVILADKHLTPLNLIDRNIQRNERITDMKDKFALWQQKSLHGRHRHDLQQPHVDKVMSNAWLRRGELFPETEAFMIAIQDQVIDTRNYQKHIIRSRNFPTDLCRHCHACSETIQHITSACRSLAQSDYKHRHDQVAAIIHQHLAHTHKFIPKKDPYYKYKPDAILENRNCKIYWDRTIITDKTIHFNRPDITLHNRINKTVYLIDIAVPNTHNLQSTISEKLSKYQDLAIELKRQWHAETIHVIPIVVSATGIIPKSLQRCLDVLDIPKHTLNTIQKAVLLNTCRLTRKFLTTSSVSSGYTTNT

SEQ ID NO: 26209 - protein, 1367 aa, Trichoplusia ni
MVQTRSSRKRPQVPGGSSSSTGDDGSQPVARPRGAKNPREAISTRQTTLATNMETEMQSDMDRNSITPSPFSLFESPSSSPQFYQVSSRSSTVSPLLGDVVQEANATRSAPASGTNRARKRWTEEMNKFIWRTYLIATKLNTSKLYLDYLYQEFSGKYPQMQASRQRLGDQCRAIVRNKLLAQDVLDGIKDEVAIVLQQTQSVSIAQTPQRIIGQQGQRRKWTTEYNESIVRNYYEITKLGESRSAYRQPLHQAVIAEHPELSEVSEQRISDQLRVVLNNKMISEQRLSEIREQVANSLNMGSVNAANSLPTSCPTDTGNWQETVSPILTTQILESQIPAPVHENIELNLHLESDKIREQFRISLNKFKDTNPTMRPYIPKQKTSRKQAKIVQLINTEILPQHLKEEQSFETFHTIIYCAAYTAAVCNGTKIREGDDSSNLNKRRVPAWQRRLKKKILEFRKDIGRMTEYIRGNRSNRIIRVVEAIKNKYRIHSQHEEPNTNDEHFLDTLKQKLNAAASRLKRYLNCTLRKTQNTQFSINQKQFYRNLTANTQNYRDTETTALSPSADDLCLFWSNIWAIPVQHNSEADWLQADSNLRDKISEMQFEDIPLDIFMYVLKKTHNWKAPGSDRIHNYWYKKLTSIHPFLYKHINNFIHTPDLVPRFITQGLTYMIPKDTEHHNPAKYRPITCLQTVYKILTACIAELIHKHSSENNILSEEQKGCRKSSQGCKEQLIIDSVVMKQAIALKRDINTMYIDYRKAFDSVPHSWLIYVLRQYKVHPQLIQFLEKSMQQWSTRLKTVGHVYTETSEIPIRRGIFQGDALSPLWFCLALNPLSHMLNNLTGGYNITTPMKNINLTHLMYMDDIKLYSNTSQSLHLLADITQKFSSDVCMEFGIDKCKTLSVKSGQIIPNSYILDSGDIIEPLEPNSFYKYLGFQQARQINQKVTKQELKNKFKHRLNGLLRSQLNSRNLCQAINSYAIPVLTYSFGLITWTQNDLLSLQRIINTSLTTHRKHHPRSCVQRMTLPRDEGGRGIIDIANLHSKQISTLRHYFSEHSKHSTLHEVVTIADKHYTPLNLADRHPQRKERVIGANEKIVAWRQKSLHGRHRHDLQQPHVDKVMSNAWLRRGELFPETEAFIMAIQDQVIDTRNYQKYIIRNPNCPSDLCRHCRASPETIQHITSACRTLAQSDYKHRHDQVAAIIHQHLAHKHDFILKKDPYYKYKPDAILENNNFKIYWDRTIITDKTIHFNRPDITFHNKINKTVYLIDIAVPNTHNLQSTISEKLSKYQDLAIELKRQWHAETIHVIPIVISATGIIPKSLRRCLDMLDVREHILNTLQKAVILNTCRLTRKFLTTSSVSAGYTTN

SEQ ID NO: 26210 - protein, 1367 aa, Autographa pulchrina
MVQTRSSTKRLQVPGGSSSSTGDDGSQPVARPRGAKNLREAISPRQTTTATNMESEMQRDTDRNSATPSPFTLFESPSSSAQFYQVSSRSSTVSPVPEDVVQEAIATISAPATGTNRARKRWTQEMNKFIWRTYLIATKLNTSRLYLDHLYHEFSQKYPQMEASRQRLGDQCRAIVRNQLLAQDILDSIKDEVAALLHQPQTVSVTPSLIQNTTQQGQRRKWTIEYNESIIRNYYEITKLGENRSAYRQPLHQAVIAEHPELSEVSEQRVSDQLRVVLNNKMVSEQRLNQIRDQVAIKLNLARDSDENSSLNSSIHTRNTHETNSPTEATQLLESQLQSPIEVNENIVSSLLESDKIREQFRITLDKFEDTNPTMRPYIPKQKTSRKQAQIVQFINTDILPQYIKADQNFETFHTIIYCAAYTAAICNGTKIREGDNSPNQNKRRVPAWQKRLQKKILDIRKDIARMTEYIRGNRSSRIIKLVEAIKNKHRIHSQHEEPNTNNEHFLDTLKQKLNAAASRLKRYLNCTLRKTQNAQFLNNQKQFYRNLSLHTQNLRNTVYTAPAPSADDLCEFWSSIWAVPVQHNSEADWLQADSDFRDKITEMQFEHIPFDVFMYVLKKTQNWKAPGSDRIHNYWYKKLTSIHPLLYNHINYFIQTPDLIPKFVTQGITYMIAKDAEHQNPAKYRPITCLQTVYKILTACVAELIHKHSSENDILSEEQKGCRKSSQGCKEQLIIDSVAMKQAIAQKRDINTMYIDYRKAFDSVPHSWLIHVLRHYKVHSSLIHFLEKSMQHWSTRLKTVGCTYIETDEIPIRRGIFQGDALSPLWFCLALNPLSHMLNSSAAGYDITTPQKNINLTHLMYMDDIKLFSKTPQALHQLADITQLFSIDVRMEFGIDKCKTLSVQRGQIIPNNYILDSGDVVEPLEPNTSYKYLGFQQARQIHQKETKQELKMKFRHRLNGIFRSQLSSRNLCQAINSYAIPVLSYSFGLITWTQNELLCLQRIINTSLTSHRKHHPRSCVQRMTLPRDEGGRGIIDIGNLHNKQISTLRHYFYEHSEHSTLHEVVTIADKHLTPLNLADRNQQRNERIIDMKEKIASWQQKSLHGRHRHDLQQPHVDKGMSNAWLRRGELFPETEAFMMAIQDQVIDTRNYQKYIIRSPNFANDSCRHCHSGSETIQHITSACRSLAQSDYKHRHDQVAAIIHQHLAHKHYFIPKKDPYYKYKPDAILENHNYKIYWDRTIITDKTIHFNRPDITFHNKINKTVYLIDIAVPNTHNLQSTISEKLSKYQDLAIELKRQWHAETIHVIPIVVSATGIIPKSLQRYLDVLDIPKHTLNTIQKAVILNTCRLTRKFLTTSSVSVGFTTS

SEQ ID NO: 26211 - protein, 919 aa, Autographa gamma
MRGCGSLCHPPLPAACTPVTRTPYFVSVGTELHNNKAIKNKHRIHSQHEEPNTNNEHFLDTLKQKLNAAASRLKRYLNCTLRKTQNAQFLNNQKQFYRNLSLHTQNFRNTEYTAPPPSADDLCEFWSSIWAVPVQHNSEADWLRTDCNVRDKITEMQFEHIPFDVFMYVLKKTQNWKAPGSDRIHNYWYKKLTSIHPLLYNHINYFIQTPDLIPKFVTQGITYMIAKDTEHQNPAKYRPITCLQTVYKILTACVAELIHKHSSENDILSEEQKGCRKSSQGCKEQLIIDSVAMKQAIAQKRDINTMYIDYRKAFDSVPHSWLIHVLRHYKVHSSLIHFLEKSMQRWSTRLRTVGCTYTETDEIPIRRGIFQGDALSPLWFCLALNPLSHMLNRSASGYDITTPQKSINLTHLMYMDDIKLFSNTPQALHQLADITQLFSIDVQMEFGIDKCKTLSVQRGQIIPNNYVLDSGDVIEPLETNTSYKYLGFQQARQIHQKETKQDLKTKFRHRLNGIFRSQLSSRNLCQAINSYAIPVLTYSFGLITWTQNELLCLQRIINTSLTSHRKHHPRSCVQRMTLPRDEGGRGIIDVGNLHNKQISTLRHYFYEHSERSTLHEVVTIADKHLTPLNLADRNQQRKERIIDLKEKIASWQQKSLHGRHRHDLQQPHVDKVMSNAWLRRGELFPETEAFMMAIQDQVIDTRNYQKYIIRNPNFANDSCRHCHSGSETIQHITSACRSLAQSDYKHRHDQVATIIHQHLAHKHNFIPKKDPYYKYKPDAVLENRNYKIYWDRTIITDKTIHFNRPDITFHHKINKTVYLIDIAVPNTHNLQSTISEKLSKYQDLAIELKRQWHAETIHVIPIVVSATGIIPKSLQRCLDVLDIPKHTLNTIQKAVILNTCRLTRKFLTTSSVSVGFTTN

SEQ ID NO: 26212 - protein, 1367 aa, Autographa pulchrina
MVQTRSSTKRPQVPGGSSSSTGDDGSQPVARPRGAKNLREAISPRQTTTATNMESEMQRDTDRNSATPSPFSLFESPSSSPQFYQVSSRSSTVSPVPEDVVQEAIATISAPATGTNRARKRWTQEMNKFIWRTYLIATKLNTSRLYLDHLYHEFSQKYPQMEASRQRLGDQCRAIVRNQLLAQDILDSIKDEVAALLQQPQTVSVTPSLIQNTTQQGQRRKWTTEYNESIIRNYYEITKLGENRSAYRQPLHQAVIAEHPELSEVSEQRVSDQLRVVLHNKMISEQRLNQIRDQVAIRLNLARDSDENSSLNSSIHTRNTHETNSPTEATQFLESQLQSPIEVNENIVSSLVESDKIREQFRITLDKFEDTNPTMRPYIPKQKTSRKQAQIVQFINTEILPQYIQADQNFETFHTIIYCAAYTAAICNGTKIREGDNSPNQNKRRVPAWQKRLQKKILDIRKDIARMTEYIRGNRSSRIIKFVEAIKNKHRIHSQHEEPNTNNEHFLDTLKQKLNAAASRLKRYLNCTLRKTQNAQFLNNQKQFYRNLSLHTQNLRNTEYTAPAPSADDLCEFWSSIWAVPVQHNSEADWLQADSDFRDKITEMQFEHIPFDVFMYVLKKTQNWKAPGSDRIHNYWYKKLTSIHPLLYNHINCFIQTPDLIPTFVTQGITYMIAKDAEHQNPAKYRPITCLQTVYKILTACVAELIHKHSSENDILSEEQKGCRKSSQGCKEQLIIDLVAMKQAIAQKRDINTMYIDYRKAFDSVPHSWLIHVLRHYKVHSSLIHFLEKSMQHWSTRLKTVGCTYTETDEIPIRRGIFQGDALSPLWFCLALNPLSHMLNSSAAGYDITTPQKNINLTHLMYMDDIKLFSNTPQALHQLADITQLFSIDVRMEFGIDKCKTLSVQRGQIIPNNYILESGDVVEPLEPNTSYKYLGFQQARQIHQKETKQELKIKFRHRLNGIFRSQLSSRNLCQAINSYAIPVLTYSFGLITWTQNELLCLQRIINTSLTSHRKHHPRSCVQRMTLPRDEGGRGIIDVVNLHNKQISTLRHYFYEHSEHSTLHEVVTIADKHLTPLNLADRNQQRNERIIDMKEKIASWQQKSLHGRHRHDLQQPHVDKGMSNAWLRRGELFPETEAFMMAIQDQVIDTRNYQKYIIRSPNFANDSCRHCHSGSETIQHITSACRSLAQSDYKHRHDQVAAIIHQHLAHKHNFIPKKDPYYKYKPDAILENHNYKIYWDRTIITDKTIHFNRPDITFHNKINKTVYLIDIAVPNTHNLQSTISEKLSKYQDLAIELKRQWHAETIHVIPIVVSATGIIPKSLQRCLDVLDVPKHTLNTIQKAVILNTCRLTRKFLTTSSISVGFTTS

SEQ ID NO: 26213 - protein, 1389 aa, Amphipyra berbera
MVITRSNSKRPQVLGGSSSSTGHDESQADAGPRGAKNPRAAIGPRQTTQATNTDSDMQSEKMSATPSPFSLFESPSSSPRSYQVSTRSSTVSPMSEDVVQEALATESAPAPGTNRARKRWSDEMNQFIWRTYLIATKLNTSKIYLDHLHHEFSQKYPQMQASKQRLGDQCRAIVRNKLLPQETQDHIREEVATYLQQTQNNNSQTQTHTITQLTTQSHSSHPQGRGQRRRWTTEQNESIVRNYYTITELGENRSAYRRPLHQAVIAEHPELSGVGEQRISDQLRVILNNKMINDQRLQEIRDDISCNINSQPNNQLRTSEHMATESEYTQGTNIHSYISENNIIPDSLSLSPPPQTQNNTSLVNSQFILEPQQNCTAETPDSNKIKEQFMITTDKFRNTNPLTRPYIPKQKTSRKLAQIVNFINTDILPHHTSTDQDFETTQTVIYCAAYTAALCNGAKIRDTITPSNQNKKRIPAWQKRLQMKIQNYRRDIARVTEYIKGNRSNRLISLVEEIKNKNRIHSQHEEPNISNEEFLDTLKQKLNAASSRLKRYLNCTLRKTQNTQFVNNEKQFYRTLTSDTQRNTNRTTQDTPSPSADELHNFWSGIWYEPVHHNTDAQWLHTDTDLTQQITPMPFEHIPVEVFIRVLQKSHNWKAPGSDRIYNYWYKKITSIYPLLHNHINNFIQTPNIMPSYITQGLTYMIPKDSNDYQNPAKYRPITCLQTIYKILTGCIAELIHEHITNNNILAEEQKGCRKSSQGWKEQLIIDSVAMKQAIAKKKDINTMYIDYRKAFDSIPHSWLLYVLQHYRIHPEIIHFLESSMQHWTTTLKTIGHYCTVTPEIPIRRGIFQGDALSPLWFCLALNPLSHILNKSNLGYTITTPQKHTTLTHLMYMDDIKLYSNTTQSLHCLADITQSFSNDIHMEFGIDKCKTFSVKNGKIIPNNYILESGDTIEPLDLNTTYKYLGFLQARQIKQKETKEDLKKKFKHRLNILFRSQLNSRNMVKAINSYAIPILTYSFGIITWTQGDLLNLQRIINTTLTAHRKHHPRSCVQRMTLPRGEGGRGIIDVGNLHNKQITTLRQYFYEHSEFSTLHELITLADKHLTPLNLLDRNSQRNERIVDRKEKIATWQQKSLHGRHRHDLQQSYVDKTASNAWLRRGELFPETEAFMVAIQDQVIDTRNYQKHIIRAPNLPTDTCRHCHSSSETIQHITSACRSLAQTDYKHRHDQVASIIHQHLAHKHNFIEKKTPYYKYKPETILENNSYRIYWDGTIITDKTIHFNRPDITLHDKNNRTAYLIDIAVPNTHNIQSTIAEKLTKYQDLAIELKRQWRPETIHIVPIVISSTGVIPKSLQRTIMTALVINCVAAINAHTKKFMRNCSSVEKLLLLT

SEQ ID NO: 26214 - protein, 1272 aa, Spilarctia lutea
MSEDVVQGARAVTPAPASDTNRTRKRWTREMNEFIWRTYLIATKLSTSKIYLNHLHHEFTQKYPQMQASKQRLGDQYRAIIRNKLLPQQTLDSIKHEVSIYLQQTQNTQINYSTHIHNTEAQTQRRRWTTEYNESIIKNYYKITQLGSNRTAYRKPLYQAVIAEHPDLSEVSEQRISDQLRVILNNKLISDQRQQEIRNDITTTFNLQNTNQANCSIQTQDMTSTTELQQEVHNPQTDLLKQPLLTQNYRVRFNSTVLEPTKIKEIFKTAILNFKYSEPTARPYIPKQKISTKLMKIIHFIDTEILPNHISLEQDFLLTIYCAAYTAATCNGSKIKENISIVTQNQVKIPSWQKRLQNKIQNLRKDIGRLTEYIRGNRSERLTRLIEKIKDKHQIHSQHEEPNLNNDHFLDTLKQKLNAATSRLKRYVNCTLRKTQNNQFANNEKQFYRQLASNTTQYTNRNTQGSVTVPVDELHEFWSNIWSKPVLHNSQAEWLQTDASLTNSITPMDFEQISVEVFVSVLKKLHNWKAPGTDRIHNYWYKKFTSCHLLLHKHINTFIQTPDIMPKYVTEGLTYMIPKDADIQNPAKYRPITCLQTIYKIFTSCIAEIIHRHVSENNILAEEQKGCRKSSQGCKEQLVIDSVTMKLAISKKKNISTMYIDYKKAFDSVPHSWLLHVLQLYKIHPKIIDFLQTSMQHWTTKLNIKGHSNTEVTKIPIRRGIFQGDALSPLWFCLALNPLSQMLNKSCLGYTITTPLKKTNLTHLMYMDDIKLYGNSTESLHRLADITQSFSNDIHMEFGIDKCKTFTVINGEITSNTFTLQSGEIIEPLEPHNSYKYLGFQQSRQINQKETKATLKQKFKHRLNIILRSQLNSRHLVKAINSYAIPILIYSFGIINWPKTELTNLQRTINTTLTAHRKHHPRSCIQRMTLPRAEGGRGIIDVSNLHNRQIRSLRQYFQQQSQHSILHEVVTLADKRLTPLNLADQKPQCNECVFQLEEKIAKWQLKSLLGRHRQDLQQPHVDKFASNEWLRRRGDLFPETEAFMIAIQDQVIDTRNYQKHIIRAQNLPTDSCRRCHACPETIQHITSACKCLVQTDYKHRHDQVATIVHQHLAHKHQFIDKKIPYYKYKPEIVLENKNLKIYWDRTIITDKTIHFNRPDITLHDKVNKTVYLIDIAVPNTHNIQSTIAEKLTKYQDLAIELKRQWQAVNIHIVPIVISATGIIPKSLHRSLDILEMPQHSLYLLQKAVLLNTCRLTRKFLTTSSSSSTYTIT

SEQ ID NO: 26215 - protein, 1366 aa, Spilarctia lutea
MVLTRSSTKRPQVPGGPSNSGGNDDSQPVTEPRGAKNLRVGSKTRQTTQAILTDSDNLSDASLTQSPFHSFESPSSSPLSFTSSTLSITESAMSEDVAQGARAVTPAPASDTNRTRKRWTREMNEFIWRTYLIATKLSTSKIYLNHLHHEFTQKYPQMQASKQRLGDQYRAIIRNKLLPQQTLDSIKHEVSIYLQQTQNTQINYSTHIHNTEAQTQRRRWTTEYNESIIKNYYKITQLGSNRTAYRKPLFQAVIAEHPDLSEVSEQRISDQLRVILNNKLISDQRQQEIRNDITTTFNLQNTNQANCSIQTQDMTSTTELQQEVHNPQTDLLKQPLLTQNYRVRFNSTVLEPTKIKEIFKTAILNFKYSEPTARPYIPKQKISTKLMKIIHFIDTEILPNHISLEQDFLLTQTIIYCAAYTAATCNGSKIKENISIVTQNQVKIPSWQKRLQNKIQNLRKDIGRMTEYIRGNRSERLTRLIEKIKDKHQIHSQHEEPNLNNDHFLDTLKQKLNAATSRLKRYVNCTLRKTQNNQFANNEKQFYRQLASNTTQYTNRNTQGSVTVPVDELHEFWSNIWSKPVLHNSQAEWLQTDASLTNSITPMDFEQISVEVFVSVLKKLHNWKAPGTDRIHNYWYKKFTSCHLLLHKHINTFIQTPDIMPKYVTEGLTYMIPKDADIQNPAKYRPITCLQTIYKIFTSCIAEIIHRHVSENNILAEEQKGCRKSSQGCKEQLVIDSVTMKLAISKKKNISTMYIDYKKAFDSVPHSWLLHVLQLYKIHPKIIDFLQTSMQHWTTKLNIKGHSNTEVTKIPIRRGIFQGDALSPLWFCLALNPLSQMLNKSCLGYTITTPLKKTNLTHLMYMDDIKLYGNSTESLHRLADITQSFSNDIHMEFGIDKCKTFTVINGEITSNTFTLQSGEIIEPLEPHNSYKYLGFQQSRQINQKETKATLKLKFKHRLNIILRSQLNSRHLVKAINSYAIPILIYSFGIINWPKTELTNLQRTINTTLTAHRKHHPRSCIQRMTLPRAEGGRGIIDVSNLHNRQIRSLRQYFQQQSQHSILHEVVTLADKRLTPLNLADQKPQCNECVFQLEEKIAKWQLKSLHGRHRQDLQQPHVDKFASNEWLRRGDLFPETEAFMIAIQDQVIDTRNYQKHIIRAQNLPTDSCRRCHACPETIQHITSACKCLVQTDYKHRHDQVATIVHQHLAHKHQFIDKKIPYYKYKPEIVLENKNLKIYWDRTIITDKTIHFNRPDITLHDKVNKTVYLIDIAVPNTHNIQSTIAEKLTKYQDLAIELKRQWQAVNIHIVPIVISATGIIPKSLHRSLDILEMPQHSLYLLQKAVLLNTCRLTRKFLTTSSSSSTYTIT

SEQ ID NO: 26216 - protein, 1185 aa, Spilarctia lutea
MQASKQRLGDQYRAIIRNKLLPQQTLGSIKHEVSIYLQQTQNTQINYSTHIHNTEAQTQRRRWTTEYNESIIKNYYKITQLGSNRTAYRKPLYQAVIAEHPDLSEVSEQRISDQLRVILNNKLISDQRQQEIRNDITTTFNLQNTNQANCSIQTQDMTSTTELQQEVHNPQTDLLTQPLLTQNYRVRFNSKVLKPTKIKEIFKTAILNFKYSEPTARPYIPKQKISTKLMKIIHFIDTEILPNHISLEQDFLLTQTIIYCAAYTAATCNGSKIKENISIVTQNQVKIPSWQKRLQNKIQNLRKDIDRMTEYIRGNRSERLTRLIEKIKDKHQIHSQHEEPNLNNDHFLDTLKQKLNAATSRLKRYVNCTLRKTQNNQFANNEKQFYRQLASNTTQYTNRNTQGSVTVPVDELHEFWSNIWSKPVLHNSQAEWLQTDASLTNSITPMDFEQISVEVFVSVLKKLHNWKAPGTDRIHNYLYKKFTSCHLLLHKHINTFIQTPDIMPKYVTEGLTYMIPKDADIQNPAKYRPITCLQTIYKIFTSCIAEIIHRHVSENNILAEEQKGCRKSSQGCKEQLVIDSVTMKLAISKKKNISTMYIDYKKAFDSVPHSWLLHVLQLYKIHSKIIDFLQTSMQHWTTKLNIKGHSNTEVTKIPIRRGIFQGDALSPLWFCLALNPLSQMLNKSCLGYTITTPLKKTNLTHLMYMDDIKLYGNSTESLHRLADITQSFSNDIHMEFGIDKCKTFTVINGEITSNTFTLQSGEIIEPLGPHNSYKYLGFQQSRQINQKETKHTLKQKLKHRLNIILRSQLNSRHLVKAINSYAIPILIYSFGIINWPKTELTNLQRTINTTLTAHRKHHPRSCIQRMTLPRAEGGRGIIDVSNLHNRQIRSLRQYFQQQSQHSILHEVVTLADKRLTPLNLADQNPQCNECVFQLEEKIAKWQLKSLHGRHRQDLQQPHVDKFASNEWLRRGDFFPETEAFMIAIQDQVIDTRNYQKHIIRAQNLPTDSCRRCHACPETIQHITSACKCLVQTDYKHRHDQVATIVHQHLAHKHQFIDKKIPYYKYKPEIVLENKNLKIYWDRTIITDKTIHFNRPDITLHDKVNKTVYLIDIAVPNTHNIQSTIAEKLTKYQDLAIELKRQWQAVNIHIIPIVISATGIIPKSLHRSLDILEMPQHSLYLLQKAV

SEQ ID NO: 26217 - protein, 1366 aa, Spilarctia lutea
MVLTRSSTKRPQVPGGPSNSGGNDDSQPVTEPRGAKNLRVGRKTRQTTQAILTDSDNLSDASLTQSPFHSFESPSSSPLSFTSSTLSITESAMSEDVAQGARAVTPAPASDTNRTRKRWTREMNEFIWRTYLIATKLSTSKIYLNHLHHEFTQKYPQMQASKQRLGDQYRAIIRNKLLPQQTLDSIKHEVSIYLQQTQNTQINYSTHIHNTEAQTQRRRWTTEYNESIIKNYYKITQLGSNRTAYRKPLYQAVIAEHPDLSEVSEQRISDQLRVILNNKLISDQRQQEIRNDITTTFNLQNTNQANCSIQTQDMTSTTELQQEVHNPQTDLLKQPLLTQNYRVRFNSTVLEPTKIKEIFKTAILNFKYSEPTARPYIPKQKISTKLMKIIHFIDTEILPNHISLEQDFLLTQTIIYCAAYTAATCNGSKIKENISIVTQNQVKIPSWQKRLQNKIQNLRKDIGRMTEYIRGNRSERLTRLIEKIKDKHQIHSQHEEPNLNNDHFLDTLKQKLNAATSRLKRYVNCTLRKTQNNQFANNEKQFYRQLASNTTQYTNRNTQGSVTVPVDELHEFWSNIWSKPVLHNSQAEWLQTDASLTNSITPMDFEQISVEVFVSVLKKLHNWKAPGTDRIHNYWYKKFTSCHLLLHKHINTFIQTPDIMPKYVTEGLTYMIPKDADIQNPAKYRPITCLQTIYKIFTSCIAEIIHRHVSENNILAEEQKGCRKSSQGCKEQLVIDSVTMKLAISKKKNISTMYIDYKKAFDSVPHSWLLHVLQLYKIHPKIIDFLQTSMQHWTTKLNIKGHSNTEVTKIPIRRGIFQGDALSPLWFCLALNPLSQMLNKSCLGYTITTPLKKTNLTHLMYMDDIKLYGNSTESLHRLADITQSFSNDIHMEFGIDKCKTFTVINGEITSNTFTLQSGEIIEPLEPHNSYKYLGFQQSRQINQKETKATLKLKFKHRLNIILRSQLNSRHLVKAINSYAIPILIYSFGIINWPKTELTNLQRTINTTLTAHRKHHPRSCIQRMTLPRAEGGRGIIDVSNLHNRQIRSLRQYFQQQSQHSILHEVVTLADKRLTPLNLADQKPQCNECVFQLEEKIAKWQLKSLHGRHRQDLQQPHVDKFASNEWLRRGDLFPETEAFMIAIQDQVIDTRNYQKHIIRAQNLPTDSCRRCHACPETIQHITSACKCLVQTDYKHRHDQVATIVHQHLAHKHQFIDKKIPYYKYKPEIVLENKNLKIYWDRTIITDKTIHFNRPDITLHDKVNKTVYLIDIAVPNTHNIQSTIAEKLTKYQDLAIELKRQWQAVNIHIVPIVISATGIIPKSLHRSLDILEMPQHSLYLLQKAVLLNTCRLTRKFLTTSSSSSTYTIT

SEQ ID NO: 26218 - protein, 1209 aa, Spilarctia lutea
MQASKQRLGDQCRAIIRNNLLPQQTLDSIKGEVSSYLQQIQNTQIDCSTQAHNTNVQTQRRRWTTEYNESIIKKYYKITQLGSNRTAYRKPLYQAVIAEHPDLSEVSEQRISDQLRVIFNSKLISDRRQEEIRNEIANTLNIHITNPEDCLTQTQCITSITELQQEIRSPVTDSLTQPLLTQNWRLRVNPTVLESNKIEEIFKTTLLKFRNSNPTTRPYIPKQTNSTKLTKIVHFINTEILPNHISLDQEFLLTQTIIYCAAYTAATCNGSKIKDNTTTFTQNQTKVPPWQKRLQNKIQNLRQDIGRMTEHIKGNRSERVRRLVEKIKAKHQIHSQHEEPNLSNEHFLDTLKQKLNAATSRLKRYINCTLRKTQNSQFTNNEKQFYRQLASNTTQYTNKNTADSVTVPIVELHDFWSNIWSKPVLHNSQAKWLQTNSSLTISVKPMDFEQIPVEIFANVLKKLHNWKAPGTDRVHNYWYKKFTALHPLLHKHINTFIQIPELMPHYITEGLTYMIPKDTDFQNPTKYRPITCLQTIYKILTACVAEIIHQHASENSILAEEQKGCRKNSQGCKEQLVIDSVAMKLAISNKKNISTMYIDYKKAFDSVPHSWLLHVLQLYKIHPKIIDFLKNSMQHWNTTLNINGYSNTEIPKIPIRRGIFQGDALSPLWFCLALNPLSHMLNKSLLGYTVTTPQKQTNLTHLMYMDDIKLYGNNTESLHRLADITQSFSNDIHMEFGIDKCKTFSVVNGQIITNTYTLQTGETIEPLESHNSYKYLGFQQNRQIKQKETKHTLKQKFKHRINIILRSQLNSRNTIKAINSYAIPVLVYSFGIIRWSKTELTNLQRIINTTLTTYRKHHPRSCVQRITLPREEGGRGIIDVSNLHNKQINSLRQYFQQRSQHSILHEVVMLADKRFTPLNLADQNPQSNERIVEIKEKITLWQQKSLHGRHRHDLQQPTVDIVASNEWLRRGDLFPETEAFMIAIQDQVIDTRNYQKHIIRAQNLTSDACRRCHACPETIQHITSACKSLAQTDYKHRHDQVAAIVHQHLAHKHHFIDKKTSYYKYKPETVLENNNYKVYWDRTILTDKTIHFNRPDITLHDKIKKAVYLIDVAVPNTHNVQSTIAEKLTKYQDLAIELKRQWRAVNIHIVPIVISSTGIIPKSLQHSLEILEMPQHSLHLLQKAVLLNTCRLTRKFLTTSSVSSTYTIT

SEQ ID NO: 26219 - protein, 1365 aa, Spilarctia lutea
MVLTRSSTKRPQVPGGPSTSGGNDESHSVTEPRGAKNLRVGTETRQTTQAIHKDSDNLSDTSLTPSPFHSVESPSSSPLSFASSTLSSALSEDVVQEAHAIAPAPTSGTNRTRKRWSQEINEFIWRTYLIATKLNTSKIYLNHLHHEFTQKYPQMQASKQRLGDQCRAIIRNNLLPQQTLDSIKGEVSSYLQQTQNTQIDCSTQAHNTNVQTQRRRWTTEYNESIIKNYYKITQLGTNRTAYRKPLYQAVIAEHPDLSEVSEQRISDQLRVILNNKLINDRRQEEIRNEIASTLNLQSTNQEDSLTQTQCITSITELQQEIRSPLTDALTQPLLTQNCRLRVNPTVLESNKIEEIFKTTLFKFRYSIPTTRPYIPKQKKSTKLTKIVHFINTELLPNHISLDQEFLLTQTIIYCAAYTAATCNGSKIKDNTTTFTFTQNQTKIPPWQKRLQNKIQKLRKDIGRMTEHIKGNSSERVRRLVEKIKAKHQIHSQHEEPNLSNEHFLDTLKQKLNAATSRLKRYINCTLRKTQNNQFTNNEKQFYRQLASNTTQYTNKNTEDSVPVPVVKLHDFWSNIWSKLVLHNSQTEWLQTNRSLTISIIPMDFEQIPVEIFANVLKKLHNWKAPGTDRIHNYWYKKFTALHPLLHKHINTFIQTPDLMPHYITEGLTYMIPKDTDYQNPAKYRPITCLQTIYKILTACIAEIIHQHASENSILAEEQKGCRKNSQGCKEQLVIDSVAMKLAISNNKNISTMYIDYKKAFDSVPHSWLLHVLQLYKIHPKIIDFLQNSMQHWNTTLNINGYANTEIPKIPIRRGIFQGDALSPLWFCLALNPLSHMLNKSLLGYTITTPQKQTNLTHLMYMDDIKLYGNNTESLHRLADITQSFSNDIHMEFGIDKCKTFSVVNGQIITNTYTLQTGERIEPLESHNSYKYLGFQQDRQIKQKETNYTLKQKFKHRINIILRSQLNSRNTIKAINSYAIPVLVYSFGIIRWSKTELTNLQRIINTTLTAYRKHHPRSCVQRITLPREEGGRGIIDVSNLHNRQIKSLRQYFQQRSQHSILHEVVMLADKRFTPLNLADQNPQSNERIVEIKEKITLWQQKSLHGRHRHDLQQPTVDIVASNEWLRRGDLFPETEAFMIAIQDQVIDTRNYQEHIIRAQNLTSDACRRCHACPETIQHITSACKSLVQTDYKHRHDQVAAIVHQHLAHKHHFIDKKTPYYKYKPETVLENNNCKVYWDRTIITDKTIHFNRPDITLHDKIKKAVYLIDVAVPNTHNVQSTIAEKLTKYQDLAIELKRQWRAVNIHIVPIVISSTGIIPKSLQHSLDILEMPQHSLHLLQKAVLLNTCRLTRKFLTTSSVSSTYTIT

SEQ ID NO: 26220 - protein, 1362 aa, Spilarctia lutea
MVLTRSSTKRPQVPGGPSTSGGNDESHSVTEPRGAKNLRVGIETRQTTQAIHKDSDNLSDTSLTPSPFHSFESPSSPLSFASSTLSSALSEDVVQEAHAITPAPTSGTNRTRKRWSQEINEFIWRTYLIATKLNTSKIYLNHLHHEFTQKYPQMQASKQRLGDQCRAIIRNNLLPQQTLDSIKGEVSSYLQQIQNTQIDCSTQAHNTNVQTQRRRWTTEYNESIIKNYYKITQLGTNRTAYRKPLYQAVIAEHPDLSEVSEQRISDQLRVILNSKLISDRRQEEIRNEIANTLNLHITNQEDCLTQTQCITSITELQQEIRSPVTDSPTQPLLTQNCRLRVNPTVLESNKIEEIFKTTLLKFRNSNPTTRPYIPKQKNSTKLTKIVHFINTKILPNHISLDQEFLLTQTITYCAAYTSATCNGSKIKDNTTTFTQNQTKVPPWQKRLQNKIQNLRQDIGRMTEHIKGNSSERVRRLVEKIKAKHQIHSQHEEPNLSNEHFLDTLKQKLNAATSRLKRYINCTLRKTQNSQFTNNEKQFYRQLASNTTQYTNKNTADSVTVPVVELHDFWSNIWSKPVLHNSQAEWLQTNSSLTISVKPMDFEQISVEIFANVLKKLHNWKAPGTDRIHNYWYKKFTALHPLLHKHINTFIQIPDLMPHYITEGLTYMIPKDTDFQNPAKYRPITCLQTIYKILTACVAEIIHQHASENSILAEEQKGCRKNSQGCKEQLVIDSVAMKLAISNKKNISTMYIDYKKAFDSVPHSWLLHVLQLYKIHPKIIDFLHNSMQHWNTTLNINGYSNTEIPKIPIRRGIFQGDALSPLWFCLALNPLSHMLNKSLLGYTVTTPQKQTNLTHLMYMDDIKLYGNNTESLHRLADITQSFSNDIHMEFGIDKCKTFSVVNGQIITNTYTLQTGETIEPLESHNSYKYLGFQQNRQIKQKETKHTLKQKFKHRINIILRSQLNSRNTIKAINSYAIPVLVYSFGIIRWSKTELTNLQRIINTTLTTYRKHHPRSCVQRITLPREEGGRGIIDVSNLHNKQINSLRQYFQQRSQHSILHEVVMLADKRFTPLNLADQNPQSNERIVEIKEKITLWQQKSLHGRHRHDLQQPTVDIIASNEWLRRGDLFPETEAFMIAIQDQVIDTRNYQKHIIRAQNLTSDACRLCHACPETIQHITSACKSLAQTDYKHRHDQVAAIVHQHLAHKHHFIDKKTPYYKYKPETVLENNNYKVYWDRTILTDKTIHFNRPDITLHDKIKKAVYLIDVAVPNTHNVQSTIAEKLTKYQDLAIELKRQWRAVNIHIVPIVISSTGIIPKSLQHSLDILEMPQHSLHLLQKAVLLNTCRLTRKFLTTSSVSSTYTIT

SEQ ID NO: 26221 - protein, 1368 aa, Arctia plantaginis
MVLTRSSTKRPQVPGGPSTSHGDDDSQPGTEPRGAKNLRVGRRTRQTTLAIHEDSDNSSDTPLTPSPFHSFESPPSSSLSYKSSTSSITESTLSEDVVQGAHAVTPASASGTNHTRKRWSQEINEFIWRTYLIATKLNTSKVYLNHLHHEFTQTYPHMQASKQRLGDQCRAIIRNKLLPQQVLDNIKDEVSTYLQQTQHTQTNCMIPPYTSTRAHDSNKQTQRRRWTTEYNESIIKNYYKITQLGSNRTAYRKPLYQAVIAEHPDLSGVSEQRISDQLRVILKNKLISEQRQQEIRNEIAGTPDLQNTDQEYCITQTQYMTPTAESQQEINSMETDLFIQPLLSQNCKSTSLEPNKIEEQFKTAVLKFRYSDPTTRPYIPKQKISTKLTKIVHFIDTEILPNHISLEQDFLMTQAIIYCAAYTAATCNGSKIKDNITPVTQNQAKIPPWQKRLQNKIQKLRKDIGRMTEYIRGNSSDRVRRLVEIIKDKHQIHSQHEEPNLSNEHFLDTLKQKLNAATSRLKRYINCTLRKTQNNEFTNNEKQFYRHLASNTTQYTNKNMEDSVTAPVDELHNFWSNIWSKPILHNSQAEWLQNNTSLTDSISHMDFEQIPVEIFINVLKKLHNWKAPGSDHIHNYWYKKFTSVHPLLHKHISTFIETPDVMPHYITEGLTYMIPKDTDYQNPAKYRPITCLQTIYKIITACIAEIIHQHAIENSILAEEQKGCRKNSQGCKEQLVIDSVAMKLAISKKINISTMYIDYKKAFDSVPHSWLLHVLQLYKIHPKIIDFLQNSMQHWTTTLNIKGHSNTETPKIPIRRGIFQGDALSPLWFCLALNPLSHILNKSRLGYTITTPQKQTNLTHLMYMDDIKLYGNDIESLHCLADITQAFSNDINMEFGIDKCKTFSVINGEITSSTYMLQTGETIEPLEPHNSYKYLGFQQDRQINQNVTKDTLKQKFKHRLNIILRSQLNSRNLVKAINSYAIPVLIYSFGIIRWPKTELTKLQRTINTTLTAHRKHHPRSCIQRLTLPREEGGRGIIDVSNLHNRQITSLRQYFQQRSQHSTLHEVVTHSDRRFTPLNLADQNPQCNERIIEIKEKVTIWQQKSLHGRHRHDLQQPNVDIVASNEWLRRGDLFPETEAFVTAIQDQVIDTRNYQKHIIRAQNLPSDACRRCHACPETIQHITSACKSLVQTDYKHRHDQVAAIVHQHLAHKHHFIDKKIPYYKYQPETVLENNNLKIYWDRTILTDKTIHFNRPDITLHDKVNKIIYLIDIAVPNTHNVQSTIAEKLTKYQDLAIELKRQWRAVNIHIVPIVISSTGIIPKSLQRSLDILEMPQHSLQLLQKAVLLNTCRLTRKFLTTSSVSSTYTIS

SEQ ID NO: 26222 - protein, 941 aa, Arctia plantaginis
MDLKLKIISHLLLKIKQKIPPWQKRLQNKIQKLRKDIGRMTEYIRGNSSDRVRRLVEIIKDKHQIHSQHEEPNLSNEHFLDTLKQKLNAATSRLKRYINCTLRKTQNNEFTNNEKHFYRHLASNTTQYTNKNMEDSVTAPVDELHNFWSNIWSKPILHNSQAEWLQNNTSLTYSISHMDFEQIPVEIFINVLKKLHNWKAPGSDHIHNYWYKKFTSVHPLLHKHISTFIETPDVMPHYITEGLTYMIPKDTDYQNPAKYRPITCLQTIYKIITACIAEIIHQHAIENSILAEEQKGCRKNSQGCKEQLVIDSVAMKLAISKKKNISTMYIDYMKAFDSVPHSWLLHVLQLYKIHPKIIDFLQNSMQHWTTTLNIKGHSNTETPKIPIRRGIFQGDALSPLWFCLALNPLSHILNKSRLGYTITTPQKQTNLTHLMYMDDIKLYGNDIESLHCLADITQAFSNDINMEFGIDKCKTFSVINGEITSSTYMLQTGETIEPLEPHNSYKYLGFQQDRQINQNVTKDTLKQKFKHRLNIILRSQLNSRNLVKAINSYAIPVLIYSFGIIRWSKTELTKLQRTINTTLTAHRKHHPRSCIQRLTLPREEGGRGIIDVSNLHNRQITSLRQYFQQRSQHSTLHEVVTHADRRFTPLNLADQNPQCNERIIEIKEKVTIWQQKSLHGRHRHDLQQPNVDIVASNEWLRRGDLFPETEAFVTAIQDQVIDTRNYQKHIIRAQNLPSDACRRCHACPETIQHITSACKSLVQTDYKHRHDQVAAIVHQHLAHKHHFIDKKIPYYKYQPETVLENNNLKIYWDRTILTDKTIHFNRPDITLHDKVNKIIYLIDIAVPNTHNVQSTIAEKLTKYQDLAIELKRQWRAVNIHIVPIVISSTGIIPKSLQRSLDILEMPQHSLHLLQKAVLLNTCRLTRKFLTTSSVSSTYTIT

SEQ ID NO: 26223 - protein, 974 aa, Arctia plantaginis
MVSFLLSTATEYYKLVFFLASLKPFFFCLVRKSPRILHMGRMVMSDSNRPKPARSLRFQLPGNQVYPIKEIIAEGKAFVLRFPSSLSRLRYPVLSRAWHAVRVRNLSRSRSAISFASITCSQKETAEFQALSLRTMAAIIIIIIIIIKHFYRHLASNTTQYTNKNMEDSVTAPVDELHNFWSNIWSKPVLHNSQAEWLQNNTSLTDSISHMDFGQIPVEIFINVLKKLYNWKAPGSDHIHNYWYKKFTSVHPLLHKHISTFIETPDVMPHYITEGLTYMIPKDTDCQNPAKYRPITCLQTIYKIITACIAEIIHQHAIENSILAEEQKGCRKNSQGCKEQLVIDSVAMKLAISKKKNISTMYIDYKKAFDSVPHSWLLHVLQLYKIHPKIIDFLQNSMQHWTTTLNIKGHSNTETPKIPIRRGIFQGAALSPLWFCLALNPLSHILNKSRLGYTITTSQKQTNLTHLMYMDDIKLYGNNIESLHCLADITQSFSNDINMEFGIDKCKTFSVINGEITSSTYMLQTGETIEPLEPHNSYKYLGFQQDRQINQNETKDTLKQKFKHRLNIILRSQLNSRNLVKAINSYAIPVLIYSFGIIRWSKTELTKLQRTINTTLTAHRKHHPRSCIQRLTLPREEGGRGIIDVSNLHNRQITSLRQYFQQRSQHSTLHEVVTHADRRFTPLNLADQNPQCNEHIIEIKEKVTIWQQKSLHGRHRHDLQQPNVDIVASNEWLRRGDLFPETEAFVTAIQDQVIDTRNYQKYIIRAQNLPSDACRRCHACPETIQHITSACKSLVQTDYKHRHDQVAAIVHQHLAHKHHFIDKKIPYYKYQPETVLENNNLKIYWDRTILTDKTIHFNRPDITLHDKQNKIIYLIDIAVPNTHNVQSTIAEKLTKYQDLAIELKRQWRAVNIHIVPIVISSTGIIPKSLQRSLDILEMPQHSLHLLQKAVLLNTCRLTRKFLTTSSVSSTYTIT

SEQ ID NO: 26224 - protein, 1363 aa, Spilarctia lutea
MVLTRSSTKRPQVPGGPSTSGGNDESHSVTEPRGAKNLRVGIGTRQTTQAIHKDSDNLSDTSLTPSPFHSFESPSSSPLSFASSTLSSALSEDVVQEAHAITPAPTSGTNRTRKRWSQEINEFIWRTYLIATKLNTSKIYLNHLHHEFTQNYPQMQASKQRLGDQCRAIIRNNLLPQQTLDSIKGEVSSYLQQIQNTQIDCSTQAHNTNVQTQRRRWTTEYNESIIKNYYKITQLGSNRTAYRKPLYQAVIAEHPDLSEVSEQRISDQLRVIFNSKLISDRRQEEIRNEIANTLNIHITNPEDCLTQTQCITSITELQQEIRSPVTDSLTQPLLTQNCRLRVNPTVLESNKIEEIFKTTLLKFRNSNPTTRPYIPKQTNSTKLTKIVHFINTEILPNHISLDQEFLLTQTIIYCAAYTAATCNGSKIKDNTTTFTQNQTKVPPWQKRLQNKIQNLRQDIGRMTEHIKGNSSERVRRLVEKIKAKHQIHSQHEEPNLSNEHFLDTLKQKLNAATSRLKRYINCTLRKTQNSQFTNNEKQFYRQLASNTTQYTNKNTADSVTVPIVELHDFWSNIWSKPVLHNSQAEWLQTNSSLTISVKPMDFEQIPVEIFANVLKKLHNWKAPGTDRIHNYWYKKFTALHPLLHKHINTFIQIPDLMPHYITEGLTYMIPKDTDFQNPAKYRPITCLQTIYKILTACVAEIIHQHASENSILAEEQKGCRKNSQGCKEQLVIDSVAMKLAISNKKNISTMYIDYKKAFDSVPHSWLLHVLQLYKIHPKIIDFLQNSMQHWNTTLNINGYSNTEIPKIPIRRGIFQGDALSPLWFCLALNPLSHMLNKSLLGYTVTTPQKQTNLTHLMYMDDIKLYGNNTESLHRLADITQSFSNDIHMEFGIDKCKTFSVVNGQIITNTYTLQTGETIEPLESHNSYKYLGFQQNRQIKQKETKHTLKQKFKHRINIILRSQLNSRNTIKAINSYAIPVLVYSFGIIRWSKTELTNLQRIINTTLTTYRKHHPRSCVQRITLPREEGGRGIIDVSNLHNKQINSLRQYFQQRSQHSILHEVVMLADKRFTPLNLADQNPQSNERIVEIKEKITLWQQKSLHGRHRHDLQQPTVDIVASNEWLRRGDLFPETEAFMIAIQDQVIDTRNYQKHIIRAQNLTSDACRRCHACPETIQHITSACKSLAQTDYKHRHDQVAAIVHQHLAHKHHLIDKKTPYYKYKPETVLENNNYKVYWDRTILTDKTIHFNRPDITLHDKIKKAVYLIDVAVPNTHNVQSTIAEKLTKYQDLAIELKRQWRAVNIHIVPIVISSTGIIPKSLQHSLDILEMPQHSLHLLQKAVLLYTCRLTRKFLTTSSVSSTYTIT

SEQ ID NO: 26225 - protein, 1363 aa, Spilarctia lutea
MVLTRSSTKRPQVPGGPSTSGGNDESHSVTEPRGAKNLRVGIGTRQTTQAIHKDSDNLSDTSLTPSPFHSFESPSSSPLSFASSTLSSALSEDVVQEAHAITPAPTSGTNRTRKRWSQEINEFIWRTYLIATKLNTSKIYLNHLHHEFTQKYPQMQASKQRLGDQCLAIIRNNLLPQQTLDSIKGEVSSYLQQIQNTQIDCSTQAHNTNVQTQRRRWTTEYNESIIKNYYKITQLGSNRTAYRKPLYQAVIAEHPDLSEVSEQRISDQLRVIFNSKLISDRRQEEIRNEIANTLNIHITNPEDCLTQTQCITSITELQQEIRSPVTDSLTQPLLTQNCRLRVNPTVLESNKIEEIFKTTLLKFRNSNPTTRPYIPKQTNSTKLTKIVHFINTEILPNHISLDQEFLLTQTIIYCAAYTAATCNGSKIKDNTTTFTQNQTKVPPWQKRLQNKIQNLRQDIGRMTEHIKGNSSERVRRLVEKIKAKHQIHSQHEEPNLSNEHFLDTLKQKLNAATSRLKRYINCTLRKTQNSQFTNNEKQFYRQLASNTTQYTNKNTADSVTVPIVELHDFWSNIWSKPVLHNSQAEWLQTNSSLTISVKPMDFEQIPVEIFANVLKKLHNWKAPGTDRIHNYWYKKFTALHPLLHKHINTFIEIPELMPHYITEGLTYMIPKDTDFQNPAKYRPITCLQTIYKILTACVAEIIHQHASENSILAEEQKGCRKNSQGCKEQLVIDSVAMKLAISNKKNISTMYIDYKKAFDSVPHSWLLHVLQLYKIHPKIIDFLQNSMQHWNTTLNINGYSNTEIPKIPIRRGIFQGDALSPLWFCLALNPLSHMLNKSLLGYTVTTPQKQTNLTHLMYMDDIKLYGNNTESLHRLADITQSFSNDIHMEFGIDKCKTFSVVNGQIITNTYTLQTGETIEPLESHNSYKYLGFQQNRQIKQKETKHTLKQKFKHRINIILRSQLNSRNTIKAINSYAIPVLVYSFGIIRWSKTELTNLQRIINTTLTTYRKHHPRSCVQRITLPREEGGRGIIDVSNLHNKQINSLRQYFQQRSQHSILHEVVMLADKRFTPLNLADQNPQSNERIVEIKEKITLWQQKSLHGRHRHDLQQPTVDIVASNEWLRRGDLFPETEAFMIAIQDQVIDTRNYQKHIIRAQNLTSDACRRCHACPETIQHITSACKSLAQTDYKHRHDQVAAIVHQHLAHKHHFIDKKTPYYKYKPETVLENNNYKVYWDRTILTDKTIHFNRPDITLHDKIKKAVYLIDVAVPNTHNVQSTIAEKLTKYQDLAIELKRQWRAVNIHIVPIVISSTGIIPKSLQHSLEILEMPQHSLHLLQKAVLLNTCRLTRKFLTTSSVSSTYTIT

SEQ ID NO: 26226 - protein, 1365 aa, Spilarctia lutea
MVLTRSSTKRPQVPGGPSTSGGNDESHSVTEPRGAKNLRVGTETRQTTQAIHKDSDNLSDTSLTPSPFHSVESPSSSPLSFASSTLSSALSEDVVQEAHAIAPAPTSGTNRTRKRWSQEINEFIWRTYLIATKLNTSKIYLNHLHHEFTQKYPQMQASKQRLGDQCRAIIRNNLLPQQTLDSIKGEVSIYLQQTQNTQIDCSTQAHNTNVQTQRRRWTTEYNESIIKNYYKITQLGTNRTAYRKPLYQAVIAEHPDLSEVSEQRISDQLRVILNNKLINDRRQEEIRNEIASTLNLQSTNQEDSLTQTQCITSITELQQEIRSPLTDALTQPLLTQNCRLRVNPTVLESNKIEEIFKTTLFKFRYSIPTTRPYIPKQKNSTKLTKIVHFINTEILPNHISLDQEFLLTQTIIYCAAYTAATCNGSKIKGNTTTFTFTQNQTKIPPWQKRLQNKIQKLRKDIGRMTEHIKGNSSERVRRLVEKIKAKHQIHSQHEEPNLSNEHFLDTLKQKLNAATSRLKRYINCTLRKTQNNQFTNNEKQFYRQLASNTTQYTNKNTEDSVPVPVVKLHDFWSNIWSKPVLHNSQTEWLQTNRSLTISIIPMDFEQIPVEIFANVLKKLHNWKAPGTDRIHNYWYKKFTALHPLLHKHINTFIQTPDLMPHYITEGLTYMIPKDTDYQNPAKYRPITCLQTIYKILTACIAEIIHQHASENSILAEEQKGCRKNSQGCKEQLVIDSVAMKLAISNNKNISTMYIDYKKAFDSVPHSWLLHVLQLYKIHPKIIDFLQNSMQHWNTTLNINGYANTEIPKIPIRRGIFQGDALSPLWFCLALNPLSHMLNKSLLGYTITTPQKQTNLTHLMYMDDIKLYGNNTESLHRLADITQSFSNDIHMEFGIDKCKTFSVVNGQIITNTYTLQTGERIEPLESHNSYKYLGFQQDRQIKQKETKYTLKQKFKHRINIILRSQLNSRNTIKAINSYAIPVLVYSFGIIRWSKTELTNLQRIINTTLTAYRKHHPRSCVQRITLPREEGGRGIIDVSNLHNRQIKSLRQYFQQRSQHSILHEVVMLADKRFTPLNLADQNPQSNERIVEIKEKITLWQQKSLHGRHRHDLQQPTVDIVASNEWLRRGDLFPETEAFMIAIQDQVIDTRNYQKHIIRAQNLTSDACRRCHACPETIQHITSACKSLVQTDYKHRHDQVAAIVHQHLAHKHHFIDKKTPYYKYKPETVLENNNYKVYWDRTIITDKTIHFNRPDITLHDKIKKAVYLIDVAVPNTHNVQSTIAEKLTKYQDLAIELKRQWRAVNIHIVPIVISSTGIIPKSLQHSLDILEMPQHSLHLLQKAVLLNTCRLTRKFLTTSSVSSTYTIT

SEQ ID NO: 26227 - protein, 1368 aa, Arctia plantaginis
MVLTRSSTKRPQVPGGPSTSHGDDDSQPGTEPRGAKNLRVGRRTRQTTLAIHEDSDNSSDTPLTPSPFHSFESPPSSSLSYKSSTSSITESTLSEDVVQGAHAVTPASASGTNRTRKRWSQEINEFIWRTYLIATKLNTSKVYLNHLHHEFTQTYPHMQASKQRLGDQRRAIIRNKLLPQQVLDNIKDEVSTYLQQTQHTQTNCMIPPYTSTRAHDSNKQTQRRRWTTEYNESIIKNYYKITQLGSNRTAYRKPLYQAVIAEHPDLSGVSEQRISDQLRVILKNKLISEQRQQEIRNEIAGTPDLQNTDQEYCITQTQYITPTAESQQEINSMETDLFIQPLLSQNCKSTSLEPNKIEEQFKTAVLKFRYSDPTTRPYIPKQKISTKLTKIVHFIDTEILPNHISLEQDFLMTQAIIYCAAYTAATCNGSKIKDNITPVTQNQAKIPPWQKRLQNKIQKLRKDIGRMTEYIRGNSSDRVRRLVEIIKDKHQIHSQHEEPNLSNEHFLDTLKQKLNAATSRLKRYINCTLRKTQNNEFTNNEKQFYRHLASNTTQYTNKNMEDSVTAPVDELHNFWSNIWSKPILHNSQAEWLQNNTSLTDSISHMDFEQIPVEIFINVLKKLHNWKAPGSDHIHNYWYKKFTSVHPLLHKHISTFIETPDVMPHYITEGLTYMIPKDTDYQNPAKYRPITCLQTIYKIITACIAEIIHQHAIENSILAEEQKGCRKNSQGCKEQLVIDSVAMKLAISKKINISTMYIDYKKAFDSVPHSWLLHVLQLYKIHPKIIDFLQNSMQHWTTTLNIKGHSNTETPKIPIRRGIFQGDALSPLWFCLALNPLSHILNKSRLGYTITTPQKQTSLTHLMYMDDIKLYGNDIESLHCLADITQAFSNDINMEFGIDKCKTFSVINGEITSSTYMLQTGETIEPLEPHNSYKYLGFQQDRQINQNVTKDTLKQKFKHRLNIILRSQLNSRNLVKAINSYAIPVLIYSFGIIRWSKTELTKLQRTINTTLTAHRKHHPRSCIQRLTLPREEGGRGIIDVSNLHNRQITSLRQYFQQRLQHSTLHEVVTHSDRRFTPLNLADQNPQCNERIIEIKEKVTIWQQKSLHGRHRHDLQQPNVDIVASNQWLRRGDLFPETEAFVTAIQDQVIDTRNYQKHIIRAQNLPSDACRRCHACPETIQHITSACKSLVQTDYKHRHDQVAAIVHQHLAHKHHFIDKKIPYYKYQPETVLENNNLKIYWDRTILTDKTIHFNRPDITLHDKVNKIIYLIDIAVPNTHNVQSTIAEKLTKYQDLAIELKRQWRAVNIHIVPIVISSTGIIPKSLQRSLDILEMPQHSLHLLQKAVLLNTCRLTRKFLTTSSVSSTYTIT

SEQ ID NO: 26228 - protein, 1368 aa, Arctia plantaginis
MVLTRSSTKRPQVPGGPSTSHGDDDSQPGTEPRGAKNLRVGRRTRQTTLAIHEDSDNSSDTPLTPSPFHSFESPPSSSLSYKSSTSSITESTLSEDVVQGAHAVTPASASGTNRTRKRWSQEINEFIWRTYLIATKLNTSKVYLNHLHHEFTQTYPHMQASKQRLGDQCRAIIRNKLLPQQVLDNIKDEVSTYLQQTQHTQTNCMIPPYTSTRAHDSNKQTQRRRWTTEYNESIIKNYYKITQLGSNRTAYRKPLYQAVIAEHPDLSGVSEQRISDQLRVILKNKLISEQRQQEIRNEIAGTPDLQNTDQEYCITQTQYMTPTAESQQEINSMETDLFIQPLLSQNCKSTSLEPNKIEEQFKTAVLKFRYSDPTTRPYIPKQKISTKLTKIVHFIDTEILPNHISLEQDFLMTQAIIYCAAYTAATCNGSKIKDNITPVTQNQAKIPPWQKRLQNKIQKLRKDIGRMTEYIRGNSSDRVRRLVEIIKDKHQIHSQHEEPNLSNEHFLDTLKQKLNAATSRLKRYINCTLRKTQNNEFTNNEKQFYRHLASNTTQYTNKNMEDSVTAPVDELHNFWSNIWSKPILHNSQAEWLQNNTSLTDSISHMDFEQIPVEIFINVLKKLHNWKAPGSDHIHNYWYKKFTSVHPLLHKHISTFIETPDVMPHYITEGLTYMIPKDTDYQNPAKYRPITCLQTIYKIITACIAEIIHQHAIENSILAEEQKGCRKNSQGCKEQLVIDSVAMKLAISKKINISTMYIDYKKAFDSVPHSWLLHVLQLYKIHPKIIDFLQNSMQHWTTTLNIKGHSNTETPKIPIRRGIFQGDALSPLWFCLALNPLSHILNKSRLGYTITTPQKQTNLTHLMYMDDIKLYGNDIESLHCLADITQAFSNDINMEFGIDKCKTFSVINGEITSSTYMLQTGETIEPLEPHNSYKYLGFQQDRQINQNVTKDTLKQKFKHRLNIILRSQLNSRNLVKAINSYAIPVLIYSFGIIRWPKTELTKLQRTINTTLTAHRKHHPRSCIQRLTLPREEGGRGIIDVSNLHNRQITSLRQYFQQRSQHSTLHEVVTHSDRRFTPLNLADQNPQCNERIIEIKEKVTIWQQKSLHGRHRHDLQQPNVDIVASNEWLRRGDLFPETEAFVTAIQDQVIDTRNYQKHIIRAQNLPSDACRRCHACPETIQHITSACKSLVQTDYKHRHDQVAAIVHQHLAHKHHFIDKKIPYYKYQPETVLENNNLKIYWDRTILTDKTIHFNRPDITLHDKVNKIIYLIDIAVPNTHNVQSTIAEKLTKYQDLAIELKRQWRAVNIHIVPIVISSTGIIPKSLQRSLDILEMPQHSLQLLQKAVLLNTCRLTRKFLTTSSVSSTYTIS

SEQ ID NO: 26229 - protein, 1362 aa, Spilarctia lutea
MVLTRSSTKRPQVPGGPSTSGGNDESHSVTEPRGAKNLRVGIETRQTTQAIHKDSDNLSDTSLTPSPFHSFESPSSPLSFASSTLSSALSEDVVQEAHAITPAPTSGTNRTRKRWSQEINEFIWRTYLIATKLNTSKIYLNHLHHEFTQKYPQMQASKQRLGDQCRAIIRNNLLPQQTLDSIKGEVSSYLQQIQNTQIDCSTQAHNTNVQTQRRRWTTEYNESIIKNYYKITQLGTNRTAYRKPLYQAVIAEHPNLSEVSEQRISDQLRVILNSKLISDRRQEEIRNEIANTLNLHITNQEDCLTQTQCITSITELQQEIRSPVTDSLTQPLLTQNCRLRVNPTVLESNKIEEIFKTTLLKFRNSNPTTRPYIPKQKNSTKLTKIVHFINTKILPNHISLDQEFLLTQTIIYCAAYTSATCNGSKIKDNTTTFTQNQTKVPPWQKRLQNKIQNLRQDIGRMTEHIKGNSSERVRRLVEKIKAKHQIHSQHEEPNLSNEHFLDTLKQKLNAATSRLKRYINCTLRKTQNSQFTNNEKQFYRQLASNTTQYTNKNTADSVTVPVVELHDFWSNIWSKPVLHNSQAERLQTNSSLTISVKPMDFEQISVEIFGNVLKKLHNWKAPGTDRIHNYWYKKFTALHPLLHKHINTFIQIPDLMPHYITEGLTYMIPKDTDFQNPAKYRPITCLQTIYKILTACVAEIIHQHASENSILAEEQKGCRKNSQGCKEQLVIDSVAMKLAISNKKNISTMYIDYKKAFDSVPHSWLLHVLQLYKIHPKIIDFLHNSMQHWNTTLNMNGYSNTEMPKIPIRRGIFQGDALSPLWFCLALNPLSHMLNKSLLGYTVTTPQKQTNLTHLMYMDDIKLYGNNTESLHRLADITQSFSNDIHMEFGIDKCKTFSVVNGQIITNTYTLQTGETIEPLESHNSYKYLGFQQNRQIKQKETKHTLKQKFKHRINIILRSQLNSRNTIKAINSYAIPVLVYSFGIIRWSKTELTNLQRIINTTLTTYRKHHPRSCVQRITLPREEGGRGIIDVSNLHNKLINSLRQYFQQRSQHSILHEVVMLADKRFTPLNLADQNPQSNERIVEIKEKITLWQQKSLHGRHRHDLQQPTVDIIASNEWLRRGDLFPETEAFMIAIQDQVIDTRNYQKHIIRAQNLTSDACRRCHACPETIQHITSACKSLAQTDYKHRHDQVAAIVHQHLAHKHHFIDKKTPYYKYKPETVLENNNYKVYWDRTILTDKTIHFNRPDITLHDKIKKAVYLIDVAVPNTHNVQSTIAEKLTKYQDLAIELKQQWRAVNIHIVPIVISSTGIIPKSLQHSLDILEMPQHSLHLLQKAVLLNTCRLTRKFLTTSSVSSTYTIT

SEQ ID NO: 26230 - protein, 1368 aa, Arctia plantaginis
MVLTRSSTKRPQVPGGPSTSHGDDDSQPGTEPRGAKNLRVGRRTRQTTLAIHEDSDNSSDTPLTPSPFHSFESPPSSSLSYKSSTSSITESTLSEDVVQGAHAVTPASASGTNRTRKRWSQEINEFIWRTYLIATKLNTSKVYLNHLHHEFTQTYPHMQASKQRLGDQCRAIIRNKLLPQQVLDNIKDEVSTYLQQTQHTQTNCMIPPYTSTRAHDLNKQTQRRRWTTEYNESIIKNYYKITQLGSNRTAYRKPLYQAVIAEHPDLSGVSEQRISDQLRVILKNKLISEQRQQEIRNEIAGTPDLQNTDQEYCITQTQYITPTAESQQEINSMETDLFIQPLLSQNCKSTSLEPNKIEEQFKTAVLKFKYSDPTTRPYIPKQKISTKLTKIVHFIDTEILPNHISLEQDFLMTQAIIYCAAYTAATCNGSKIKDNITPVTQNQAKIPPWQKRLQNKIQKLRKDIGRMTEYIRGNSSDRVRRLVEIIKDKHQIHSQHEEPNLSNKHFLDTLKQKLNAATSRLKRYINCTLRKTQNNEFTNNEKQFYRHLASNTTQYTNKNMEDSVTAPVDELHNFWSNIWSKPILHNSQAEWLQNNTSLTDSISHMDFEQIPVEIFINVLKKLHNWKAPGSDHIHNYWYKKFTSVHPLLHKHISTFIETPDVMPHYITEGLTYMIPKDTDYQNPAKYRPITCLQTIYKIITACIAEIIHQHAIENSILAEEQKGCRKNSQGCKEQLVIDSVAMKLAISKKINISTMYIDYKKAFDSVPHSWLLHVLQLYKIHPKIIDFLQNSMQHWTTTLNIKGHSNTETPKIPIRRGIFQGDALSPLWFCLALNPLSHILNKSRLGYTITTPQKQTNLTHLMYMDDIKLYGNDIESLHCLADITQAFSNDINMEFGIDKCKNFSVINGEITSSTYMLQTGETIEPLEPHNSYKYLGFQQDRQINQNVTKDTLKQKFKHRLNIILRSQLNSRNLVKAINSYAIPVLIYSFGIIRWSKTELTKLQRTINTTLTAHRKHHPRSCIQRLTLPREEGGRGIIDVSNLHNRQITSLRQYFQQRSQHSTLHEVVTHSDRRFTPLNLADQNPQCNERIIEIKEKVTIWQQKSLHGRHRHDLQQPNVDIAASNEWLRRGDLFPETEAFVTAIQDQVIDTRNYQKHIIRAQNLPSDACRRCHACPETIQHITSACKSLVQTDYKHRHDQVAAIVHQHLAHKHHFIDKKIPYYKYQPETVLENNNLKIYWDRTILTDKTIHFNRPDITLHDKVNKIIYLIDIAVPNTHNVQSTIAEKLTKYQDLAIELKRQWRAVNIHIVPIVISSTGIIPKSLQRSLDILEMPQHSLQLLQKAVLLNTCRLTRKFLTTSSVSSTYTIS

SEQ ID NO: 26231 - protein, 1368 aa, Arctia plantaginis
MVLTRSSTKRPQVPGGPSTSHGDDDSQPGTEPRGAKNLRVGRRTRQTTLAIHEDSDNSSDTPLTPSPFHSFESPPSSSLSYKSSTSSITESTLSEDVVQGAHAVTPASASGTNRTRKRWSQEINEFIWRTYLIATKLNTSKVYLNHLHHEFTQTYPHMQASKQRLGDQCRAIIRNKLLPQQVLDNIKDEVSTYLQQTQHTQTNCMIPPYTSTRAHDLNKQTQRRRWTTEYNESIIKNYYKITQLGSNRTAYRKPLYQAVIAEHPDLSGVSEQRISDQLRVILKNKLISEQRQQEIRNEIAGTPDLQNTDQEYCITQTQYITPTAESQQEINSMETDLFIQPLLSQNCKSTSLEPNKIEEQFKTAVLKFKYSDPTTRPYIPKQKISTKLTKIVHFIDTEILPNHISLEQDFLMTQAIIYCAAYTAATCNGSKIKDNITPVTQNQAKIPPWQKRLQNKIQKLRKDIGRMTEYIRGNSSDRVRRLVEIIKDKHQIHSQHEEPNLSNKHFLDTLKQKLNAATSRLKRYINCTLRKTQNNEFTNNEKQFYRHLASNTTQYTNKNMEDSVTAPVDELHNFWSNIWSKPILHNSQAEWLQNNTSLTDSISHMDFEQIPVEIFINVLKKLHNWKAPGSDHIHNYWYKKFTSVHPLLHKHISTFIETPDVMPHYITEGLTYMIPKDTDYQNPAKYRPITCLQTIYKIITACIAEIIHQHAIENSILAEEQKGCRKNSQGCKEQLVIDSVAMKLAISKKINISTMYIDYKKAFDSVPHSWLLHVLQLYKIHPKIIDFLQNSMQHWTTTLNIKGHSNTETPKIPIRRGIFQGDALSPLWFCLALNPLSHILNKSRLGYTITTPQKQTNLTHLMYMDDIKLYGNDIESLHCLADITQAFSNDINMEFGIDKCKTFSVINGEITSSTYMLQTGETIEPLEPHNSYKYLGFQQDRQINQNVTKDTLKQKFKHRLNIILRSQLNSRNLVKAINSYAIPVLIYSFGIIRWSKTELTKLQRTINTTLTAHRKHHPRSCIQRLTLPREEGGRGIIDVSNLHNRQITSLRQYFQQRSQHSTLHEVVTHSDRRFTPLNLADQNPQCNERIIEIKEKVTIWQQKSLHGRHRHDLQQPNVDIAASNEWLRRGDLFPETEAFVTAIQDQVIDTRNYQKHIIRAQNLPSDACRRCHACPETIQHITSACKSLVQTDYKHRHDQVAAIVHQHLAHKHHFIDKKIPYYKYQPETVLENNNLKIYWDRTILTDKTIHFNRPDITLHDKVNKIIYLIDIAVPNTHNVQSTIAEKLTKYQDLAIELKRQWRAVNIHIVPIVISSTGIIPKSLQRSLDILEMPQHSLQLLQKAVLLNTCRLTRKFLTTSSVSSTYTIS

SEQ ID NO: 26232 - protein, 1363 aa, Spilarctia lutea
MVLTRSSTKRPQVPGGPSTSGGNDESHSVTEPRGAKNLRVGIGTRQTTQAIHKDSDNLSDTSLTPSPFHSFESPSSSPLSFASSTLSSALSEDVVQEAHAITPAPTSGTNRTRKRWSQEINEFIWRTYLIATKLNTSKIYLNHLHHEFTQKYPQMQASKQRLGDQCRAIIRNNLLPQQTLDSIKGEVSSYLQQIQNTQIDCSTQAHNTNVQTQRRRWTTEYNESIIKNYYKITQLGSNRTAYRKPLYQAVIAEHPDLSEVSEQRISDQLRVIFNSKLISDRRQEEIRNEIANTLNIHITNPEDCLTQTQCITSITELQQEIRSPVTDSLTQPLLTQNCRLRVNPTVLESNKIEEIFKTTLLKFRNSNPTTRPYIPKQTNSTKLTKIVHFINTEILPNHISLDQEFLLTQTIIYCAAYTAATCNGSKIKDNTTTFTQNQTKVPPWQKRLQNKIQNLRQDIGRMTEHIKGNSSERVRRLVEKIKAKHQIHSQHEEPNLSNEHFLDTLKQKLNAATSRLKRYINCALRKTQNSQFTNNEKQFYRQLASNTTQYTNKNTADSVTVPIVELHDFWSNIWSKPVLHNSQAEWLQTNSSLTISVKPMDFEQIPVEIFANVLKKLHNWKAPGTDRIHNYWYKKFTALHPLLHKHINTFIQIPELMPHYITEGLTYMIPKDTDFQNPAKYRPITCLQTIYKILTACVAEIINQHASENSILAEEQKGCRKNSQGCKEQLVIDSVAMKLAISNKKNISTMYIDYKKAFDSVPHSWLLHVLQLYKIHPKIIDFLQNSMQHWNTTLNINGYSNTEIPKIPIRRGIFQGDALSPLWFCLALNPLSHMLNKSLLGYTVTTPQKQTNLTHLMYMDDIKLYGNNTESLHRLADITQSFSNDIHMEFGIDKCKTFSVVNGQIITNTYTLQTGETIEPLESHNSYKYLGFQQNRQIKQKETKHTLKQKFKHRINIILRSQLNSRNTIKAINSYAIPVLVYSFGIIRWSKTELTNLQRIINTTLTTYRKHHPRSCVQRITLPREEGGRGIIDVSNLHNKQINSLRQYFQQRSQHSILHEVVMLADKRFTPLNLADQNPQSNERIVEIKEKITLWQQKSLHGRHRHDLQQPTVDIVASNEWLRRGDLFPETEAFMIAIQDQVIDTRNYQKHIIRAQNLTSDACRRCHACPETIQHITSACKSLAQTDYKHRHDQVAAIVHQHLAHKHHFIDKKTPYYKYKPETVLENNNYKVYWDRTILTDKTIHFNRPDITLHDKIKKAVYLIDVAVPNTHNVQSTIAEKLTKYQDLAIELKRQWRAVNIHIVPIVISSTGIIPKSLQHSLEILEMPQHSLHLLQKAVLLNTCRLTRKFLTTSSVSSTYTIT

SEQ ID NO: 26233 - protein, 1363 aa, Spilarctia lutea
MVLTRSSTKRPQVPGGPSTSGGNDESHSVTEPRGAKNLRVGIGTRQTTQAIHKDSDNLSDTSLTPSPFHSFESPSSSPLSFASSTLSSALSEDVVQEAHAITPAPTSGTNRTRKRWSQEINEFIWRTYLIATKLNTSKIYLNHLHHEFTQKYPQMQASKQRLGDQCRAIIRNNLLPQQTLDSIKGEVSSYLQQIQNTQIDCSTQAHNTNVQTQRRRWTTEYNESIIKNYYKITQLGSNRTAYRKPLYQAVIAEHPDLSEVSEQRISDQLRVIFNSKLISDRRQEEIRNEIANTLNIHITNPEDCLTQTQCITSITELQQEIRSPVTDSLTQPLLTQNCRLRVNPTVLESNKIEEIFKTTLLKFRNSNPTTRPYIPKQTNSTKLTKIVHFINTEILPNHISLDQEFLLTQTIIYCAAYTAATCNGSKIKDNTTTFTQNQTKVPPWQKRLQNKIQNLRQDIGRMTEHIKGNSSERVRRLVEKIKAKHQIHSQHEEPNLSNEHFLDTLKQKLNAATSRLKRYINCTLRKTQNSQFTNNEKQFYRQLASNTTQYTNKNTADSVTVPIVELHDFWSNIWSKPVLHNSQAEWLQTNSSLTISVKPMDFEQIPVEIFANVLKKLHNWKAPGTDRIHNYWYKKFTALHPLLHKHINTFIEIPELMPHYITEGLTYMIPKDTDFQNPAKYRPITCLQTIYKILTACVAEIIHQHASENSILAEEQKGCRKNSQGCKEQLVIDSVAMKLAISNKKNISTMYIDYKKAFDSVPHSWLLHVLQLYKIHPKIIDFLQNSMQHWNTTLNINGYSNTEIPKIPIRRGIFQGDALSPLWFCLALNPLSHMLNKSLLGYTVTTPQKQTNLTHLMYMDDIKLYGNNTESLHRLADITQSFSNDIHMEFGIDKCKTFSVVNGQIITNTYTLQTGETIEPLESHNSYKYLGFQQNRQIKQKETKHTLKQKFKHRINIILRSQLNSRNTIKAINSYAIPVLVYSFGIIRWSKTELTNLQRIINTTLTTYRKHHPRSCVQRITLPREEGGRGIIDVSNLHNKQINSLRQYFQQRSQHSILHEVVMLADKRFTPLNLADQNPQSNERIVEIKEKITLWQQKSLHGRHRHDLQQPTVDIVASNEWLRRGDLFPETEAFMIAIQDQVIDTRNYQKHIIRAQNLTSDACRRCHACPETIQHITSACKSLAQTDYKHRHDQVAAIVHQHLAHKHHFIDKKTPYYKYKPETVLENNNYKVYWDRTILTDKTIHFNRPDITLHDKIKKAVYLIDVAVPNTHNVQSTIAEKLTKYQDLAIELKRQWRAVNIHIVPIVISSTGIIPKSLQHSLEILEMPQHSLHLLQKAVLLNTCRLTRKFLTTSSVSSTYTIT

SEQ ID NO: 26234 - protein, 1365 aa, Spilarctia lutea
MVLTRSSTKRPQVPGGPSTSGGNDESHSVTEPRGAKNLRVGTETRQTTQAIHKDSDNLSDTSLTPSPFHSVESPSSSPLSFASSTLSSALSEDVVQEAHAIAPAPTSGTNRTRKRWSQEIIEFIWRTYLIATKLNTSKIYLNHLHHEFTQKYPQMQASKQRLGDQCRAIIRNNLLPQQTLDSIKGEVSIYLQQTQNTQIDCSTQAHNTNVQTQRRRWTTEYNESIIKNYYKITQLGTNRTAYRKPLYQAVIAEHPDLSEVSEQRISDQLRVILNNKLINDRRQEEIRNEIASTLNLQSTNQEDSLTQTQCITSITELQQEIRSPLTDALTQPLLTQNCRLRVNPTVLESNKIEEIFKTTLFKFRYSIPTTRPYIPKQKNSTKLTKIVHFINTEILPNHISLDQEFLLTQTIIYCAAYTAATCNGSKIKGNTTTFTFTQNQTKIPPWQKRLQNKIQKLRKDIGRMTEHIKGNSSERVRRLVEKIKAKHQIHSQHEEPNLSNEHFLDTLKQKLNAATSRLKRYINCTLRKTQNNQFTNNEKQFYRQLASNTTQYTNKNTEDSVPVPVVKLHDFWSNIWSKPVLHNSQTEWLQTNRSLTISIIPMDFEQIPVEIFANVLKKLHNWKAPGTDRIHNYWYKKFTALHPLLHKHINTFIQTPDLMPHYITEGLTYMIPKDTDYQNPAKYRPITCLQTIYKILTACIAEIIHQHASENSILAEEQKGCRKNSQGCKEQLVIDSVAMKLAISNNKNISTMYIDYKKAFDSVPHSWLLHVLQLYKIHTKIIDFLQNSMQHWNTTLNINGYANTEIPKIPIRRGIFQGDALSPLWFCLALNPLSHMLNKSLLGYTITTPQKQTNLTHLMYMDDIKLYGNNTESLHRLADITQSFSNDIHMEFGIDKCKTFSVVNGQIITNTYTLQTGERIEPLESHNSYKYLGFQQDRQIKQKETKYTLKQKFKHRINIILRSQLNSRNTIKAINSYAIPVLVYSFGIIRWSKTELTNLQRIINTTLTAYRKHHPRSCVQRITLPREEGGRGIIDVSNLHNRQIKSLRQYFQQRSQHSILHEVVMLADKRFTPLNLADQNPQSNERIVEIKEKITLWQQKSLHGRHRHDLQQPTVDIVASNEWLRRGDLFPETEAFMIAIQDQVIDTWNYQKHIIRAQNLTSDACRRCHACPETIQHITSACKSLVQTDYKHRHDQVAAIVHQHLAHKHHFIDKKTPYYKYKPETVLENNNYKVYWDRTIITDKTIHFNRPDITLHDKIKKAVYLIDVAVPNTHNVQSTIAEKLTKYQDLAIELKRQWRAVNIHIVPIVISSTGIIPKSLQHSLDILEMPQHSLHLLQKAVLLNTCRLTRKFLTTSSVSSTYTIT

SEQ ID NO: 26235 - protein, 1036 aa, Arctia plantaginis
METDLFIQPLLSQNCISTSLEPNKIEEQFKTAVLKFRYSDPTTRPYIPKQKISTKLTKIVHFIDTEILPNHISLEQDFLMTQAIIYCAAYTAATCNGSKIKDNITPVTQNQAKIPPWQKRLQNKIQKLRKDIGRMTEYIRGNSSDRVRRLVEIIKDKHQIHSQHEEPNLSNEHFLDTLKQKLNAATSRLKRYINCTLRKTQNNEFTNNEKQFYRHLASNTTQYTNKNMEDSVTAPVDELHNFWSNIWSKPILHNSQAEWLQNNTSLTDSISHMDFEQIPVEIFINVLKKLHNWKAPGSDHIHNYWYKKFTSVHPLLHKHISTFIETPDVMPHYITEGLTYMIPKDTDYQNPAKYRPITCLQTIYKIITACIAEIIHQHAIENSILAEEQKGCRKNSQGCKEQLVIDSVAMKLAISKKINISTMYIDYMKAFDSVPHSWLLHVLQLYKIHPKIIDFLQNSMQHWTTTLNIKGHSNTETPKIPIRRGIFQGDALSPLWFCLALNPLSHILNKSRLGYTITTPQKQTNLTHLMYMDDIKLYGNDIESLHCLADITQAFSNDINMEFGIDKCKTFSVINGEITSSTYMLQTGETIEPLEPHNSYKYLGFQQDRQINQNVTKDTLKQKFKHRLNIILRSQLNSRNLVKAINSYAIPVLIYSFGIIRWSKTELTKLQRTINTTLTAHRKHHPRSCIQRLTLPREEGGRGIIDVSNLHNRQITSLRQYFQQRSQHSTLHEVVTHSDRRFTPLNLADQNPQCNERIIEIKEKVTIWQQKSLHGRHRHDLQQPNVDIVASNEWLRRGDLFPETEAFVTAIQDQVIDTRNYHKHIIRAQNLPSDACRRCHACPETIQHITSACKSLVQTDYKHRHDQVAAIVHQHLAHKHHFIDKKIPYYKYQPETVLENNNLKIYWDRTILTDKTIHFNRPDITLHDKVNKIIYLIDIAVPNTHNVQATIAEKLTKYQDLAIELKRQWRAVNIHIVPIVISSTGIIPKSLQRSLDILEMPQHSLQLLQKAVLLNTCRLTRKFLTTSSVSSTYTIS

SEQ ID NO: 26236 - protein, 902 aa, Spilarctia lutea
MTEHIKGNSSERVRRLVEKIKAKHQIHSQHEEPNLSNEHFLDTLKQKLNAATSRLKRYINCTLRKTQNNQFTNNEKQFYRQLASNTTQYTNKNTEDSVPVPVVKLHDFWSNIWSKPVLHNSQTEWLQTNRSLTISIIPMDFEQIPVEIFANVLKKLHNWKAPGTDRIHNYWYKKFTALHPLLHKHINTFIQTPDLMPHYITEGLTYMIPKDTDYQNPAKYRPIICLQTIYKILTACIAEIIHQHASENSILAEEQKGCRKNSQGCKEQLVIDSVAMKLAISNNKNISTMYIDYKKAFDSVPHSWLLHVLQLYKIHPKIIDFLQNSMQHWNTTLNINGYANTEIPKIPIRRGIFQGDALSPLWFCLALNPLSHTLNKSLLGYTITTPQKQTNLTHLMYMDDIKLYGNNTESLHRLADITQSFSNDIHMEFGIDKCKTFSVVNGQIITNTYTLQTGERIEPLESHNSYKYLGFQQDRQIKQKETKYTLKQKFKHRINIILRSQLNSRNTIKAINSYAIPVLVYSFGIIRWSKTELTNLQRIINTTLTAYRKHHPRSCVQRITLPREEGGRGIIDVSNLHNRQIKSLRQYFQQRSQHSILHEVVMLADKRFTPLNLADQNPQSNERIVEIKEKITLWQQKSLHGRHRHDLQQPTVDIVASNEWLRRGDLFPETEAFMIAIQDQVIDTRNYQKHIIRAQNLTSDACRRCHACPETIQHITSACKSLVQTDYKHRHDQVAAIVHQHLAHKHHFIDKKTPYYKYKPETVLENNNYKVYWDRTIITDKTIHFNRPDITLHDKIKKAVYLIDVAVPNTHNVQSTIAEKLIKYQDLAIELKRQWRAVNIHIVPIVISSTGLIPKSLQHSLDILEMPQHSLHLLQKAVLLNTCRLTRKFLTTSSVSSTYTIT

SEQ ID NO: 26237 - protein, 1368 aa, Arctia plantaginis
MVLTRSNTKRPQVPGGPSPSHGDDDSQPATEPRGAKNLRVGRRTRQTTLAIHEDSDNSSDTPMTPSPFHSFESPPSSSLSYKSSTSSITDSTLSEDVVQGAHAVTPASASGTSRTRKRWSQEINEFIWRTYLIATKLNTSKVYLNHLHHEFTQTYPHMQASKQRLGDQCRAIIRNKLLPQQILDNIKDEVSTYLQQTQNTQTDCMIPPYTSTRAHYSNKQTQRRRWTTEYNESIIKNYYKITQLGSNRTAYRKPLHQAVIVEHPDLSGVSEQRISDQLRVILKNKLISEQRQQEIRNEVAGTADLQNTDQEYCITQTQYITPTAESQQEINSMETDLFIQPLLSQNCKSTFLEPNKIEELFKTAVLKFRYSDPTTRPYIPKQKISTKLTKIVHFIDTEILPNHISLEQDFLMTQAIIYCAAYTAATCNGSKIKDNITNVTQNQAKIPPWQKRLQNKIQYLRKDIGRLTEYIRGNSSDRVRRLVEIIKDKHQIHSQHEEPNLSNEHFLDTLKQKLNAATSRLKRYINCTLRKTQNNEFTNNEKYFYRHLASNTTQYTNKNMEDSVTAPVDELHNFWSNIWSKPVLHNSQAEWLQNNTSLTDSISHMDFEQIPVEIFINVLKQLHNWKAPGSDHIHNYWYKKFTSVHPLLHKHISTFIETPDVMPHYITEGLTYMIPKDTDCQNPAKYRPITCLQTIYKIITACIAEIIHQHAIENSILAEEQKGCRKNSQGCKEQLVIDSVAMKLAISKKKNISTMYIDYKKAFDSVPHSWLLHVLQLYKIHPKIIDFLQNSMQHWTTTLNIKGHSNTETPKIPIRRGIFQGDALSPLWFCLALNPLSHILNKSRLGYTITTPQKQTNLTHLMYMDDIKLYGNNIESLHCLADITQSFSNDINMEFGIDKCKTFSVINGEITSSTYMLQTGETIEPLEPHNSYKYLGFQQDRQINQKETKDTLKQKFKHRLNIILRSQLNSRNLVKAINSYAIPVLIYSFGIIRWSKTELTKLQRIINTTLTAHRKHHPRSCIQRLTLPREEGGRGIIDVSNLHNRQITSLRQYFQQRSQHSTLHEVVTHADRRFTPLNLADQNPQCNERIIEIKEKVTIWQQKSLHGRHRHDLQQPNVDIVASNEWLRRGDLFPETEAFVTAIQDQVIDTRNYQKHIIRAQNLPSDACRRCHACPETIQHITSACKSLVQTDYKHRHDQVAAIVHQHLAHKHHFIDKKIPYYKYQPETVLENNNLKIYWDRTILTDKTIHFNRPDITLHDKVNKIIYLIDIAVPNTHNVQSTIAEKLTKYQDLAIELKRQWRAVNIHIVPIVISSTGIIPKSLQRSLDILEMPQHSLHLLQKAVLLNTCRLTRKFLTTSSVSSTYTIT

SEQ ID NO: 26238 - protein, 1368 aa, Arctia plantaginis
MVLTRSSTKRPQVPGGPSTSHGDDDSQPGTEPRGAKNLRVGRRTRQTTLAIHEDSDNSSDTPMTPSPFHSFESPPSSSLSYKSSTSSITESTLSEDVVQGAHAVTPASASGTNRTRKRWSQEINEFIWRTYLIATKLNTSKVYLNHLHHEFTQTYPHMQASKQRLGDQCRAIIRNKLLPQQVLDNIKDEVSTYLQQTQHTQTNCMIPPYTSTRAHDSNKQTQRRRWTTEYNESIIKNYYKITQLGSNRTAYRKPLYQAVIAEHPDLSGVSEQRISDQLRVILKNKLISEQRQQEIRNEIAGTPDLQNTDQEYCITQTQYITPTAESQQEINSMETDLFIQPLLSQNCKSTSLEPNKIEEQFKTAVLKFRYSDPTTRPYIPKQKISTKLTKIVHFIDTEILPNHISLEQDFLMTQAIIYCAAYTAATCNGSKIKDNITPVTQNQAKIPPWQKRLQNKIQKLRKDIGRMTEYIRGNSSDRVRRLVEIIKDKHQIHSQHEEPNLSNEHFLDTLKQKLNAATSRLKRYINCTLRKTQNNEFTNNEKQFYRHLASNTTQYTNKNMEDSVTAPVDELHNFWSNIWSKPILHNSQAEWLQNDTSLTDSISRMDFEQIPVEIFINVLKKLHNWKAPGSDHIHNYWYKKFTSVHPLLHKHISTFIETPDVMPHYITEGLTYMIPKDTDYQNPAKYRPITCLQTIYKIITACIAEIIHQHAIENSILAEEQKGCRKNSQGCKEQLVIDSVAMKLAISKKINISTMYIDYMKAFDSVPHSWLLHVLQLYKIHPKIIDFLQNSMQHWTTTLNIKGHSNTETPKIPIRRGIFQGDALSPLWFCLALNPLSHILNKSRLGYTITTPQKQTNLTHLMYMDDIKLYGNDIESLHCLADITQAFSNDINMEFGIDKCKTFSVINGEITSSTYMLQTGETIEPLEPHNSYKYLGFQQDRQINQNVTKDTLKQKFKHRLNIILRSQLNSRNLVKAINSYAIPVLIYSFGIIRWSKTELTKLQRTINTTLTAHRKHHPRSCIQRLTLPREEGGRGIIDVSNLHNRQITSLRQYFQQRSQHSTLHEVVTHSDRRFTPLNLADQNPQCNERIIEIKEKVTIWQQKSLHGRHRHDLQQPNVDIVASNEWLRRGDLFPETEAFVTAIQDQVIDTRNYQKHIIRAQNLPSDACRRCHACPETIQHITSACKSLVQTDYKHRHDQVAAIVHQHLAHKHHFIDKKIPYYKYQPETVLENNNLKIYWDRTILTDKTIHFNRPDITLHDKVNKIIYLIDIAVPNTHNVQSTIAEKLTKYQDLAIELKRQWRAVNIHIVPIVISSTGIIPKSLQRSLDILEMPQHSLQLLQKAVLLNTCRLTRKFLTTSSVSSTYTIS

SEQ ID NO: 26239 - protein, 1036 aa, Arctia plantaginis
MGTDLFIQPLLSQNCKSTSLEPNKIEEQFKTAVLKFRYSDPTTRPYIPKQKISTKLTKIVHFIDTEILPNHISLEQDFLMTQAIIYCAAYTAATCNGSKIKDNITPVTQNQAKIPPWQKRLQNKIQKLRKDIGRMTEYIRGNSSDRVRRLVEIIKDKHQIHSQHEEPNLSNEHFLDTLKQKLNAATSRLKRYINCTLRKTQNNEFTNNEKQFYRHLASNTTQYTNKNMEDSVTAPVDELHNFWSNIWSKPILHNSQAEWLQNNTSLTDSISHMDFEQIPVEIFINVLKKLHNWKAPGSDHIHNYWYKKFTSVHPLLHKHINTFIETPDVMPHYITEGLTYMIPKDTDYQNPAKYRPITCLQTIYKIITACIAEIIHQHVIENSILAEEQKGCRKNSQGCKEQLVIDSVAMKLAISKKINISTMYIDYKKAFDSVPHSWLLHVLQLYKIHPKIIDFLQNSMQHWTTTLNIKGHSNTETPKIPIRRGIFQGDALSPLWFCLALNPLSHILNKSRLGYSITTPQKQTNLTHLMYMDDIKLYGNDIESLHCLADITQAFSNDINMEFGIDKCKTFSVINGEITSRTYMLQTGETIESLEPHNSYKYLGFQQDRQINQNVTKDTLKQKFKHRLNIILRSQLNSRNLVKAINSYAIPVLIYSFGIIRWSKTELTKLQRTINTTLTAHRKHHPRSCIQRLTLPREEGGRGIIDVSNLHNRQITSLRQYFQQRSQHSTLHEVVTHADRRFTPLNLADQNPQCNERIIEIKEKVTIWQQKSLHGRHRHDLQQPNVDIVASNEWLRRGDLFPETEAFVTAIQDQVIDTRNYQKHIIRAQNLPSDACRRCHACPETIQHITSACKSLVQTDYKHRHDQVAAIVHQHLAHKHHFVDKKIPYYKYQPDTVLENNNLKIYWDRTILTDKTIHFNRPDITLHNKVNKIIYLIDIAVPNTHNVQSTIAEKLTKYQDLAIELKRQWRAVNIHIVPIVISSTGIIPKSLQRSLDILEMPQHSIHLLQKAVLLNTCRLTRKFLTTSSVSSTYTIS

SEQ ID NO: 26240 - protein, 1362 aa, Spilarctia lutea
MVLTRSSTKRPQVPGGPSTSGGNDESHSVTEPRGAKNLRVGIETRQTTQAIHKDSDNLSDTSLTPSPFHSFESPSSPLSFASSTLSSALSEDVVQEAHAITPAPTSGTNRTRKRWSQEINEFIWRTYLIATKLNTSKIYLNHLHHEFTQKYPQMQASKQRLGDQCRAIIRNNLLPQQTLDSIKGEVSSYLQQIQNTQIDCSTQAHNTNVQTQRRRWTTEYNESIIKNYYKITQLGTNRTAYRKPLYQAVIAEHPDLSEVSEQRISDQLRVILNSKLISDRRQEEIRNEIANTLNLHITNQEDCLTQTQCITSITELQQEIRSPVTDSPTQPLLTQNCRLRVNPTVLESNKIEEIFKTTLLKFRNSNPTTRPYIPKQKKSTKLTKIVHFINTKILPNHISLDQEFLLTQTITYCAAYTSATCNGSKIKDNTTTFTQNQTKVPPWQKRLQNKIQNLRQDIGRMTEHIKGNSSERVRRLVEKIKAKHQIHSQHEEPNLSNEHFLDTLKQKLNAATSRLKRYINCTLRKTQNSQFTNNEKQFYRQLASNTTQYTNKNTADSVTVPVVELHDFWSNIWSKPVLHNSQAEWLQTNSSLTISVKPMDFEQISVEIFANVLKKLHNWKAPGTDRIHNYWYKKFTALHPLLHKHINTFIQIPDLMPHYITEGLTYMIPKDTDFQNPAKYRPITCLQTIYKILTACVAEIIHQHASENSILAEEQKGCRKNSQGCKEQLVIDSVAMKLAISNKKNISTMYIDYKKAFDSVPHSWLLHVLQLYKIHPKIIDFLHNSMQHWNTTLNINGYSNTEIPKIPIRRGIFQGDALSPLWFCLALNPLSHMLNKSLLGYTVTTPQKQTNLTHLMYMDDIKLYGNNTESLHRLADITQSFSNDIHMEFGIDKCKTFSVVNGQIITNTYTLQTGETIEPLESHNSYKYLGFQQNRQIKQKETKHTLKQKFKHRINIILRSQLNSRNTIKAINSYAIPVLVYSFGIIRWSKTELTNLQRIINTTLTTYRKHHPRSCVQRITLPREEGGRGIIDVSNLHNKQINSLRQYFQQRSQHSILHEVVMLADKRFTPLNLADQNPQSNERIVEIKEKITLWQQKSLHGRHRHDLQQPTVDIIASNEWLRRGDLFPETEAFMIAIQDQVIDTRNYQKHIIRAQNLTSDACRRCHACPETIQHITSACKSLAQTDYKHRHDQVAAIVHQHLAHKHHFIDKKTPYYKYKPETVLENNNYKVYWDRTILTDKTIHFNRPDITLHDKIKKAVYLIDVAVPNTHNVQSTIAEKLTKYQDLAIELKRQWRAVNIHIVPIVISSTGIIPKSLQHSLDILEMPQHSLHLLQKAVLLNTCRLTRKFLTTSSVSSTYTIT

SEQ ID NO: 26241 - protein, 1368 aa, Arctia plantaginis
MVLTRSSTKRPQVPGGPSTSHGDDDSQPGTEPRGAKNLRVGRRTRQTTLAIHEDSDNSSDTPLTPSPFHSFESPPSSSLSYKSLTSSITESTLSEDVVQGAHAVTPASASGTNRTRKRWSQEINEFIWRTYLIATKLNTSKVYLNHLHHEFTQTYPHMQASKQRLGDQCRAIIRNKLLPQQVLDNIKDEVSTYLQQTEHTQTNCMITPYTSTRAHDSNKQTQRRRWTTEYNESIIKNYYKITQLGSNRTAYRKPLYQAVIAEHPDLSGVSEQRISDQLRVILKNKLISEQRQQEIRNEIAGTPDLQNTDQEYCITQTQYITPTAESQQEINSMETDLFIQPLLSQNCKSTSLEPNKIEEQFKTAVLKFRCSDPTTRPYIPKQKISTKLTKIVHFIDTEILPNHISLEQDFLMTQAIIYCAAYTAATCNGSKIKDNITPVTQNQAKIPPWQKRLQNKIQKLRKDIGRMTEYIRGNSSDRVRRLVKIIKDKHQIHSQHEEPNLSNEHFLDTLKQKLNAATSRLKRYINCTLRKTQNNEFTNNEKHFYRHLASNTTQYTNKNMEDSVTAPVDELHNFWSNIWSKPILHNSQAEWLQNNTSLTDSISHMDFEQIPVEIFINVLKKLHNWKAPGSDHIHNYWYKKFTSVHPLLHKHISTFIETPDVMPHYITEGITYMIPKDTDYQNPAKYRPITCLQTIYKIITACIAEIIHQHAIENSILAEEQKGCRKNSQGCKEQLVIDSVAMKLAISKKINISTMYIDYMKAFDSVPHSWLLHVLQLYKIHPKIIDFLQNSMQHWTTTLNIKGHSNTETPKIPIRRGIFQGDALSPLWFCLALNPLSHILNKSRLGYTITTPQKQTNLTHLMYMDDIKLYGNDIESLHCLADITQAFSNDINMEFGIDKCKTFSVINGEITSSTYMLQTGETIEPLEPHNSYKYLGFQQDRQINQNVTKDTLKKKFKHRLNIILRSQLNSRNLVKAINSYAIPVLIYSFGIIRWSKTELTKLQRTINTTLTAHRKHHPRSCIQRLTLPREEGGRGIIDVSNLHNRQITSLRQYFQQRSQHSTLHEVVTHADRRFTPLNLADQNPQCNERIIEIKEKVTTWQQKSLHGRHRHDLQQPNVDIVASNEWLRRGDLFPETEAFVTAIQDQVIDTRNYQKHIIRAQNLPSDACRRCHACPETIQHITSACKSLVQTDYKHRHDQVAAIVHQHLAHKHHFIDKKIPYYKYQPETVLENNNLKIYWDRTILTDKTIHFNRPDITLHDKVNKIIYLVDIAVPNTHNVQSTIAEKLTKYQDLAIELKRQWRAVNIHIVPIVISSTGIIPKSLQRSLDILEMPQHSLHLLQKAVLLNTCRLTRKFLTTSSVSSTYTIS

SEQ ID NO: 26242 - protein, 1363 aa, Spilarctia lutea
MVLTRSSTKRPQVPGGPSTSGGNDESHSVTEPRGAKNLRVGIGTRQTTQAIHKDSDNLSDTSLTPSPFHSFESPSSSPLSFASSTLSSALSEDVVQEAHAITPAPTSGTNRTRKRWSQEINEFIWRTYLIATKLNTSKIYLNHLHHEFTQKYPQMQASKQRLGDQCRAIIRNNLLPQQTLDSIKGEVSSYLQQIQNTQIDCSTQAHNTNVQTQRRRWTTEYNESIIKNYYKITQLGSNRTAYRKPLYQAVIAEHPDLSEVSEQRISDQLRVIFNSKLISDRRQEEIRNEIANTLNIHITNPEDCLTQTQCITSITELQQEIRSPVTDSLTQPLLTQNCRLRVNPTVLESNKIEEIFKTTLLKFRNSNPTTRPYIPKQTNSTKLTKIVHFINTEILPNHISLDQDFLLTQAIIYCAAYTAATCNGSKIKDNTTTFTQNQTKVPPWQKRLQNKIQNLRQDIGRMTEHIKGNSSERVRRLVEKIKAKHQIHSQHEEPNLSNEHFLDTLKQKLNAATSRLKRYINCTLRKTQNSQFTNNEKQFYRQLASNTTQYTNKNTADSVTVSIVELHDFWSNIWSKPVLHNSQAEWLQTNSSLTISVKPMDFEQIPVEIFANVLKKLHNWKAPGTDRIHNYWYKKFTALHPLLHKHINTFIQIPELMPHYITEGLTYMIPKDTDFQNPAKYRPITCLQTIYKILTACVAEIINQHASENSILAEEQKGCRKNSQGCKEQLVIDSVAMKLAISNKKNISTMYIDYKKAFDSVPHSWLLHVLQLYKIHPKIIDFLQNSMQHWNTTLNINGYSNTEIPKIPIRRGIFQGDALSPLWFCLALNPLSHMLNKSLLGYTVTTPQKQTNLTHLMYMDDIKLYGNNTESLHRLADITQSFSNDIHMEFRIDKCKTFSVVNGQIITNTYTLQTGETIEPLESHNSYKYLGFQQNRQIKQKETKHTLKQKFKHRINIILRSQLNSRNTIKAINSYAIPVLVYSFGIIRWSKTELTNLQRIINTTLTTYRKHHPRSCVQRITLPREEGGRGIIDVSNLHNKQINSLRQYFQQRSQHSILHEVVMLADKRFTPLNLADQNPQSNERIVEIKEKITLWQQKSLHGRHRHDLQQPTVDIVASNEWLRRGDLFPETEAFMIAIQDQVIDTRNYQKHIIRAQNLTSDACRRCHACPETIQHITSACKSLAQTDYKHRHDQVAAIVHQHLAHKHHFIDKKTPYYKYKPETVLENNNYKVYWDRTILTDKTIHFNRPDITLHDKIKKAVYLIDVAVPNTHNVQSTIAEKLTKYQDLAIELKRQWRAVNIHIVPIVISSTGIIPKSLQHSLEILEMPQHSLHLLQKAVLLNTCRLTRKFLTTSSVSSTYTIT

SEQ ID NO: 26243 - protein, 1209 aa, Spilarctia lutea
MQASKQRLGDQCRAIIRNNLLPQQTLDSIKGEVSSYLQQIQNTQIDCSTQAHNTNVQTQRRRWTTEYNESIIKNYYKITQLGTNRTAYRKPLYQAVIAEHPDLSEVSEQRISDQLRVILNSKLISDRRQEEIRNEIANTLNLHITNQEDCLTQTQCITSITELQQEIRSPVTDSPTQPLLTQNCRLRVNPTVLESNKIEEIFKTTLLKFRNSNPTTRPYIPKQKNSTKLTKIVHFINTKILPNHISLDQEFLLTQTIIYCAAYTSATCNGSKIKDNTTTFTQNQTKVPPWQKRLQNKIQNLRQDIGRMTEHIKGNSSERVRRLVEKIKAKHQIHSQHEEPNLSNEHFLDTLKQKLNAATSRLKRYINCTLRKTQNSQFTNNEKQFYRQLASNTTQYTNKNTADSVTVPVVELHDFWSNIWSKPVLHNSQAEWLQTNSSLTISVKPMDFEQISVEIFANVLKKLHNWKAPGTDRIHNYWYKKFTALHPLLHKHINTFIQIPDLMPHYITEGLTYMIPKDTDFQNPAKYRPITCLQTIYKILTACVAEIIHQHASENSILAEEQKGCRKNSQGCKEQLVIDSVAMKLAISNKKNISTMYIDYKKAFDSVPHSWLLHVLQLYKIHPKIIDFLHNSMQHWNTTLNINGYSNTEIPKIPIRRGIFQGDALSPLWFCLALNPLSHMLNKSLLGYTVTTPQKQTNLTHLMYMDDIKLYGNNTESLHRLADITQSFSNDIHMEFGIDKCKTFSVVNGQIITNTYTLQTGETIEPLESHNSYKYLGFQQNRQIKQKETKHTLKQKFKHRINIILRSQLNSRNTIKAINSYAIPVLVYSFGIIRWSKTELTNLQRIINTTLTTYRKHHPRSCVQRITLPREEGGRGIIDVSNLHNKQINSLRQYFQQRSQHSILHEVVMLADKRFTPLNLADQNPQSNERIVEIKEKITLWQQKSLHGRHRHDLQQPTVDIIASNEWLRRGDLFPETEAFMIAIQDQVIDTRNYQKHIIRAQNLTSDACRRCHACPETIQHITSACKSLAQTDYKHRHDQVAAIVHQHLAHKHHFIDKKTPYYKYKPETVLENNNYKVYWDRTILTDKTIHFNRPDITLHDKIKKAVYLIDVAVPNTHNVQSTIAEKLTKYQDLAIELKRQWRAVNIHIVPIVISSTGIIPKSLQHSLDILEMPQHSLHLLQKAVLLNTCRLTRKFLTTSSVSSTYTIT

SEQ ID NO: 26244 - protein, 1363 aa, Spilarctia lutea
MVLTRSSTKRPQVPGGPSTSGGNDESHSVTEPRGAKNLRVGIGTRQTTQAIHKDSDNLSDTSLTPSPFHSFESPSSSPLSFASSTLSSALSEDVVQEAHAIAPAPTSGTNRTRKRWSQEINEFIWRTYLIATKLNTSKIYLNHLHHEFTQKYPQMQASKQRLGDQCRAIIRNNLLPQQTLDSIKGEVSSYLQQIQNTQIDCSTQAHNTNVQTQRRRWTTEYNESIIKNYYKITQLGSNRTAYRKPLYQAVIAEHPDLSEVSEQRISDQLRVIFNSKLISDRRQEEIRNEIANTLNIHITNPEDCLTQTQCITSITELQQEIRSPVTDSLTQPLLTQNCRLRVNPTVLESNKIEEIFKTTLLKFRNSNPTTRPYIPKQTNSTKLTKIVHFINTEILPNHISLDQEFLLTQTIIYCAAYTAATCNGSKIKDNTTTFTQNQTKVPPWQKRLQNKIQNLRQDIGRMTEHIKGNSSERVRRLVEKIKAKHQIHSQHEEPNLSNEHFLDTLKQKLNAATGRLKRYINCTLRKTQNSQFTNNEKQFYRQLASNTTQYTNKNTADSVTVPIVELHDFWSNIWSKPVLHNSQAEWLQTNSSLTISVKPMDFEQIPVEIFANVLKKLHNWKAPGTDRIHNYWYKKFTALHPLLHKHINTFIQIPELMPHYITEGLTYMIPKDTDFQNPAKYRPITCLQTIYKIHTACVAEIINQHASENSILAEEQKGCRKNSQGCKEQLVIDSVAMKLAISNKKNISTMYIDYKKAFDSVPHSWLLHVLQLYKIHPKIIDFLQNSMQHWNTTLNINGYSNTEIPKIPIRRGIFQGDALSPLWFCLALNPLSHMLNKSLLGYTVTTPQKQTNLTHLMYMDDIKLYGNNTESLHRLADITQSFSNDIHMEFGIDKCKTFSVVNGQIITNTYTLQTGETIEPLESHNSYKYLGFQQNRQIKQKETKHTLKQKFKHRINIILRSQLNSRNTIKAINSYAIPVLVYSFGIIRWSKTELTNLQRIINTTLTTYRKHHPRSCVQRITLPREEGGRGIIDVSNLHNKQINSLRQYFQQRSQHSILHEVVMLADKRFTPLNLADQNPQSNERIVEIKEKITLWQQKSLHGRHRHDLQQPTVDIVASNEWLRRGDLFPETEAFMIAIQDQVIDTRNYQKHIIRAQNLTSDACRRCHACPETIQHITSACKSLAQTDYKHRHDQVAAIVHQHLAHKHHFIDKKTPYYKYKPETVLENNNYKVYWDRTILTDKTIHFNRPDITLHDKIKKAVYLIDVAVPNTHNVQSTIAEKLTKYQDLAIELKRQWRAVNIHIVPIVISSTGIIPKSLQHSLEILEMPQHSLHLLQKAVLLNTCRLTRKFLTTSSVSSTYTIT

SEQ ID NO: 26245 - protein, 1363 aa, Spilarctia lutea
MVLTRSSTKRPQVPGGPSTSGGNDESHSVTEPRGAKNLRVGIGTRQTTQATHKDSDNLSDTSLTPSPFHSFESPSSSPLSFASSTLSSALSEDVVQEAHAITPAPTSGTNRTRKRWSQEINEFIWRTYLIATKLNTSKIYLNHLHHEFTQKYPQMQASKQRLGDQCRAIIRNNLLPQQTLDSIKGEVSSYLQQIQNTQIDCSTQAHNTNVQTQRRRWTTEYNESIIKNYYKITQLGSNRTAYRKPLYQAVIAEHPDLSEVSEQRISDQLRVIFNSKLISDRRQEEIRNEIANTLNIHITNPEDCLTQTQCITSITELQQEIRSPVTDSLTQPLLTQNWRLRVNPTVLESNKIEEIFKTTLLKFRNSNPTTRPYIPKQTNSTKLTKIVHFINTEILPNHISLDQEFLLTQTIIYCAAYTAATCNGSKIKDNTTTFTQNQTKVPPWQKRLQNKIQNLRQDIGRMTEHIKGNRSERVRRLVEKIKAKHQIHSQHEEPNLSNEHFLDTLKQKLNAATSRLKRYINCTLRKTQNSQFTNNEKQFYRQLASNTTQYTNKNTADSVTVPIVELHDFWSNIWSKPVLHNSQAKWLQTNSSLTISVKPMDFEQIPVEIFANVLKKLHNWKAPGTDRVHNYWYKKFTALHPLLHKHINTFIQIPELMPHYITEGLTYMIPKDTDFQNPTKYRPITCLQTIYKILTACVAEIIHQHASENSILAEEQKGCRKNSQGCKEQLVIDSVAMKLAISNKKNISTMYIDYKKAFDSVPHSWLLHVLQLYKIHPKIIDFLKNSMQHWNTTLNINGYSNTEIPKIPIRRGIFQGDALSPLWFCLALNPLSHMLNKSLLGYTVTTPQKQTNLTHLMYMDDIKLYGNNTESLHRLADITQSFSNDIHMEFGIDKCKTFSVVNGQIITNTYTLQTGETIEPLESHNSYKYLGFQQNRQIKQKETKHTLKQKFKHRINIILRSQLNSRNTIKAINSYAIPVLVYSFGIIRWSKTELTNLQRIINTTLTTYRKHHPRSCVQRITLPREEGGRGIIDVSNLHNKQINSLRQYFQQRSQHSILHEVVMLADKRFTPLNLADQNPQSNERIVEIKEKITLWQQKSLHGRHRHDLQQPTVDIVASNEWLRRGDLFPETEAFMIAIQDQVIDTRNYQKHIIRAQNLTSDACRRCHACPETIQHITSACKSLAQTDYKHRHDQVAAIVHQHLAHKHHFIDKKTSYYKYKPETVLENNNYKVYWDRTILTDKTIHFNRPDITLHDKIKKAVYLIDVAVPNTHNVQSTIAEKLTKYQDLAIELKRQWRAVNIHIVPIVISSTGIIPKSLQHSLEILEMPQHSLHLLQKAVLLNTCRLTRKFLTTSSVSSTYTIT

SEQ ID NO: 26246 - protein, 1363 aa, Spilarctia lutea
MVLTRSSTKRPQVPGGPSTSGGNDESHSVTEPRGAKNLRVGIGTRQTTQAIHKDSDNLSDTSLTPSPFHSFESPSSSPLSFASSTLSSALSEDVVQEAHAITPAPTSGTNRTRKRWSQEINEFIWRTYLIATKLNTSKIYLNHLHHEFTQKYPQMQASKQRLGDQCRAIIRNNLLPQQTLDSIKGEVSSYLQQIQNTQIDCSTQAHNTNVQTQRRRWTTEYNESVIKNYYKITQLGSNRTAYRKPLYQAVIAEHPDLSEVSEQRISDQLRVIFNSKLISDRRQEEIRNEIANTLNIHITNPEDCLTQTQCITSITELQQEIRSPVTDSLTQPLLTQNCRLRVNPTVLESNKIEEIFKTTLLKFRNSNPTTRPYIPKQTNSTKLTKIVHFINTEILPNHISLDQEFLLTQTIIYCAAYTAATCNGSKIKDNTTTFTQNQTKVPPWQKRLQNKIQNLRQDIGRMTEHIKRNSSERVRRLVEKIKAKHQIHSQHEEPNLSNEHFLDTLKQKLNAATSRLKRYINCTLRKTQNSQFTNNEKQFYRQLASNTTQYTNKNTADSVTVPIVELHDFWSNIWSKPVLHNSQAEWLQTNSSLTISVKPMDFEQIPVEIFANVLKKLHNWKAPGTDRIHNYWYKKFTALHPLLHKHINTFIQIPELMPHYITEGLTYMIPKDTDFQNPAKYRPITCLQTIYKILTACVAEIIHQHASENSILAEEQKGCRKNSQGCKEQLVIDSVAMKLAISNKKNISTMYIDYKKAFDSVPHSWLLHVLQLYKIHPKIIDFLQNSMQHWNTTLNINGYSNTEIPKIPIRRGIFQGDALSPLWFCLALNPLSHMLNKSLLGYTVTTPQKQTNLTHLMYMDDIKLYGNNTESLHRLADITQSFSNDIHMEFGIDKCKTFSVVNEQIITNTYTLQTGETIEPLESHNFYKYLGFQQNRQIKQKETKHTLKQKFKHRINIILRSQLNSRNTIKAINSYAIPVLVYSFGIIRWSKTELTNLQRIINTTLTTYRKHHPRSCVQRITLPREEGGRGIIDVPNLHNKQINSLRQYFQQRSQHSILHEVVMLADKRFTPLNLADQNPQSNERIVEIKEKITLWQQKSLHGRHRHDLQQPTVDIVASNEWLRRGDLFPETEAFMIAIQDQVIDTRNYQKHIIRAQNLTSDACRRCHACPETIQHITSACKSLAQTDYKHRHDQVAAIVHQHLAHKHHFIDKKTPYYKYKPKTVLENNNYKVYWDRTILTDKTIHFNRPDITLHDKIKKAVYLIDVAVPNTHNVQSTIAEKLTKYQDLAIELKRQWRAVNIHIVPIVISSTGIIPKSLQHSLEILEMPQHSLHLLQKAVLLNTCRLTRKFLTTSSVSSTYTIT

SEQ ID NO: 26247 - protein, 1366 aa, Spilarctia lutea
MVLTRSSTKRPQVPGAPSNSGGNDDSQPVTEPRGAKNLRVGRKTRQTTQAILTDSDNLSDASLTQSPFHSFESPSSSPLSFTSSTPSITESAMSEDVVQGARAVTPAPASDTNRTRKRWTREMNEFIWRTYLIATKLSTSKIYLNHLHHEFTQKYPQMQASKQRLGDQYRAIIRNKLLPQQTLDSIKHEVSIYLQQTQNTQINSSTHIHNTEAQTQRRRWTTEYNESIIKNYYKITQLGSNTTAYRKPLYQAVIAEHPDLSEVSEQRISDQLRVILNNKLISDQRQQEIRNDITTTFNLQNTNQANCSIQTQDMTSTTELQQEVHNPQTDLLTQPLLTQNYRVRFNSTVLEPTKIKEIFKTAILNFKYSEPTARPYIPKQKISSKLMKIIHFIDTEILPNHISLEQDFLLTQTIIYCAAYTAATCNGSKIKENISIVTQNQVKIPSWQKRLQNKIQNLRKDIGRMTEYIKGNRGERLTRLIEKIKDKHQIHSQHEEPNLNNDHFLDTLKQKLNAATSRIKRYVNCTLRKTQNNQFANNEKQFYRQLASNTTQYTNRNTQGSITVPVDELHEFWSNIWSKPVLHNSQAEWLQTDASLTNSITPMDFEQISVEVFVSVLKKLHNWKAPGTDRIHNYWYKKFTSCHLLLHKHINTFIQTPDIMPKYVTEGLTYMIPKDADIQNPAKYRPITCLQTIYKIFTSCIAEIIHRHVSENNILAEEQKGCRKSSQGCKEQLVIDSVTMKLAISKKKNISTMYIDYKKAFDSVPHSWLLHVLQLYKIHPKIIDFLQTSMQHWTTKLNIKGHSNTEVAKIPIRRGIFQGDALSPLWFCLALNPLSQMLNQSCLGYTITTPLKKTNLTHLMYMDDIKLYGNSTESLHRLADITQSFSNDIHMEFGIDKCKTFTVINGEITSNTFTLQSGEIIEPLGPHNSYKYLGFQQSRQINQKETKDTLKQKFKHRLNIILRSQLNSRHLVKAINSYAIPILIYSFGIINWPKTELTNLQRTINTTLTAHRKHHPRSCIQRMTLPRAEGGRGIIDVSNLHNRQIRSLRQYFQQQSQHSILHEVVTLADKRLTPLNLADQNPQCNECVFQLEEKIAKWQLKSLHGRHRQDLQQPHVDKFASNEWLRRGDLFPETEAFMIAIQDQVIDTRNYQKHIIRAQNLPTDSCRRCHACPETIQHITSACKCLVQTDYKHRHDQVATIVHQHLAHKHQFIDKKIPYYKYKPEIVLENKNLKIYWDRTIITDKTIHFNRPDITLHDKVNKTVYLIDIAVPNTHNIQSTIAEKLTKYQDLAIELKRQWQAVNIHIVPIVISATGIVPKSLHRSLDILEMPQHSLYLLQKAVLLNTCRLTRKFLTTSSSSSTYTIT

SEQ ID NO: 26248 - protein, 1366 aa, Spilarctia lutea
MVLTRSSTKRPQVPGGPSNSGGNDDSQPVTEPRGAKNLRVGRKTRQTTQAILTDSDNLSDASLTQSPFHSFESPSSSPLSFTSSTPSITESAMSEDVVQGARAVTPAPASDTNRTRKRWTREMNEFIWRTYLIATKLSTSKIYLNHLHHEFTQKYPQMQASKQRLGDQYRAIIRNKLLPQQTLDSIKHEVSIYLQQTQNTQINSSTHIHNTEAQTQRRRWTTEYNESIIKNYYKITQLGSNTTAYRKPLYQAVIAEHPDLSEVSEQRISDQLRVILNNKLISDQRQQEIRNDITTTFNLQNTNQANCSIQTQDMTSTTELQQEVHNPQTDLLTQPLLTQNYRVRFNSTVLEPTKIKEIFKTAILNFKYSEPTARPYIPKQKISSKLMKIIHFIDTEILPNHISLEQDFLLTQTIIYCAAYTAATCNGSKIKENISIVTQNQVKIPSWQKRLQNKIQNLRKDIGRMTEYIKGNRGERLTRLIEKIKDQHQIHSQHEEPNLNNDHFLDTLKQKLNAATSRLKRYVNCTLRKTQNNQFANNEKQFYRQLASNTTQYTNRNTQGSVTVPVDELHEFWSNIWSKPVLHNSQAEWLQTDASLTNSITPMDFEQISVEVFVSVLKKLHNWKAPGTDRIHNYWYKKFTSCHLLLHKHINTFIQTPDIMPKYVTEGLTYMIPKDADIQNPAKYRPITCLQTIYKIFTSCIAEIIHRHVSENNILAEEQKGCRKSSQGCKEQLVIDSVTMKLAISKKKNISTMYIDYKKAFDSVPHSWLLHVLQLYKIHPKIIDFLQTSMQHWTTKLNIKGHSNTEVAKIPIRRGIFQGDALSPLWFCLALNPLSQMLNQSCLGYTITTPLKKTNLTHLMYMDDIKLYGNSTESLHRLADITQSFSNDIHMEFGIDKCKTFTVINGEITSNTFTLQSGEIIEPLGPHNSYKYLGFQQSRQINQKETKDTLKQKFKHRLNIILRSQLNSRHLVKAINSYAIPILIYSFGIINWPKTELTNLQRTINTTLTAHRKHHPRSCIQRMTLPRAEGGRGIIDVSNLHNRQIRSLRQYFQQQSQHSILHEVVTLADKRLTPLNLADQNPQCNECVFQLEEKIAKWQLKSLHGRHRQDLQQPHVDKFASNEWLRRGDLFPETEAFMIAIQDQVIDTRNYQKHIIRAQNLPTDSCRRCHACPETIQHITSACKCLVQTDYKHRHDQVATIVHQHLAHKHQFIDKKIPYYKYKPEIVLENKNLKIYWDRTIITDKTIHFNRPDITLHDKVNKTVYLIDIAVPNTHNIQSTIAEKLTKYQDLAIELKRQWQAVNIHIVPIVISATGIVPKSLHRSLDILEMPQHSLYLLQKAVLLNTCRLTRKFLTTSSSSSTYTIT

SEQ ID NO: 26249 - protein, 1366 aa, Spilarctia lutea
MVLTRSSTKRPQVPGGPSNSGGNDDSQPVTEPRGAKNLRVGRKTRQTTQAILTDSDNLSDASLTQSPFHSFESPSSSPLSFTSSTPSITESAMSEDVVQGARAVTPAPASDTNRTRKRWTREMNEFIWRTYLIATKLSTSKIYLNHLHHEFTQKYPQMQASKQRLGDQYRAIIRNKLLPQQTLDSIKHEVSIYLQQTQNTQINSSTHIHNTEAQTQRRRWTTEYNESIIKNYYKITQLGSNTTAYRKPLYQAVIAEHPDLSEVSEQRISDQLRVILNNKLISDQRQQEIRNDITTTFNLQNTNQANCSIQTQDMTSTTELQQEVHNPQTDLLTQPLLTQNYRVRFNSTVLEPTKIKEIFKTAILNFKYSEPTARPYIPKQKISSKLMKIIHFIDTEILPNHISLEQDFLLTQTIIYCAAYTAATCNGSKIKENISIVTQNQVKIPSWQKRLQNKIQNLRKDIGRMTEYIKGNRGERLTRLIEKIKDKHQIHSQHEEPNLNNDHFLDTLKQKLNAATSRIKRYVNCTLRKTQNNQFANNEKQFYRQLASNTTQYTNRNTQGSVTVPVDELHEFWSNIWSKPVLHNSQAEWLQTDASLTNSITPMDFEQISVEVFVSVLKKLHNWKAPGTDRIHNYWYKKFTSCHLLLHKHINTFIQTPDIMPKYVTEGLTYMIPKDADIQNPAKYRPITCLQTIYKIFTSCIAEIIHRHVSENNILAEEQKGCRKSSQGCKEQLVIDSVTMKLAISKKKNISTMYIDYKKAFDSVPHSWLLHVLQLYKIHPKIIDFLQTSMQHWTTKLNIKGHSNTEVAKIPIRRGIFQGDALSPLWFCLALNPLSQMLNQSCLGYTITTPLKKTNLTHLMYMDDIKLYGNSTESLHRLADITQSFSNDIHMEFGIDKCKTFTVINGEITSNTFTLQSGEIIEPLGPHNSYKYLGFQQSRQINQKETKDTLKQKFKHRLNIILRSQLNSRHLVKAINSYAIPILIYSFGIINWPKTELTNLQRTINTTLTAHRKHHPRSCIQRMTLPRAEGGRGIIDVSNLHNRQIRSLRQYFQQQSQHSILHEVVTLADKRLTPLNLADQNPQCNECVFQLEEKIAKWQLKSLHGRHRQDLQQPHVDKFASNEWLRRGDLFPETEAFMIAIQDQVIDTRNYQKHIIRAQNLPTDSCRRCHACPETIQHITSACKCLVQTDYKHRHDQVATIVHQHLAHKHQFIDKKIPYYKYKPEIVLENKNLKIYWDRTIITDKTIHFNRPDITLHDKVNKTVYLIDIAVPNTHNIQSTIAEKLTKYQDLAIELKRQWQAVNIHIVPIVISATGIVPKSLHRSLDILEMPQHSLYLLQKAVLLNTCRLTRKFLTTSSSSSTYTIT

SEQ ID NO: 26250 - protein, 1366 aa, Spilarctia lutea
MVLTRSSTKRPQVPGGPSNSGGNDDSQPVTEPRGAKNLRVGRKTRQTTQAILTDSDNLSDASLTQSPFHSFESPSSSPLSFTSSTPSITESAMSEDVVQGARAVTPAPASDTNRTRKRWTREMNEFIWRTYLIATKLSTSKIYLNHLHHEFTQKYPQMQASKQRLGDQYRAIIRNKLLPQQTLDSIKHEVSIYLQQTQNTQINSSTHIHNTEAQTQRRRWTTEYNESIIKNYYKITQLGSNTTAYRKPLYQAVIAEHPDLSEVSEQRISDQLRVILNNKLISDQRQQEIRNDITTTFNLQNTNQANCSIQTQDMTSTTELQQEVHNPQTDLLTQPLLTQNYRVRFNSTVLEPTKIREIFKTAILNFKYSEPTAPPYIPKQKISTKLMKIIHFIDTEILPNHISLEQDFLLTQTIIYCAAYTAATCNGSKIKENISIVTQNQVKIPSWQKRLQNKIQNLRKDIGRMTEYIKGNRGERLTRLIEKIKDKHQIHSQHEEPNLNNDHFLDTLKQKLNAATSRLKRYVNCTLRKTQNNQFANNEKQFYRQLASNTTQYTNRNTQGSVTVPVDELHEFWSNIWSKPVLHNSQAEWLQTDASLTNSITPMDFEQISVEVFVSVLKKLHNWKAPGTDRIHNYWYKKFTSCHLLLHKHINTFIQTPDIMPKYVTEGLTYMIPKDADIQNPAKYRPITCLQTIYKIFTSCIAEIIHRHVSENNILAEEQKGCRKSSQGCKEQLVIDSVTMKLAISKKKNISTMYIDYKKAFDSVPHSWLLHVLQLYKIHPKIIDFLQTSMQHWTTKLNIKGHSNTEVAKIPIRRGIFQGDALSPLWFCLALNPLSQMLNQSCLGYTITTPLKKTNLTHLMYMDDIKLYGNSTESLHRLADITQSFSNDIHMEFGIDKCKTFTVINGEITSNTFTLQSGEIIEPLGPHNSYKYLGFQQSRQINQKETKDTLKQKFKHRLNIILRSQLNSRHLVKAINRYTIPILIYSFGIINWPKTELTNLQRTINTTLTAHRKHHPRSCIQRMTLPRAEGGRGIIDVSNLHNRQIRSLRQYFQQQSQHSILHEVVTLADKRLTPLNLADQNPQCNECVLQLEEKIAKWQLKSLHGRHRQDLQQPHVDKFASNEWLRRGDLFPETEAFMIAIQDQVIDTRNYQKHIIRAQNLPTDSCRRCHACPETIQHITSACKCLVQTDYKHRHDQVATIVHQHLAHKHQFIDKKIPYYKYKPEIVLENKNLKIYWDRTIITDKTIHFNRPDITLHDKVNKTVYLIDIAVPNTHNIQSTIAEKLTKYQDLAIELKRQWQAVNIHIVPIVISATGIVPKSLHRSLDILEMPQHSLYLLQKAVLLNTCRLTRKFLTTSSSSSTYTIT

SEQ ID NO: 26251 - protein, 1391 aa, Parnassius apollo
MVLTRSKRPQVLGGPSSSTGYDGSQPETGPRGAKNPRVTKATRRTTQATHTDSDMLSDIISSTPSPFHSFESSISSPRSYQTSTRSDSVSPMSEDVVQEAVATESAPAPDRNRARKRWTEEMNKFIWRTYLIATKLNTNKIYLDHLHKEFTNKYPQMQASRQRLGDQCRAIFRNKLLPQKTLDHIRNEVAVYLQQTHSNTNHIQTDSITQSHMQPHFSNQQGLTQRRRWTADQNESIVRNYYKITKLGENKSAYRRPLHQAVIEEHPELTGVSEQRISDQLRVILNNKMINDQRLQKIRENIASNRNSRRDNMENKSSHSSPETENSQEVDVHPFVIESNTPVHTLNLTLQPQPDESVISTQASEPQKKQAIENNDAENIQELFRIAIDKFRNTNPTKRPYIPKQKTSKRLAQIVDFINTKILPNHISREQDFETTQTIIYCVAYTVAIINGTKVKDINIIPTQSRNKEPAWQKRLKRKILDFRRDIGRLTEYTKGNRSNRLTTSVEAIKNKYRIHSQHEEPNLSDEQFLDTLKQKLNAASSRLKRYLNCTLRKSQNSQFINNEKQFYRSLTSDTQHDTNRNRQDAPLPPANELHSFWSGIWSIPVHHNTEAEWLKSDSEVTDSITPMAFEQIPLEVFVHILKKTHSWKAPGSDRIHNYWYKKLSTIHPLLHNHINDFIQKPDIMPRYITQGLTYMIPKDADHQNPAKFRPITCLQTIYKLLTACIAELLHQHIATNNILTEEQKGCRKSSQGCKEQLIIDSVAMKHAISKRKNINTMYIDYRKAFDSVPHSWLLHVLQHYKIHPQLIHFLEKSMQHWTTTLKTIGTSCIETSEIPIRRGIFQGDALSPVWFCLALNPLSQMLNKTNYGYSIITPHKHTTLTHLMYMDDIKLYSNTTQSLHRLADITQSFSNDIHMEFGIDKCKTFSVKNGKINPNSYSLVTGDTIEPLEPHASYKYLGFQQARQIHQKETKEGLKKKFKHRLNSIFRSQLNSRNMSKAINSYAIPILTYSFGIINWTQGDLINLQRIINTTLTTHRKHHPRSCVQRMTLSRSEGGRGIIDVLNLHNKQIKSLRQYFHQRSEHSLLHEIVTLADKRLTPLNLADRNTQRSERITDVKEKMASWQQKSLHGRHYHDLQLSHVDKKASNAWLRRGELFPETEAFMLAIQDQVIDTRNFQRHIIRAPNLPTDTCRHCHSSPENIQHITSACRALAQTDYKHRHDQVASIIHQYLALKFKFIQKMTPYYKYKPDTILENNNHRIYWDRTIITDKTIHFNRPDITVYDKNNKTTYLIDIAIPNTHNIQSTIAEKLTKYQDLAIELKRQWRTETIHIVPIVISSTGVIPKSLQRSLDILQVPQHTLHTLQKAVILNTCRLTRKFLITSSVTSAYTIT

SEQ ID NO: 26252 - protein, 764 aa, Parnassius apollo
MAFEQIPLEVFVHILKKTHSWKAPGSDRIHNYWYKKLSTIHPLLHNHINDFIQKPDIMPRYITQGLTYMIPKDADHQNPAKFRPITCLQTIYKLLTACIAELLHQHIATNNILTEEQKGCRKSSQGCKEQLIIDSVAMKHAISKRKNINTMYIDYRKAFDSVPHSWLLHVLQHYKIHPQLIHFLEKSMQHWTTTLKTIGTSCIETSEIPIRRGIFQGDALSPVWFCLALNPLSQMLNKTNYGYSIITPHKHTTLTHLMYMDDIKLYSNTTQSLHRLADITQSFSNDIHMEFGIDKCKTFSVKNGKINPNSYSLVTGDTIEPLEPHASYKYLGFQQARQIHQKETKEGLKKKFKHRLNSIFRSQLNSRNMSKAINSYAIPILTYSFGIINWTQGDLINLQRIINTTLTTHRKHHPRSCVQRMTLSRTEGGRGIIDVLNLHNKQIKSLRQYFHQRSEHSLLHKIVTLADKRLTPLNLADRNTQRSERITDVKEKMASWQQKSLHGRHYHDLQLSHVDKKASNAWLRRGELFPETEAFMLAIQDQVIDTRNFQRHIIRAPNLPTDTCRHCHSSPENIQHITSACRALAQTDYKHRHDQVASIIHQYLALKFKFIQKMTPYYKYKPDTILENNNHRIYWDRTIITDKTIHFNRPDITVYDKNNKTTYLIDIAIPNTHNIQSTIAEKLTKYQDLAIELKRQWRAETIHIVPIVISSTGVIPKSLQRSLDILQVPQHTLHTLQKAVILNTCRLTRKFLITSSVTSAYTIT

SEQ ID NO: 26253 - protein, 764 aa, Parnassius apollo
MAFEQIPLEVFVHILKKTHSWKAPGSDRIHNYWYKKLSTIHPLLHNHINDFIQKPDIMPRYITQGLTYMIPKDADHQNPAKFRPITCLQTIYKLLTACIAELLHQHIATNNILTEEQKGCRKSSQGCKEQLIIDSVAMKHAISKRKNINTMYIDYRKAFDSVPHSWLLHVLQHYKIHPQLIHFLEKSMQHWTTTLKTIGTSCIETSEIPIRRGIFQGDALSPVWFCLALNPLSQMLNKTNYGYSIITPHKHTTLTHLMYMDDIKLYSNTTQSLHRLADITQSFSNDIHMEFGIDKCKTFSVKNGKINPNSYSLVTGDTIEPLEPHASYKYLRSQQARQIHQKETKEGLKKKFKHRLNSIFRSQLNSRNMSKAINSYAIPILTYSFGIINWTQGDLINLQRIINTTLTTHRKHHPRSCVQRMTLSRSEGGRGIIDVLNLHNKQIKSLRQYFHQRSEHSLLHEIVTLADKRLTPLNLADRNTQRSERITDVKEKMASWQQKSLHGRHYHDLQLSHVDKKASNAWLRRGELFPETEAFMLAIQDQVIDTRNFQRHIIRAPNLPTNTCRHCHSSPENIQHITSACRALAQTDYKHRHDQVASIIHQYLALKFKFIQKMTPYYKYKPDTILENNNHRIYWDRTIITDKTIHFNRPDITVYDKNNKTTYLIDIAIPNTHNIQSTIAEKLTKYQDLAIELKRQWIAETIHIVPIVISSTGVIPKSLQRSLDILQVPQHTLHTLQKAVILNTCRLTRKFLITSSVTSAYTIT

SEQ ID NO: 26254 - protein, 1366 aa, Spilarctia lutea
MVLTRSSTKRPQVPGGPSNSGGNDDSQPVTEPRGAKNLRVGRKTRQTTQAILTDSDNLSDASLTQSPFHSFESPSSSPLSFTSSTPSITESAMSEDVVQGARAVTPAPASDTNRTRKRWTREMNEFIWRTYLIATKLSTSKIYLNHLHHEFTQKYPQMQASKQRLGDQYRAIIRNKLLPQQTLDSIKHEVSIYLQQTQNTQINSSTHIHNTEAQTQRRRWTTEYNESIIKNYYKITQLGSNTTAYRKPLYQAVIAEHPDLSEVSEQRISDQLRVILNNKLISDQRQQEIRNDITTTFNLQNTNQANCSIQTQDMTSTTELQQEVHNPQTDLLTQPLLTQNYRVRFNSTVLEPTKIREIFKTAILNFKYSEPTARPYIPKQKISTKLMKIIHFIDTEILPNHISLEQDFLLTQTIIYCAAYTAATCNGSKIKENISIVTQNQVKIPSWQKRLQNKIQNLRKDIGRMTEYIKGNRGERLTRLIEKIKDKHQIHSQHEEPNLNNDHFLDTLKQKLNAATSRLKRYVNCTLRKTQNNQFANNEKQFYRQLASNTTQYTNRNTQGSVTVPVDELHEFWSNIWSKPVLHNSQAEWLQTDASLTNSITPMDFEQISVEVFVSVLKKLHNWKAPGTDRIHNYWYKKFTSCHLLLHKHINTFIQTPDIMPKYVTEGLTYMIPKDADIQNPAKYRPITCLQTIYKIFTSCIAEIIHRHVSENNILAEEQKGCRKSSQGCKEQLVIDSVTMKLAISKKKNISTMYIDYKKAFDSVPHSWLLHVLQLYKIHPKIIDFLQTSMQHWTTKLNIKGHSNTEVAKIPIRRGIFQGDALSPLWFCLALNPLSQMLNQSCLGYTITTPLKKTNLTHLMYMDDIQLYGNSTESLHRLADITQSFSNDIHMEFGIDKCKTFTVINGEITSNTFTLQSGEIIEPLGPHNSYKYLGFQQSRQINQKETKDTLKQKFKHRLNIILRSQLNSRHLVKAINSYAIPILIYSFGIINWPKTELTNLQRTINTTLTAHRKHHPRSCIQRMTLPRAEGGRGIIDVSNLHNRQIRSLRQYFQQQSQHSILHEVVTLADKRLTPLNLADQNPQCNECVLQLEEKIAKWQLKSLHGRHRQDLQQPHVDKFASNEWLRRGDLFPETEAFMIAIQDQVIDTRNYQKHIIRAQNLPTDSCRRCHACPETIQHITSACKCLVQTDYKHRHDQVATIVHQHLAHKHQFIDKKIPYYKYKPEIVLENKNLKIYWDRTIITDKTIHFNRPDITLHDKVNKTVYLIDIAVPNTHNIQSTIAEKLTKYQDLAIELKRQWQAVNIHIVPIVISATGIVPKSLHRSLDILEMPQHSLYLLQKAVLLNTCRLTRKFLTTSSSSSTYTIT

SEQ ID NO: 26255 - protein, 1360 aa, Spilarctia lutea
MVLTRSSTKRPQVPGGPSNSGGNDDSQPVTELRVGRKTRQTTQAILTDSDNLSDASLTQSPFHSFESPSSSPLSFTSSTPSITESAMSEDVVQGARAVTPAPASDTNRTRKRWTREMNEFIWRTYLIATKLSTSKIYLNHLHHEFTQKYPQMQASKQRLGDQYRAIIRNKLLPQQTLDSIKHEVSIYLQQTQNTQINSSTHIHNTEAQTQRRRWTTEYNESIIKNYYKITQLGSNRTAYRKPLYQAVIAEHPDLSEVSEQRISDQLRVILNNKLISDQRQQEIRNDITTTFNLQNTNQANCSIQTQDMTSTTELQQEVHNPQTDLLTQPLLTQNYRVRFNSTVLEPTKIKEIFETAILNFKYSEPTARPYIPKQKISTKLMKIIHFIDTEILPNHISLEQDFLLTQTIIYCAAYTAATCNGSKIKENISIVTQNQVKIPSWQKRLQNKIQNLRKDIGRMTEYIKGNRGERLTRLIEKIKDKHQIHSQHEEPNLNNDHFLDTLKQKLNAATSRLKRYVNCTLRKTQNNQFANNEKQFYRQLASNTTQYTNRNTQGSVTVPVDELHEFWSNIWSKPVLHNSQAEWLQTDASLTNSITPMDFEQISVEVFVSVLKKLHNWKAPGTDRIHNYWYKKFTSCHLLLHKHINTFIQTPDIMPKYVTEGLTYMIPKDADIQNPAKYRPITCLQTIYKIFTSCIAEIIHRHVSENNILAEEQKGCRKSSQGCKEQLVIDSVTMKLAISKKKNISTMYIDYKKAFDSVPHSWLLHVLQLYKIHPKIIDFLQTSMQHWTTKLNIKGHSNTEVAKIPIRRGIFQGDALSPLWFCLALNPLSQMLNKSCLGYTITTPLKKTNLTHLMYMDDIKLYGNSTESLHRLADITQSFSNDIHMEFGIDKCKTFTVINGEITSNTFTLQSGVIIEPLGPHNSYKYLGFQQSRQINQKENKDTLKQKFKHRLNIILRSQLNSRHLVKAINSYAIPILIYCFGIINWPKTELTNLQRTINTTLTAHRKHHPRSCIQRMTLPRAEGGRGIIDVSNLHNRQIRSLRQYFQQQSQHSILHEVVTLADKRLTPLNLADQNPQCNECVFQLEEKIAKWQLKSLHGRHRQDLQQPHVDKFASNEWLRRGDLFPETEAFMIAIQDQVIDTRNYQKHIIRAQNLPTDSCRRCYACPETIQHITSVCKCLVQTDYKHRHDQVATIVYQHLAHKHQFIDKKIPYYKYKPEIVLENKNLKIYWDRTIITDKTIHFNRPDITLHDKVNKTVYLIDIAVPNTHNIQSTIAEKLTKYQDLAIELKRQWQAVNIHIVPIVISATGIIPKSLHRSLDILEMPQHSLYLLQKAVLLNTCRLTRKFLTTSSSSSTYTIT

SEQ ID NO: 26256 - protein, 1366 aa, Spilarctia lutea
MVLTRSSTKRPQVPGGPSNSGGNDDSQPVTEPRGAKNLRVGRKTRQTTQAILTDSDNLSDVSLTQSPFHSFESPSSSPLSFTSSTPSITESAMPEDVVQGARAVTPAPASDTNRTRKRWTREMNEFIWRTYLIATKLSTRKIYLNHLHHEFTQKYPQMQASKQRLGDQYRAIIRNKLLPQQTLDSIKHEVSIYLQQTQNTQINSSTHIHNTEAQTQRRRWTTEYNESIIKNYYKITQLGSNTTAYRKPLYQAVIAEHPDLSEVSEQRISDQLRVILNNKLISDQRQQEIRNDITTTFNLQNTNQANCSIQTQDMTSTTELQQEVHNPQTDLLTQPLLTQNYRVRFNSTVLEPTKIKEIFKTAILNFKYSEPTARPYIPKQKISTKLMKIIHFIDTEILPNHISLEQDFLLTQTIIYCAAYTAATCNGSKIKENISIVTQNQVKIPSWQKRLQNKIQNLRKDIGRMTEYIKGNRGERLTRLIEKIKDKHQIHSQHEEPNLNNDHFLDTLKQKLNAATSRLKRYVNCTLRKTQNNQFANNEKQFYRQLASNTTQYTNRNTQGSVTVPVDELHEFWSNIWSKPVLHNSQAEWLQTDVSLTNSITPMDFEQISVEVFASVLKKLHNWKAPGTDRIHNYWYKKFTSCHLLLHKHINTFIQTPDIMPKYVTEGLTYMIPKDADIQNPAKYRPITCLQTIYKIFTSCIAEIIHRHVSENNILAEEQKGCRKSSQGCKEQLVIDSVTMKLAISKKKNISTMYIDYKKAFDSVPHSWLLHVLQLYKIHPKIIDFLQTSMQHWTTKLNIKGHSNTEVAKIPIRRGIFQGDALSPLWFCLALNPLSQMLNKSCLGYTITTPLKKTNLTHLMYMDDIKLYGNSTESLHRLADITQSFSNDIHMEFGIDKCKTFTVINGEITSNTFTLQSGEIIEPLGPHNSYKYLGFQQSRQINQKETKDTLKQKFKHRLNIILRSQLNSRHLVKAINSYAIPILIYSFGIINWPKTELTNLQRTINTTLTAHRKHHPRSCIQRMTLPRAEGGRGIIDVSNLHNRQIRSLRQYFQQQSQHSILHEVVTLADKRLTPLNLADQNPQCNECVFQLEAKIAKWQLKSLHGRHRQDLQQPHVDKFASNEWLRRGDLFPETEAFMIAIQDQVIDTRNYQKHIIRAQNLPTDSCRRCHACPETIQHITSACKCLVQTDYKHRHDQVATIVHQHLAHKHQFIDKKIPYYKYKPEIVLENKNLKIYWDRTIITDKTIHFNRPDITLHDKVNKTVYLIDIAVPNTHNIQSTIAEKLTKYQDLAIELKRQWQAVNIHIVPIVISATGIVPKSLHRSLDILEMPQHSLYLLQKAVLLNTCRLTRKFLTTSSSSSTYTIT

SEQ ID NO: 26257 - protein, 902 aa, Spilarctia lutea
MTEYIKGNRGERLTRLIEKIKDKHQIHSQHEEPNVNNDHFLDTLKQKLNAATSRLKRYVNCTLRKTQNNQFANNEKQFYRQLASNTTQYTNRNTQGSVTVPVDELHEFWSNIWSKPVLHNSQAEWLQTDASLTNSITPMDFEQISVEVFVSVLKKLHNWKAPGTDRIHNYWYKKFTSCHLLLHKHINTFIQTPDIMPKYVTEGLTYMIPKDADIQNPAKYRPITCLQTIYKIFTSCIAEIIHRHVSENNILAEEQKGCRKSSQGCKEQLVIDSVTMKLAISKKKNISTMYIDYKKAFDSVPHSWLLHVLQLYKIHPKIIDFLQTSMQHWTTKLNIKGHSNTEVAKIPIRRGIFQGDALSPLWFCLALNPLSQMLNQSCLGYTITTPLKKTNLTHLMYMDDIKLYGNSTESLHRLADITQSFSNDIHMEFGIDKCKTFTVINGEITSNTFTLQSGEIIEPLGPHNSYKYLGFQQSRQMNQKETKDTLKQKFKHRLNIILRSQLNSRHLVKAINSYAIPILIYSFGIINWPKTELTNLQRTINTTLTAHRKHHPRSCIQRMTLPRAEGGRGIIDVSNLHNRQIRSLRQYFQQQSQHSILHEVVTLADKRLTPLNLADQNPQFNECVFQLEEKIAKWQLKSLHGRHRQDLQQPHVDKFASNEWLRRGDLFPETEAFMIAIQDQVIDTRNYQKHIIRAQNLPTDSCRRCHACPETIQHITSACKCLVQTDYKHRHDQVATIVHQHLAHKHQFIDKKIPYYKYKPEIVLENKNLKIYWDRTIITDKTIHFNRPDITLHDKVNKTVYLIDIAVPNTHNIQSTIAEKLTKYQDLAIELKRQWQAVNIHIVPIVISATGIVPKSLHRSLDILEMPQHSLYLLQKAVLLNTCRLTRKFLTTSSSSSTYTIT

SEQ ID NO: 26258 - protein, 1366 aa, Spilarctia lutea
MVLTRSSTKRPQVPGGPSNSGGNDDSQPVTEPRGAKNLRVGRKTRQTTQAILTDSDNLSDASLTQSPFHSFESTSSSPLSFTSSTPSITESAMSEDVVQGARAVTPAPASDTNRTRKRWTREMNEFIWRTYLIATKLSTSKIYLNHLHHEFTQKYPQMQASKQRLGDQYRAIIRNKLLPQQTLDSIKHEVSIYLQQTQNTQINSSTHIHNTEAQTQRRRWTTEYNESIIKNYYKITQLGSNTTAYRKPLYQAVIAEHPDLSEVSEQRISDQLRVILNNKLISDQRQQEIRNDITTTFNLQNTNQANCSIQTQDMTSTTELQQEVHNPQTDLLTQPLLTQNYRVRFNSTVLEPTKIKEIFKTAILNFKYSEPTARPYIPKQKISTKLMKIIHFIDTEILPNHISLEQDFLLTQTIIYCAAYTAATCNGSKIKENISIVTQNQVKIPSWQKRLQNKIQNLRKDIGRMTEYIKGNRGERLTRLIEKIKDKHQIHSQHEEPNLNNDHFLDTLKQKLNAATSRLKRYVNCTLRKTQNNQFANNEKQFYRQLASNTTQYTNRNTQGSVTVPVDELHEFWSNIWSKPVLHNSQAEWLQTDASLTNSITPMDFEQISVEVFVSVLKKLHNWKAPGTDRIHNYWYKKFTSCHLLLHKHINTFIQTPDIMPKYVTEGLTYMIPKDADIQNPAKYRPITCLQTIYKIFTSCIAEIIHRHVSENNILAEEQKGCRKSSQGCKEQLVIDSVTMKLAISKKKNISTMYIDYKKAFDSVPHSWLLHVLQLYKIHPKIIDFLQTSMQHWTTKLNIKGHSNTEVAKIPIRRGIFQGDALSPLWFCLALNPLSQMLNKSCLGYTITTPLKKTNLTHLMYMDDIKLYGNSTESLHRLADITQSFSNDIHMEFGIDKCKTFTVINGEITSNTFTLQSGEIIEPLGPHNSYKYLGFQQSRQINQKETKDTLKQKFKHRLNIILRSQLNSRHLVKAINSYAIPILIYSFGIINWPKTELTNLQRTINTTLTAHRKHHPRSCIQRMTLPRAEGGRGIIDVSNLHNRQIRSLRQYFQQQSQHSILHEVVTLADKRLTPLNLADQNPQCNECVFQLEEKIAKWQLKSLHGRHRQDLQQPHVDKFASNEWLRRGNLFPETEAFMIAIQDQVIDTRNYQKHIIRAQNLLTDSCRRCHACPETIQHITSACKCLVQTDYKHRHDQVATIVHQHLAHKHQFIDKKIPYYKYKPEIVLENKNLKIYWDRTIITDKTIHFNRPDITLHDKVNKTVYLIDIAVPNTHNIQSTIAEKLTKYQDLAIELKRQWQAVNIHIVPIVISATGIIPKSLHRSLDILEMPQHSLYLLQKAVLLNTCRLTRKFLTTSSSSSTYTIT

SEQ ID NO: 26259 - protein, 1364 aa, Spilarctia lutea
MVLTRSSTKRPQVPGGPSNSGGNDDSQPVTEPRGAKNLRVGRKTRQTTQAILTDSDNLSDAPLTQSPFHSFESPSSSPLSFTSSTLSITESAMSEDVAQGARAVTPAPASDTNRTRKRWTREMNEFIWRTYLIATKLSTSKIYLNHLHHEFTQKYPQMQASKQRLGDQYRAIIRNKLLPQQTLDSIKHEVSIYLQQTQNTQINYSTHIHNTEAQTQRRRWTTEYNESIIKNYYKITQLGSNRTAYRKPLYQAVIAEHPDLSEVSGQRVSDQLRVILNNKLISDQRQQEIRNDITTTFNLQNTNQANCSIQTQDMTSTTELQQEVHNPQTDLLTQPLLTQNYRVRFNSTVLEPTKIKEIFKTAILNFKYSEPTARPYIPKEKISTKLMKIIHFIDTEILPNHISLEQDFLLTQTIIYCAAYTAATCNGSKIKENISIVTQNQVKIPSWQKRLQNKIQNLRKDIGRMTEYIKGNRGERFTRLIEKIKDKHQIHSQHEEPNLNNDHFLDTLKQKLNAATSRLKRYVNCTLRKTQNNQFANNEKQFYRQLASNTTQYTNRNTQGSVTVPVDELHEFWSNIWSKPVLHNSQAEWLQTDASLTNSITPMDFEQISVEVFVSVLKKLHNWKAPGTDRIHNYWYKKFTSCHLLLHKHINTFIQTPDIMPKYVTEGLTYMIPKDADIQNPAKYRPITCFQTIYKIFTSCIAEIIYRHVSENNILAEEQKGCRKSSQGCKEQLVIDSVTMKLAISKKKNISTMYIDYKKAFDSVPHSWLLHVLQLYKIHPKIIDFLQTSMQHWTTKLNIKGHSNTEVTKIPIRRGIFQGDALSPLWFCLALNPLSQMLNKSCLGYTITTPLKKTNLTHLMYMDDIKLYGNSTESLHRLADITQSFSNDIHMEFGIDKCKTFTVINGKITSNTFTLQSGEIIEPLGPHNSYKYLGFQQSRQINQKETKDTLKQKFKHRLNIILRSQLNSRHLVKAINSYAIPILIYSFGIINWPKTELTNLQRTINTTLTAHRKHHPRSCIQRMTLPRAEGGRGIIDVSNLHNRQIRSLRQYFQQQSQHSILHEVVTLADKRLTPLNLADQNPQCNECVFQLEEKISKWQLKSLHGRHRQDLQQPHVDKFASNEWLRRGDLFPETEAFMIAIQDQVIDTRNYQKHIIRAQNLPTDSCRRCHACPETIQHITSACKCLVQTDYKHRHDQVATIVHQHLAHKHQFIDIPYYKYKPEIVLENKNLKIYWDRTIITDKTIHFNRPDITLHDKVNKTVYLIDIAVPNTHNIQSTIAEKLTKYQDLAIELKRQWQAVNIHIVPIVISATGIIPKSLHRSLDILEMPQHSLYLLQKAVLLNTCRLTRKFLTKSSSSSTYTIT

SEQ ID NO: 26260 - protein, 1366 aa, Spilarctia lutea
MVLTRSSTKRPQVPGGPSNSGGNDDSQPVTEPRGAKNLRVGRKTRQTTQAILTDSDNLSDVSLTQSPFHSFESPSSSPLSLTSSTPSITESAMFEDVVQGARAVTPAPASDTNRTRKRWTREMNEFIWRTYLIATKLSTSKIYLNHLHHEFTQKYPQMQASKQRLGDQYRAIIRNKLLPQQTLDSIKHEVSIYLQQTQNTQINSSTHIHNTEAQTQRRRWTTEYNESIIKNYYKITQLGSNTTAYRKPLYQAVIAEHPDLSEVSEQRISDQLRVILNNKLISDQRQQEIRNDITTTFNLQNTNQANCSIQTQDMTSTTELQQEVHNPQTDLLTQPLLTQNYRVRFNSTVLEPTKIKEIFKTAILNFKYSEPTARPYIPKQKISTKLMKIIHFIDTEILPNHISLEQDFLLTQTIIYCAAYTAATCNGSKIKENISIVTQNQVKIPSWQKRLQNKIQNLRKDIGRMTEYIKGNRGERLTRLIEKIKDKHQIHSQHEEPNLNNDHFLDTLKQKLNAATSRLKRYVNCTLRKTQNNQFANNEKQFYRQLASNTTQYTNRNTQGSVTVPVDELHEFWSNIWSKPVLHNSQAEWLQTDASLTNSITPMDFEQISVEVFVSVLKKLHNWKAPGTDRIHNYWYKKFTSCHLLLHKYINTFIQTPDIMPKYVTEGLTYMIPKDADIQNPAKYRPITCLQTIYKIFTSCIAEIIHRHVSENNILAEEQKGCRKSSQGCKEQLVIDSVTMKLAISKKKNISTMYIDYKKAFDSVPHSWLLHVLQLYKIHPKIIDFLQTSMQHWTTKLNIKGHSNTEVAKIPIRRGIFQGDALSPLWFCLALNPLSQMLNKSCLGYTITTPLKKTNLTHLMYMDDIKLYGNSTESLHRLADITQSFSNDIHMEFGIDKCKTFTVINGEITSNTFTLQSGEIIEPLGPHNSYKYLGFQQSRQINQKETKDTLKQKFKHRLNIILRSQLNSRHLVKAINSYAIPILIYSFGIINWPKTELTNLQRTINTTLTAHRKHHPRSCIQRMTLPRAEGGRDIIDVSNLHNRQIRSLRQYFQQQSQHSILHEVVTLADKRLTPLNLADQNPQCNECVFQLEAKIAKWQLKSLHGRHRQDLQQPHVDKFASNEWLRRGDLFPETEAFMIAIQDQVIDTRNYQKHIIRAQNLPTDSCRRCHACPETIQHITSACKCLVQTDYKHRHDQVATIVHQHLAHKHQFIDKKIPYYKYKPEIVLENKNLKIYWDRTIITDKTIHFNRPDITLHDKVNKTVYLIDIAVPNTHNIQSTIAEKLTKYQDLAIELKRQWQAVNIHIVPIVISATGIVPKSLHRSLDILEMPQHSLYLLQKAVLLNTCRLTRKFLTTSSSSSTYTIT

SEQ ID NO: 26261 - protein, 764 aa, Spilarctia lutea
MDFEQISVEVFVSVLKKLHNWKAPGTDRIHNYWYKKFTSCHLLLHKHINTFIQTPDIMPKYVTEGHTYMIPKDADIQNPAKYRPITCLQTIYKIFTSCIAEIIHRHVNENNILAEEQKGCRKSSQGCKEQLVIDSVTMKLAISKKKNISTMYIDYKKAFDSVPHSWLLHVLQLYKIHPKIIDFLQTSMQHWTTKLNIKGHSNTEVAKIPIRRGIFQGDALSPLWFCLALNPLSQMLNKSCLGYTITTPLKKTNLTHLMYMDDIKLYGNSTESLHRLADITQSFSNDIHMEFGIDKCKTFTVINGEITSNTFTLQSGEIIEPLGPHNSYKYLGFQQSRQINQKETKDTLKQKFKHRLNIILRSQLNSRHLVKAINSYAIPILIYSFGIINWPKTELTNLQRTINTTLTAHRKHHPRSCIQRMTLPRAEGGRGIIDVSNLHNRQIRSLRQYFQQQSQHSILHEVVTLADKRLTPLNLADQNPQCNECVFQLEEKIAKWQLKSLHGRHRQDLQQPHVDKFASNEWLRRGDLFPETEAFMIAIQDQVIDTRNYQKHIIRAQNLPTDSCRRCHACPETIQHITSACKCLVQTDYKHRHDQVATIVHQHLAHKHQFIDKKIPYYKYKPEIVLENKNLKIYWDRTIITDKTIHFNRPDITLHDKVNKTVYLIDIAVPNTHNIQSTIAEKLTKYQDLAIELKRQWQAVNIHIVPIVISATGIVPKSLHRSLDILEMPQHSLYLLQKAVLLNTCRLTRKFLTTSSSSSTYTIT

SEQ ID NO: 26262 - protein, 1366 aa, Spilarctia lutea
MVLTRSSTKRPQVPGGPSNSGGNDDSQPVTEPRGAKNLRVGRKTRQTTQAILTDSDNLSDASLTQSPFHSFESPSSSPLSFTSSTPSITESAMSEDVVQGARAVTPAPASDTNRTRKRWTREMNEFIWRTYLIATKLSTSKIYLNHLHHEFTQKYPQMQASKQRLGDQYRAIIRNKLLPQQTLDSIKHEVSIYLQQTQNTQINSSTHIHNTEAQTQRRRWTTEYNESIIKNYYKITQLGSNRTAYRKPLYQAVIAEHPDLSEVSEQRISDQLRVILNNKLISDQRQQEIRNDITTTFNLQNTNQANCSIQTQDMTSTTELQQEVHNPQTDLLTQPLLTQNYRVRFNSTVLEPTKIKEIFETAILNFKYSEPTARPYIPKQKISTKLMKIIHFIDTEILPNHISLEQDFLLTQTIIYCAAYTAATCNGSKIKENISIVTQNQVKIPSWQKRLQNKIQNLRKDIGRMTEYIKGNRGERLTRLIEKIKDKHQIHSQHEEPNLNNDHFLDTLKQKLNAATSRLKRYVNCTLRKTQNNQFANNEKQFYRQLASNTTQYTNRNTQGSVTVPVDELHEFWSNIWSKPVLHNSQAEWLQTDASLTNSITPMDFEQISVEVFVSVLKKLHNWKAPGTDRIHNYWYKKFTSCHLLLHKHINTFIQTPDIMPKYVTEGLTYMIPKDADIQNPAKYRPITCLQTIYKIFTSCIAEIIHRHVSENNILAEEQKGCRKSSQGCKEQLVIDSVTMKLAISKKKNISTMYIDYKKAFDSVPHSWLLHVLQLYKIHPKIIDFLQTSMQHWTTKLNIKGHSNTEVAKIPIRRGIFQGDALSPLWFCLALNPLSQMLNKSCLGYTITTPLKKTNLTHLMYMDDIKLYGNSTESLHRLADITQSFSNDIHMEFGIDKCKTFTVINGEITSNTFTLQSGVIIEPLGPHNSYKYLGFQQSRQINQKETKDTLKQKFKHRLNIILRSQLNSRHLVKAINSYAIPILIYCFGIINWPKTELTNLQRTINTTLTAHRKHHPRSCIQRMTLPRAEGGRGIIDVSNLHNRQIRSLRQYFQQQSQHSILHEVVTLADKRLTPLNLADQNPQCNECVFQLEEKIAKWQLKSLHGRHRQDLQQPHVDKFASNEWLRRGDLFPETEAFMIAIQDQVIDTRNYQKHIIRAQNLPTDSCRRCYACPETIQHITSACKCLVQTDYKHRHDQVATIVHQHLAHKHQFIDKKIPYYKYKPEIVLENKNLKIYWDRTIITDKTIHFNRPDITLHDKVNKTVYLIDIAVPNTHNIQSTIAEKLTKYQDLAIELKRQWQAVNIHIVPIVISATGIIPKSLHRSLDILEMPQHSLYLLQKAVLLNTCRLTRKFLTTSSSSSTYTIT

SEQ ID NO: 26263 - protein, 902 aa, Spilarctia lutea
MTEYIKGNRGERLKRLIEKIKDKHQIHSQHEEPNLNNDHFLDTLKQKLNAATSRLKRYVNCTLRKTQNNQFANNEKQFYRQLASNTTQYTNRNTQGSVTVPVDELHEFWSNIWSKPVLHNSQAEWLQTDASLTNSITPMDFEQISVEVFVSVLKKLHNWKAPGTDRIHNYWYKKFTSCHLLLHKHINTFIQTPDIMPKYVTEGLTYMIPKDADIQNPAKYRPITCLQTIYKIFTSCIAEIIHRHVSENNILAEEQKGCRKSSQGCKEQLVIDSVTMKLAISKKKNISTMYIDYKKAFDSVPHSWLLHVLQLYKIHPKIIDFLQTSMQHWTTKLNIKGHSNTEVAKIPIRRGIFQGDALSPLWFCLALNPLSQMLNKSCLGYTIRTPLKKTNLTHLMYMDDIKLYGNSTESLHRLADITQSFSNDIHMEFGIDKCKTFTVINGEITSNTFTLQSGEIIEPLGPHNSYKYLGFQQSRQINQKETKDTLKQKFKHRLNIILRSQLNSRHIVKAINSYAIPILIYSFGIINWPKTELTNLQRTINTTLTAHRKHHPRSCIQRMTLPRAEGGRGIIDVSNLHNRQIRSLRQYFQQQSQHSILHEVVTLADKRLTPLNLADQNPQCNECVFQLEEKIAKWQLKSLHGRHRQDLQQPHVDKFASNEWLRRGDLFPETEAFMIAIQDQVIDTRNYQKHIIRAQNLLTDSCRRCHACPETIQHITSACKCLVQTDYKHRHDQVATIVHQHLAHKHQFIDKKIPYYKYKPEIVLENKNLKIYWDRTIITDKTIHFNRPDITLHDKVNKTVYLIDIAVPNTHNIQSTIAEKLTKYQDLAIELKRQWQAVNIHIVPIVISATGIIPKSLHRSLDILEMPQHSLYLLQKAVLLNTCRLTRKFLTTSSSSSTYTIT

SEQ ID NO: 26264 - protein, 1366 aa, Spilarctia lutea
MVLTRSSTKRPQVPGGPSNSGGNDDSQPVTEPRGAKNLRVGRKTRQTTQAILTDSDNLSDVSLTQSPFHSFESPSSSPLSFTSSTPSITESAMSEDVVQGARAVTPAPASDTNRTRKRWTREMNEFIWRTYLIATKLSTSKIYLNHLHHEFTQKYPQMQASKQRLGDQYRAIIRNKLLPQQTLDSIKHEVSIYLQQTQNTQINSSTHIHNTEAQTQRRRWTTEYNESIIKNYYKITQLGSNTTAYRKPLYQAVIAEHPDLSEVSEQRISDQLRVILNNKLISDQRQQEIRNDITTTFNLQNTNQANCSIQTQDMTSTTELQQEVHNPQTDLLTQPLLTQNYRVRFNSTVLEPTKIKEIFKTAILNFKYSEPTARPYIPKQKISTKLMKIIHFIDTEILPNHISLEQDFLLTQTIIYCAAYTAATCNGSKIKENISIVTQNQVKIPSWQKRLQNKIQNLRKDIGRMTEYIKGNRGERLTRLIEKIKDKHQIHSQHEEPNLNNDHFLDTLKQKLNAATSRLKRYVNCTLRKTQNNQFANNEKQFYRQLASNTTQYTNRNTQGSVTVPVDELHEFWSNIWSKPVLHNSQAEWLQTDASLTNSITPMDFEQISVEVFVSVLKKLHNWKAPGTDRIHNYWYKKFTSCHLLLHKHINTFIQTPDIMPKYVTEGLTYMIPKDADIQNPAKYRPITCLQTIYKIFTSCIAEIIHRHVSENNILAEEQKGCRKSSQGCKEQLVIDSVTMKLAISKKKNISTMYIDYKKAFDSVPHSWLLHVLQLYKIHPKIIDFLQTSMQHWTTKLNIKGHSNTEVAKIPIRRGIFQGDALSPLWFCLALNPLSQMLNKSCLGYTITTPLKKTNLTHLMYMDDIKLYGNSTESLHRLADITQSFSNDIHMEFGIDKCKTFTVINGEITSNTFTLQSGEIIEPLGPHNSYKYLGFQQSRQINQKETKDTLKQKFKHRLNIILRSQLNSRHLVKAINSYAIPILIYSFGIINWPKTELTNLQRTINTTLTAHRKHHPRSCIQRMTLPRAEGGRGIIDVSNLHNRQIRSLRQYFQQQSQHSILHEVVTLADKRLTPLNLADQNPQCNECVFQLEAKIAKWQLKSLHGRHRQDLQQPHVDKFASNEWLRRGDLFPETEAFMIAIQDQVIDTRNYQKHIIRAQNLPTDSCRRCHACPETIQHITSACKCLVQTDYKHRHDQVATIVHQHLAHKHQFIDKKIPYYKYKPEIVLENKNLKIYWDRTIITDKTIHFNRPDITLHDKVNKTVYLIDIAVPNTHNIQSTIAEKLTKYQDLAIELKRQWQAVNIHIVPIVISATGIVPKSLHRSLDILEMPQHSLYLLQKAVLLNTCRLTRKFLTTSSSSSTYTIT

SEQ ID NO: 26265 - protein, 1098 aa, Spilarctia lutea
MIYILIYIYNKLISDQRQQEIRNDITTTFNLQNTNQANCSIQTQDMTSTTELQQEVHNPQTDLLTQPLLTQNYRVRFNSTVLEPTKIKEIFKTAILNFKYSEPTARPYIPKQKISTKLMKIIHFIDTEILPNHISLEQDFLLTQTIIYCAAYTAATCNGSKIKENISIVTQNQVKIPSWQKRLQNKIQNLRKDIGRMTEYIKGNRGERLTRLIEKIKDKHQIHSQHEEPNLNNDHFLDTLKQKLNAATSRLKRYVNCTLRKTQNNQFANNEKQFYRQLASNTTQYTNRNTQGSVTVPVDELHEFWSNIWSKPVLHNSQAEWLQTDASLTNSITPMDFEQISVEVFVSVLKKLHNWKAPGTDRIHNYWYKKFTSCHLLLHKHINTFIQTPDIMPKYVTEGLTYMIPKDADIQNPAKYRPITCLQTIYKIFTSCIAEIIHRHVSENNILAEEQKGCRKSSQGCKEQLVIDSVTMKLAISKKKNISTMYIDYKKAFDSVPHSWLLHVLQLYKIHPKIIDFLQTSMQHWTTKLNIKGHSNTEVAKIPIRRGIFQGDALSPLWFCLALNPLSQMLNKSCLGYTITTPLKKTNLTHLMYMDDIKLYGNSTESLHRLADITQSFSNDIHMEFGIDKCKTFTVINGEITSNTFTLQSGEIIEPLGPHNSYKYLGFQQSRQINQKETKDTLKQKFKHRLNIILRSQLNSRHLVKAINSYAIPILIYSFGIINWPKTELTNLQRTINTTLTAHRKHHPRSCIQRMTLPRAEGGRGIIDVSNLHNRQIRSLRQYFQQQSQHSILHEVVTLADKRLTPLNLADQNPQCNECVFQLEEKIAKWQLKSLHGRHRQDLQQPHVDKFASNEWLRRGDLFPETEAFMIAIQDQVIDTRNYQKHIIRAQNLPTDSCRRCHACPETIQHITSACKCLVQTDYKHRHDQVATIVHQHLAHKHQFIDKKIPYYKYKPEIVLENKNLKIYWDRTIITDKTIHFNRPDITLYDKVNKTVYLIDIAVPNTHNIQSTIAEKLTKYQDLAIELKRQWQAVNIHIVPIVISATGIVPKSLHRSLDILEMPQHSLYLLQKAVLLNTCRLTRKFLTTSSSSSTYTIT

SEQ ID NO: 26266 - protein, 1424 aa, Nymphalis urticae
MEMNKRRYNLRPLPGVRRGASGADAGCYSMRTIGGEELSRRALTSKNVTAGRCELNRRTHNVEVTADPLGDDTNLLILSTPTTCSHNVTLAEDKKDSDLLSEIISSTSSPLNSYESPISSPLSCHISPKTISPTSVDVVQEALAIEPAPATDTSRARKRWSKEMNEFIWRTYLIATKLSTSKIYLDHLHHEFSRKFPQMQASRQRLGDQCRAIVRNKLLSQETLDQIKKEVTVYLLQTNNQDTVQNIQTYPNIQTHKHCNQGVRQRRRWTPEYNETIIRNYYKITELEENRSAYRQPLYQAVIAEHPELSEVSEQRISDQLRVILNNKMISDEKLKRIREEISNDLRVRRNRLELTSQHAMLSQNTTPVQASNHDGENNNQSHLFTPSTQTHALSDIAGNNELNQTTYNPDVEKIKEQYNITVQKFQNTNPVARPYIPKQNTSKKLARIVNIINTEIMPQQVSAEQDFQTTHAIIYCAAYTAAVCNGTKIKDTTPQLNKQLKKEPAWQKRLQKKIQDLRRDIGRLTEYNNGNRSNRLISLVEKIKNKHRIHSQHEEPNTNNEHFLDTLKQKLNASSSRLKRYLNCTLRKSQNTHFSNNEKHFYRTLSSASQHNTRTDNQDLPSPPTNTIHSYWSSVWADPVNHNKDAAWLDPEEINSIKPMNFNHIPFDIFLRVLNKTHNWKAPGSDCVHNYWYKKFTSVHTLLHNHINDFIQTPNIMPHFVTQGLTYMIPKDTDHQNPAKYRPITCLQTIYKILTGCIAEILHEHVAINNILAEEQKGCRKSRQGCKEQLVIDTIAMKHATSRKKNINTMYIDYRKAFDSVPHSWLLYVLQYYKVHPQLIYFLESSMQNWKTKLKIAGQVKSETAEIPIRRGIFQGDALSPLWFCLALNPLSHMLNKSNHGYSITTPNTETTLTHLMYMDDIKLYSSTIASLHHLADITQTFSNDIHMEFGIDKCKTFSVKNGKIIPNSYILESGEIIEPLEPYTTYKYLGFEQARQIDQKGAKDSLKTKFRNRLNILFRSQLNSRNLFKAINSYAIPVLTYSFGIIKWSQCELLNIQRIINTSLTAHRKHHPRSCVQRMTLPRGEGGRGLIDVVNLHNKQIISLRHYFYQRSEHSTLHKTVTLADKHFTALNLKDQNPQRNERITDINEKTASWQQKSLHGRHRHDLQQSYVDKAASNAWLRRGELFPETEAFMLAIQDQVIDTRNYQKHIIRTLNIQSDSCRHCHSNPETIQHITSACRALAQTDYKHRHDQVSAIIHQYLAHKHNFIKKKTPYYKYKPNTILENNRYRIYWDRTIITDKTIHFNRPDITFHDKINKTIYLIDIAIPNTHNIQSTISEKLSKYQDLAIELKRQWRANTIHIIPIVISSTGVVPKSLQRSLDMLQVPQHTHNLLQKAIILNTCRLTRKFLTTSAISSSYTIT

SEQ ID NO: 26267 - protein, 1404 aa, Nymphalis urticae
MEMNKRRYNLRPLPGVRRGASGADAGCYSMRTIGGEELSRRALTSKNVTAGRCELNRRTHNVEVTADPLGDDTNLLILSTPTTCSHNVTLAEDKKDSDLLSEIISSTSSPLNAYESPISSPLSCHISPNTISPTSVDVVQEALAIEPAPATDTSRACKRWSKEMNEFIWRTYLIATKLSTSKIYLDHLHHEFSRKFPQMQASRQRLGDQCRAIVRNKLLSQETLDQIKKEVTVYLLQTNNQDTVQNIQTYPNIQTHKHCNQEVRQRRRWTPEYNETIIRNYYKITELEENRSAYRQPLYQAVIAEHPELSEVSEQRISDQLRVILNNKMISDEKLKRIREEMSNDLRVRCNRLELTSQHAMLSQNATPVQASNHDGENNNHTHLFTPSTETHALSDIAGNNELNQTTYYPDVEKIKEQYNITVQKFQNTNPVARPYIPKQNTSRKLARIVNIINTEIMPQQISAEQDFKIKDTTPQLNKQLKKEPAWQKRLQKKIQDLRRDIGRLTEYNNGNRSNRLILLVEKIKNKHRIHSHHEEPNTNNEHFLDTLKQKLNASSFRLKRYLNCTLRKSQNTHFSNNEKHFYRTLSSASQHNTRTDNQDLPSPPTNTIHSYWSSVWADPVNHNKDAAWLDPEEINSIKPMNFNHIPFDIFLRVLNKTHNWKAPGSDCIHNYWYKKFTSVHTLLHNHINDFIQTPNIMPHFVTQGLTCMIPKDTDHQNPAKYRPITYLQTIYKILTGCIAEILHEHVATNNILAEEQKGCRKSRQGCKEQLVIDTIAMKHATSRKKNINTMYIDYRKAFDSVPHSWLLYVLQYYKVHPQLIYFLESSMQNWKTKLKIAGQVTSETAEIPIRRGIFQGDALSPLWFCLALNPLSHMLNKSNHGYSITTPNTETTLTHLMYMDDIKLYSSTIASLHHLADITQTFSNDIHMEFGIDKCKTFSVKNGKIIPNSYILESGEIIEPLEPYTTYKYLGFEQARQIDQKGAKDSLKTKFRHRLNILFRSQLNSRNLFKAINSYAIPVLTYSFGIIKWSQCELLNIQRIINTSLTAHRKHHPRSCVQRMTLPRGEGGRGLIDVVNPHNKQIISHRHYFYQRSEHSTLHKTVTLADKHFTPLNLKDQNPQRNERITDINEKIASWQQKSLHGRHRHDLQQSYVDKAASNAWLRRGELFPETEAFMLAIQDQVIDTRNYQKHIIRTLNIQSDSCRHCHSNPETIQHITSACRALAQTDYKHRHDQVSAIIHQHLAHKHNFIKKKTPYYKYKPNTILENNSYRIYWDRTIITDKTIHFNRPDITFHDKINKTIYLIDIAIPNTHNIQSTISEKLSKYQDLAIELKRQWRANTIHIIPIVISSTGVVPKSLQRSLDMLQVPQHTHNLLQKAIILNTCRLTRKFLTTSSISSSYTIT

SEQ ID NO: 26268 - protein, 1365 aa, Trichoplusia ni
MVQTRSSTKRPQVPGGSSSSTGDDGSQPVARPRGAKNPREAISTRQTTMATNMETEMQSDMDRNSITPSPFSLFESPSSSPQFYQVSSRSSTVSPLLGDVVQEANATISAPASGTNRARKRWTEEMNKFIWRTYLIATKLNTSKLYLDYLYQEFSGKYPQMEASRQRLGDQCRAIVRNKLLAQDVLDRIKDEVAIVLQQTQSISIAQTPQRITGQQGQRRKWTTEYNESIVRNYYEVTKLGESRSAYRQPLHQAVIAEHPELSEVSEQRISDQLRVVLNNKMISEQRLSEIREQVANSLNMVPVNAANTLPTICPTGTGNMRETVSPITTQILESQIPAPSHENIEFNQLESDEIREKFKISLDKFKDTSPTMRPYIPKQKTSRKLAKIVQFIDTEILPQHFKEEQSFETFHNIVYCAAYTAASCNGTRIREGDDSPNPNQRREPAWQRRLRKKILDFRKDIGRMTEYIRGNRSNRIIRVVEAIKNKYRIHSQHEEPNTNDEHFLDTLKQKLNAAASRLKRYLDCTLRKTQNTLFSNNQKQFYRNLTVNTQNYRQTETIASSPSADDLCEFWSNIWAVPAQHNSEADWLQADSNFRDKITEMQFEHIPLDIFMYVLKKTQNWKAPGSDHIHNYWYKKLTSIHPSLYKHLNNFIHTPDIVPRFITQGLTYMIPKDTDRQNPAKYRPITCLQTVYKILTACIAELIHKHSSENNILSEEQKGCRKSSQGCKEQLIIDSVVMKQAIALKRDINTMYIDYRKAFDSVPHSWLIYILQQYKVHPQLIQFLERSMQHWSTKLKTTGYVHTETSEIPIRRGIFQGDALSPLWFCLALNPLSHMLNGLTSGYNITTPVKNINLTNLMYMDDIKLFSNTAQSLHLLADITQKFSNDVCMEFGIDKCKTLSVKSGQIIPNSYILESGDIIEPLEPNSLYKYLGFQQARQIHQKVTKQELKNKFRHRLNGLLRSQLNSRNLCQAINSYAIPALTYSFGLITWTQNDLLSLQRIINTSLTTHRKHHPRSCVQRMTLPRDEGGRGVIDIANLHSKQISTLRQYFFEHSEHSTLHEVVTIADKHFTPLNLADRNPQRKERVTGVNEKIAAWQQKSLHGRHRHDLQQPHVDKVMSNAWLRRGELFPETEAFMMAIQDQVIDTRNYQRYIIRNPNCPSDLCRHCHASPETIQHITSACRSLAQSDYKHRHDQVAAIIHQHLAHKHKFILKKDPYYKYKPEAILENNNFKIYWDRTIITDKTIHFNRPDITFHNKINKTVYLIDIAVPNTHNLQSTISDKLSKYQDLAIELKRQWHAETIHVIPIVISTTGIIPKSLRRCLDVLDVPEHTLNTLQKAVILNTCRLTRKFLTTSSVSAGYTTS

SEQ ID NO: 26269 - protein, 1423 aa, Vanessa atalanta
MPFTTNGPKPKTQMEMSKKEYNLRPLPGVRRGASGADAGCYSMRTIGGEELSRRALINKNVTAGRCELNRRTHNVEATADPLGNETNTPSTRPQHMTQAEHEKDSDMLNDIISASPSPFNSYESPSSSQLSYQVSSRSNTISPMSVDVVQEAHAIEPAPATGTNRARKRWSDEMNKFIWRTYLIATKLNTSKIYLAHLHHEFSLKFPQMQASRQRLGDQCRAIVRNKLLSQEILEQIKEEVTESLQQTNNQDRTQNIQTNLSMQIHNSHQQGIKQRRRWTTEYNETIIRNYYTITELEANRSAYRQPLHQAVIAEHPELSEVSEQRISDQLRVILNNKMISDQKLKEIREEISNDLRLRRNHLENTSQHLTIPQNTASAENNNHPHISPQTQPILDISTIAEQDQTPNYLDVEKIKKQYNITLEKFQNTNPISRPYIPKQNSSRKLAQIINVINTKVLPQHISVEQDFVTTHTLIYCAAYTAATCNGTNIKDITSQPCQLQKRIPAWQKRLQKKIQNLRRDIGRLTEHINGNRTNRLTLLVETIKNKYKIHSQHEEPNSSNEHFLDTLKQKLNAASSRLKRYLNCTLRKSQNTQFCNNEKKFYRILSSATQRNTNTNTQDITPPPANAIHTFWSNIWSDPVCHNTDAAWLDTDHEVINSIEPMNFEHISVEVFMRVLNKANNWKSPGSDHIHNYWYKKFTSTHSLLHKHMNNFIQTPNIMPHFVTQGLTFMIPKDTDHQNPAKYRPITCLQTIYKILTGCITELLHEHIAVNNILAEEQKGCRKGRQGCKEQLVIDSVTMKHAISKKKNINTMYIDYRKAFDSIPHSWLLYVLHHYKVHPQLIYFLENSMQNWKTTLKITGHANTETPDILIRRGIFQGDALSPLWFCLALNPLSNMLQKSNLGYIITTPHKDTTLTHLMYMDDIKLYSNTIQSLHHLADITQTFSKDIHMEFGIDKCKTFSVKNGIIVPNSYMLESGNIIEPLEEETTYKYLGFQQARKINQKETKNSLKTKFKHRLNILFRSQLNSHNLFKAINSYAIPVLTYSFGIINWSQCELHNLQRIINTTLTAHRKHHPRSCVQRMTLPRGEGGRGLIDIVNLHNKQITSLRHYFHQRSEYSPLHETVTLADKRFTPLNLKDRHPQKNERITDMNEKTALWRQKSLHGRHHHDLQQSYVDKAASNAWLRRGELFPETEAFMLAIQDQVIDTRNYQKHIIRSNLQSDACRHCHSSPETIQHITSACRALAQTDYKHRHDQVSAIIHQHLAHKYNFIDKKIPYYKYKPDTILENNRYRIYWDRTIITDKTIHFNRPDITLHDKINKTVYLIDIAIPNTHNIQLTISEKLSKYQDLAIELKRQWRADTIHIVPIVISSTGIVPKSLQRSLDILHISHHTNHLLQKAVILNTCRLTRKFLTTSSISAAIT

SEQ ID NO: 26270 - protein, 1282 aa, Vanessa cardui
MSMDVVQEAQAIEPAPAIDTNRARKRWSEDMNKFIWRTYLIATKLNTSKIYLAHLHQEFSLKFPHMQASRQRLGDQCRAIVRNKLLPQEILEQIKEEVTEYLQQTNNQNRTHAQTHLSMQIHNNPQGIRQRRRWTTEYNETIIRNYYKITELEENRSAYRQPLHQAVITEHPELSEVSEQRISDQLRVILNNKMISDQKLKEIREEISNDLCLRRSHLENSLQHLTIPENMAPAENNNHPHISLQTHVPITDIPTVTDQEQTTYYLDAEKIKNQYHTTLEKFQNTNPISRPYIPKQNSSRKLAQIVNIINTKILPQHISDEQDFITTHTLIYCAAYTAATCNGTNIKDITIQSSQVQKRVPAWQKRLQKKIQDLRRDIGRLTEYINGNKTNRLTLLVEAIKNKYKIHSQHEEPNSSNEQFLDTLKQKLNAASSRLKRYLNCTLRKSQNTQFANNEKKFYRILSSATQRNTSTNTQDIAQPPTNAIHTFWSGIWSEPVCHNTDAAWLDTDYEVTNSIEPMNFEHIRLEVFMRVLNKAHNWKSPGSDHIHNYWYKKFTSVHLLLHKHINKFIQTPNTMPHFVTQGLTFMIPKDNDHQNPAKYRPITCLQTIYKILTGCITELLHEHIAANNILTEEQKGCRKGRQGCKEQLIIDSVTMKHATSKKKNINTMYIDYRKAFDSIPHSWLLYVLQHYKIHPQLIYFLKNSMQNWKTTLKITGHSNTETLDILIRRGIFQGDALSPLWFCLALNPLSHMLHKSNLGYIINTPHKDTTLTHLMYMDDIKLYSDTIQSLHRLADITQTFSSDIHMKFGIDKCKTFSVKNGKIVSNSYILESGNIIEPLDEESTYKYLGFQQARKIDQKETKNSLKTKFKHRLNILFRSQLNSHNLFKAINSYAIPVLTYSFGIINWSQCELQNLQRIVNTTLTAHRKHHPRSCVQRMTLPRGEGGRGLIDIVNLHNKQITSLRHYFHQRSEYSPLHETVTLADKRLTPLNLNDRHPQKNERIIDMNEKTALWRQKSLHGRHRHDLQQPYVDKAGSNAWLKRGELFPETEAFMLAIQDQVIDTRNYQKHIIRAPNLQSDTCRHCHSNPETIQHITSACRALAQTDYKHRHDQVSAIIHQHLAHKHNFINKKIPYYKYKPDTILENSRYRIYWERTIITDKTIHFNRPDITLHDKTNKTVYLIDIAIPNTHNIQSTISEKLSKYQDLAIELKRQWRADTIHIVPIVISSTGVVPKSLQRSLDILHIPHHTNDLLQKAVILNTCRLTRKFLTTSSISAAYTIT

SEQ ID NO: 26271 - protein, 1333 aa, Mellicta athalia
MVATLSRQTTKASNTDNDNASDIYIDPVPSTSLTLPDTSPKPYKLLPVLEDVVQEASAKKPGPASSSFCARKKWSLEMNKFIWRTYLIATKLRTNRVYLDYLHHEFSIKYPHMQASRQRLGDQCRAIERNKLLSQEILEQITIEVTEYLQETQNPLTQNKHTQPHLQPHRNSQQRSGHRRRWTNELNEAIVRNYYEITELGINRTAYRRPLHQAVLTEYPELSEVSEQRISDQLRVIFNSKMISDQRLEEIRQNIAKNRTTHTLTSNQSSTLINSNEPENTSSDLDNINFHSQKHSIEQVNINSNTQPHSEVQESFTPVDSEKIQEHFLCAMNKFQNINPINRPYIPKQKTSRKLAHIVNFIDKNVIPYHISIEQDFETTHMIIYCAAYTAAISNGSRIKDVIIPHTPKNNRLPAWQKRLEKKIKDLRRDIARLTEYIRGNRSNRLTLLVEDIKNRHRIHSQHEEPNNSNEQFLDTLKQKLNAASSRLKRYLNCTLRKTQNSQFKNNEKQFYRNLTNNTQRLTTQDTISGPTAEELHSFWSNIWATPLYHNPNALCLESDYDSTNSITPMIFNDIPIEIFQFVLKKTHNWKAPGSDQIHNYWYKKFTTVHPLLHKHINDFIQSPEKLPKFITKGITYMIPKDTDYQNPAKYRPITCLQTFYKILTACIAELTQQHITNNNILTEEQKGCRKSSQGCKEQLIIDSVTMKHAISSKNDINTMYIDYKKAFDSVPHSWLLHVLHHYKIHPQIINFLENSMQNWSTTLKTTGLGEIAIPEIPIRRGIFQGDAFSPLWFCLALNPLSKMLNRSNLGYTITTPQKNTTLSHLMYMDDIKLYSNSVQSLHNLADITQTFSNDIHMEFGIEKCKTLSIQNGKITPNQYILNSGQIIEPLDMYTSYKYLGFHQTRKIHQTETKKELKQKFKYRLNILFRSQLNSLNLSKAINTYSIPILTYSFGIIKWSQTDLKNLQRLINTTLTASRKRHPRSSIQRMTLPRIEGGRGIIDIVNLHNKQITTLRQYFHQRAEHSTLHNIISLADKQLTPLNLTDRTTQKNECTTDLKEKIALWQQKSLHGRHCHDLQQPFVDKEASNAWLQRGELFPETEAFMIAIQDQIIDTRNYQKHIIHAPNLITDMCRHCHANSETIQHITSACRTLAQTDYKHRHDQIASIIHQQLAHKYKFIQKKDPYYKYKPNQTLENSNCKLYWDRTIITDKTIHYNRPDITLHNKTSNTIYLIDIAVPNTHNIQSTISEKLTKYQDLAIELKRSWKADTVHIVPIVISATGIIPKSLKLSLDILQLPKYTLDSLQKATILNTCRITRKFLTTSSISSACVTL

SEQ ID NO: 26272 - protein, 1424 aa, Vanessa atalanta
MPFTTNGPKPKTQMEMSKKEYNLRPLPGVRRGASGADAGCYSMRTIGGEELSRRALINKIVTAGRCELNRRTHNVEATADPLSNETNTPSTRPQHMTQAEHEKDSDMLNDIISASPSPFNSYESPSSSPLSYQVSSRSNTISPMSVDVVQEAHAIEPAPATGTNRARKRWSDEMNKFIWRTYLIATKLNTSKIYLAHLHHEFSLKFPQMQASRQRLGDQCRAIVRNKLLSQEILEQIKEEVTESLQQTNNQDRTLNIQTNLSMQIHNSHQQGIKQRRRWTTEYNETIIRNYYTITELEANRSAYRQPLHQAVIAEHPELSEVSEQRISDQLRVILNNKMISDQKLKEIREKISNDLRLRRNHLENTSQHLTIPQNTASAENNNHPHISPQTQPILDISTIAEQDQTPNYLDVEKIKKQYNITLEKFQNTNPISRPYIPKQNSSRKLAQIINIINTKVLPQHISVEQDFVTTHTLIYCAAYTAATCNGTNIKDITSQPCQLQKRIPAWQKRLQKKIQNLRRDIGRLTEHINGNRTNRLTLLVEAIKNKYKIHSQHEEPNSSNEHFLDTLKQKLNAASSRLKRYLNCTLRKSQNTQFCNNEKKFYRILSSATQRNTNTNTQDITPPPANAIHTFWSNIWSDPVCHNTDAAWLDTDHEVINSIEPMNFEHISVEVFMRVLNKANNWKSPGSDHIHNYWYKKFTSTHSLLHKHMNNFIQTPNIMPHFVTQGLTFMIPKDTDHQNPAKYRPITCLQTIYKILTGCITELLHEHIAVNNILAEEQKGCRKGRQGCKEQLVIDSVTMKHAISKKKNINTMYIDYRKAFDSIPHSWLLYVLHHYKVHPQLIYFLENSMQNWKTTLKITGHANTETPDILIRRGIFQGDALSPLWFCLALNPLSNMLQKSNLGYIITTPHKDTTLTHLMYMDDIKLYSNTLQSLHHLADITQTFSKDIHMEFGIEKCKTFSVKNGKIVPKSYMLESGNIIEPLEEETTYKYLGFQQARKINQKETKNSLKTKFKHRLNILFRSQLNYHNLFKAINSYAIPVLTYSFGIINWSQCELHNLQRIINTTLTAHRKHHPRSCVQRMTLPRGEGGRGLIDIVNLHNKQITSLRHYFHQRSEYYPLHETVTLADKRFTPLNLKDRHPQKNERITDMNEKTALWRQKSLHGRHHHDLQQSHVDKAASNAWLRRGELFPETEAFMLAIQDQVIDTRNYQKHIIRTSNLQSDACRHCHSNPETIQHITSACRALAQTDYKHRHDQVSAIIHQHLAHKYNFIDKKIPYYKYKPDTILENNRYRIYWDRTIITDKTIHFNRPDITLHDKINKTVYLIDIAIPNTHNIQSTISEKLSKYQDLAIELKRQWRADTIHIVPIVISSTGIVPKSLQRSLDILHISHHTNHLLQKAVILNTCRLTRKFLTTSSISAAIT

SEQ ID NO: 26273 - protein, 1424 aa, Vanessa atalanta
MPFTTNGPKPKTQMEMSKKEYNLRPLPGVRRGASGADAGCYSMRTIGGEELSRRALINKNVTAGRCELNRRTHNVEATADPLGNETNTPSTRPQHMTQAEHEKDSDMLNDIISASPSPFNSYESPSSSQLSYQVSSRSNTISPMSVDVVQEAHAIEPAPATGTNRARKRWSDEMNKFIWRTYLIATKLNTSKIYLAHLHHEFSLKFPQMQASRQRLGDQCRAIVRNKLLSQEILEQIKEEVTESLQQTNNQDRTQNIQTNLSMQIHNSHQQGIKQRRRWTTEYNETIIRNYYTITELEANRSAYRQPLHQAVIAEHPELSEVSEQRISDQLRVILNNKMISDQKLKEIREEISNDLRLRRNHLENTSQHLTIPQNTASAENNNHPHISPQTQPILDISTIAEQDQTPNYLDVEKIKKQYNITLEKFQNTNPISRPYIPKQNSSRKLAQIINVINTKVLPQHISVEQDFVTTHTLIYCAAYTAATCNGTNIKDITSQPCQLQKRIPAWQKRLQKKIQNLRRDIGRLTEHINGNRTNRLTLLVETIKNKYKIHSQHEEPNSSNEHFLDTLKQKLNAASSRLKRYLNCTLRKSQNTQFCNNEKKFYRILSSATQRNTNTNTQDITPPPANAIHTFWSNIWSDPVCHNTDAAWLDTDHEVINSIEPMNFEHISVEVFMRVLNKANNWKSPGSDHIHNYWYKKFTSTHSLLHKHMNNFIQTPNIMPHFVTQGLTFMIPKDTDHQNPAKYRPITCLQTIYKILTGCITELLHEHIAVNNILAEEQKGCRKGRQGCKEQLVIDSVTMKHAISTKKNINTMYIDYRKAFDSIPHSWLLYVLHHYKVHPQLIYFLENSMQNWKTTLKITGHANTETPDILIRRGIFQGDALSPLWFCLALNPLSNMLQKSNLGYIITTPHKDTTLTHLMYMDDIKLYSNTIQSLHHLADITQTFSKDIHMEFGIDKCKTFSVKNGIIVPNSYMLESGNIIEPLEEETTYKYLGFQQARKINQKETKNSLKTKFKHRLNILFRSQLNSHNLFKAINSYAIPVLTYSFGIINWSQCELHNLQRIINTTLTAHRKHHPRSCVQRMTLPRGEGGRGLIDIVNLHNKQITSLRHYFHQRSEYSPLHETVTLADKRFTPLNLKDRHPQKNERITDMNEKTALWRQKSLHGRHHHDLQQSYVDKAASNAWLRRGELFPETEAFMLAIQDQVIDTRNYQKHIIRTSNLQSDACRHCHSSPETIQHITSACRALAQTDYKHRHDQVSAIIHQHLAHKYNFIDKKIPYYKYKPDTILENNRYRIYWDRTIITDKTIHFNRPDITLHDKINKTVYLIDIAIPNTHNIQLTISEKLSKYQDLAIELKRQWRADTIHIVPIVISSTGIVPKSLQRSLDILHISHHTNHLLQKAVILNTCRLTRKFLTTSSISAAIT

SEQ ID NO: 26274 - protein, 1454 aa, Vanessa tameamea
MNGHQELNHIYPVNKRNRRYINLIAANTLAMPFTTNGPEPKTQMEMSKREYNLRPLPGVRRGASGADAGCYSMRTIGGEELSRRALINTNVTAGRCELNRRTHNVEATADPLGNETNTPSTRPQHMTQAEHEKDSDMLNEIISASPSPFNSYESPSSSPLSYQVSSSSNIISPMSVDVVQEAHAIEPTSATGTNRARKRWSDDMNKFIWRTYLIATKLNTSKIYLAHLHHEFSLKFPQMQASRQRLGDQCRAIVRNKLLPQEILEQIKEEVTESLQQTNNQDRTQNIQTNLSMQIHNSHQQGIRQRRRWTTEYNETIIRNYYKITELEENRSAYRQPLHQAVIAEHPELSEVSEQRISDQLRVILNNKMISDQKLKEIREEISNDLRLHRNHLENTSQHLTIPQNAAPAENNNHPHISPQTQPILDISAIAEQDQTTYYLDVEKIKKQYNVTLEKFQNTNPISRPYIPKQNSSRKLAQIINVINTKILPQHISVEQDFVTTHTLIYCAAYTAATCNGTNIKDITSQPCQLQKRVPAWQKRLQKKIQDLRRDIGRLTEHINGNKTNRLTLLVEAIKNKYKIHSQHEEPNSSNEHFLDTLKQKLNAASSRLKRYLNCTLRKSQNTQFSNNEKKFYRILSSATQRNTSTNTQDITPPPANAIHTFWSSIWSDPVCHNTDAAWLVTDHEVINSIEPMNFEHISVEVFMRVLNKAHNWKSPGSDHIHNYWYKKFTSTHSLLHKHMNNFIQTPNLMPHFVTQGLTFMIPKDTDQQNPAKYRPITCLQTIYKILTGCITELLHEHIAVNNILAEEQKGCRKGRQGCKEQLVIDSVTMKHAISKKKNINTMYIDYRKAFDSIPHSWLLYVLQHYKIHPQLIYFLENSMQNWKTTLKITGHANTETPDILIRRGIFQGDALSPLWFCLALNPLSNMLQKSNLGYIITTPHKDTTLTHLMYMDDIKLYSDTIQSLHHLADITQTFSKDIHMEFGIDKCKTFSVKNGKIVPNSYILESGNIIEPLEEETTYKYLGFQQARNINQKETKNSLKTKFKHRLNILFRSQLNSHNLFKAINSYAIPVLTYSFGIISWSQCELHNLQRMINTTLTAHRKHHPRSCVQRMTLPRGEGGRGLIDIVNLHNRQITSLRHYFHQRSVYSPLHGTVTLADKRFTPLNLKDRHPQKNERFTDLNEKTALWRQKSLHGRHHHDLQQSYVDKAASNAWLRRGELFPETEAFMLAIQDQVIDTRNYQKHIIRTSNLQSDTCRHCHSNPETIQHITSACRALAQTDYKHRHDQVSAIIHQHLAHKYNFIDKKIPYYKYKPDTILENNRYRIYWDRTIITDKTIHFNRPDITLHDKIKKNVYLIDIAIPNTHNIQSTISEKLSKYQDLAIELKRQWRADTIHIVPIVISSTGVVPKSLQRSLDILHIPHHTNHLLQKAVILNTCRLTRKFLTTSSISAAIT

SEQ ID NO: 26275 - protein, 1424 aa, Vanessa atalanta
MPFTTNGPKPKTQMEMRKKEYNLRPLPGVRRGASGADAGCYSMRTIGGEELSRRALINKIVTAGRCELNRRTHNVEATADPLGNETNTPSTRPQHMTQAEHEKDSDMLNDIISASPSPFNSYESPSSSPLSYQVSSRSNTISPMSVDVVQEAHAIEPAPATGTNRARKRWSDEMNKFIWRTYLIATKLNTSKIYLAHLHHEFSLKFPQMQASRQRLGDQCRAIVRNKLLSQEILEQIKEEVTESLQQTNNQDRTQNIQTNLSMQIHNSHQQGIKQRRRWTTEYNETIIRNYYTITELEANRSAYRQPLHQAVIAEHPELSEVSEQRISDQLRVILNNKMISDQKLKEIREEISNDLRLRRNHLENTSQHLTIPQNTASAENNNHPHISPQTQPILDISTIAEQDQTPNYLDVEKIKKQYNITLEKFQNTNPISRPYIPKQNSSRKLAQIINIINTKVLPQHISVEQDFVTTHTLIYCAAYTAATCNGTNIKDITSQPCQLQKRIPAWQKRLQKKIQNLRRDIGRLTEHINGNRTNRLTLLVEAIKNKYKIHSQHEEPNSSNEHFLDTLKQKLNAASSRLKRYLNCTLRKSQNTQFCNNEKKFYRILSSATQHNTNTNTQDITPPPANAIHTFWSNIWSDPVGHNTDAAWLDTDHEVINSIEPMNFEHISVEVFMRVLNKANNWKSPGSDHIHNYWYKKFTSTHSLLHKHMNNFIQTPNIMPHFVTQGLTFMIPKDTDHQNPAKYRPITCLQTIYKILTGCITELLHEHIAVNNILAEEQKGCRKGRQGCKEQLVIDSVTMKHAISKKKNINTMYIDYRKAFDSIPHSWLLYVLHHYKVHPQLIYFLENSMQNWKTTLKITGHANTETPDILIRRGIFQGDALSPLWFCLALNPLSNMLQKSNLGYIITTPHKDTTLTHLMYMDDIKLYSNTIQSLHHLADITQTFSKDIHMEFGIDKCKTFSVKNGKIVPNSYMLESGNIIEPLEEETTYKYLGFQQARKINQKETKNSLKTKFKHRLNILFRSQLNSHNLFKAINSYAIPVLTYSFGIINWSQCELHNLQRIINTTLTAHRKHHPRSCVQRMTLPRGEGGRGLIDIVNLHNKQITSLRHYFHQRSEYSPLHETVTLADKRFTPLNLKDRHPQKNERITDMNEKTALWRQKSLHGRHHHDLQQSHVDKAASNAWLRRGELFPETEAFMLAIQDQVIDTRNYQKHIIRTSNLQSDACRHCHSNPETIQHITSACRALAQTDYKHRHDQVSAIIHQHLAHKYNFIDKKIPYYKYKPDTILENNRYRIYWDRTIITDKTIHFNRPDITLHDKINKTVYLIDIAIPNTHNIQSTISEKLSKYQDLAIELKRQWRADTIHIVPIVISSTGIVPKSLQRSLDILHISHHTNHLLQKAVILNTCRLTRKFLTTSSISAAIT

SEQ ID NO: 26276 - protein, 762 aa, Vanessa tameamea
MNFEHISVEVFMRVLNKAHNWKSPGSDHIHNYWYKKFTSTHSLLHKHMNNFIQTPNLMPHFVTQGLTFMIPKDTDQQNPAKYRPITCLQTIYKILTGCITELLHEHIAVNNILAEEQKGCRKGRQGCKEQLVIDSVTMKHAISKKKNINTMYIDYRKAFDSIPHSWLLYVLQHYKIHPQLIYFLENSMQNWKTTLKITGHANTETPDILIRRGIFQGDALSPLWFCLALNPLSNMLQKSNLGYIITTPHKDTTLTHLMYMDDIKLYSDTIQSLHHLADITQTFSRDIHMEFGIDKCKTFSVKNGKIVPNSYILESGNIIEPLEEEATYKYLGFQQARNINQKETKNSLKTKFKHRLNILFRSQLNSHNLFKAINSYAIPVLTYSFGIINWSQCELHNLQRMINTTLTAHRKHHPRSCVQRMTLPRGEGGRGLIDIVNLHNKQITSLRHYFHQRSVYSPLHETVTLADKRFTPLNLKDRRPQKNERITDLNEKTALWRQKSLHGRHHHDLQQSYVDKAASNAWLRRGELFPETEAFMLAIQDQVIDTRNYQKHIIRTSNLQSDTCRHCHSNPETIQHITSACRALAQTDYKHRHDQVSAIIHQYLAHKYNFIDKKIPYYKYKPDTILENNRYRIYWDRTIITDKTIHFNRPDITLHDKIKKNVYLIDIAIPNTHNIQSTISEKLSKYQDLAIELKRQWRADTIHIVPIVISSTGVVPKSLQRSLDILHIPHHTNHLLQKAVILNTCRLTRKFLTTSSISAAIT

SEQ ID NO: 26277 - protein, 1412 aa, Vanessa cardui
MEMSKRIYNLRPLPGVRRGASGADAGCYSMRTIGDEELSRRALISKSDTAGRCELSRRTYNVEATADPLGDETNTPSTRPQHMTQGKHEKDSDMLNEIISVSPSPFSSYESPTSSPLSFQVSSRSNTISPMSMDVVQEAQAIEPAPAIDTNRARKRWSEDMNKFIWRTYLIATKLNTSKIYLAHLHQEFSLKFPHMQASRQRLGDQCRAIVRNKLLPQEILEQIKEEVTEYLQQTNNQNRTHAQTHLSMQIHNNPQGIRQRRRWTTEYNETIIRNYYKITELEENRSAYRQPLHQAVITEHPELSEVSEQRISDQLRVILNNKMISDQKLKEIREEISNDLRLRRSHLENSLQHLTIPENMAPAENNNHPHISLQTHVPITDIPTVTDQEQTTYYLDAEKIKNQYNTTLEKFQNTNPISRPYIPKQNSSRKLAQIVNIINTKILPQHISDEQDFITTHTLIYCAAYTAATCNGTNIKDITIQSSQVQKRVPAWQKRLQKKIQDLRRDIGRLTEYINGNKTNRLTLLVEAIKNKYKIHSQHEEPNSSNEQFLDTLKQKLNAASSRLKRYLNCTLRKSQNTQFANNEKKFYRILSSATQRNTSTNTQDIAQPPTNAIHTFWSGIWSEPVCHNTDAAWLDTDYEVTNSIEPMNFEHIPLEVFMRVLNKAHNWKSPGSDHIHNYWYKKFTSVHLLLHKHINKFIQTPKTMPHFVTQGLTFMIPKDNDHQNPAKYRPITCLQTIYKILTGCITELLHEHIAANNILTEEQKGCRKGRQGCKEQLIIDSVTMKHATSKKKNINTMYIDYRKAFDSIPHSWLLYVLQHYKIHPQLIYFLKNSMQNWKTTLKITGHSNTETLDILIRRGIFQGDALSPLWFCLALNPLSHLLHKSNLGYIINTPHKDTTLTHLMYMDDIKLYSDTIQSLHRLADITQTFSSDIHMKFGIDKCKTFSVKNGKIVSNSYILESGNIIEPLDEESTYKYLGFQQARKIDQKETKNSLKTKFKHRLNILFRSQLNSHNLFKAINSYAIPVLTYSFGIINWSQCELQNLQRIVNTTLTAHRKHHPRSCVQRMTLPRGEGGRGLIDIVNLHNKQITSLRHYFHQRSEYSPLHETVTLADKRLTPLNLNDRHPQKNERIIDMNEKTALWRQKSLHGRHRHDLQQPYVDKAASNAWLKRGELFPETEAFMLAIQDQVIDTRNYQKHIIRAPNLQSDTCRHCHSNPETIQHITSACRALAQTDYKHRHDQVSAIIHQHLAHKHNFINKKIPYYKYKPDTILENSRYRIYWDRTIITDKTIHFNRPDITLHDKTNKTVYLIDIAIPNTHNIQSTISEKLSKYQDLAIELKRQWRADTIHIVPIVISSTGVVPKSLQRSLDILHIPHHTNDLLQKAVILNTCRLTRKFLTTSSISAAYTIT

SEQ ID NO: 26278 - protein, 1424 aa, Vanessa atalanta
MPFTTNGPKPKTQMEMSKKEYNLRPLPGVRRGASGADAGCYSMRTIGGEELSRRALINKNVTAGRCELNRRTHNAEATADPLGNETNTPSTRPQHMTQAEHEKDSDMLNDIISALPSPFNSYESPSSSPLSYQVSSRSNTISPMSVDVVQEAHAIEPAPATGTNRARKRWSDEMNKFIWRTYLIATKLNTSKIYLAHLHHEFSLKFPQMQASRQRLGDQCRAIVRNKLLSQEILEQIKEEVTESLQQTNNQDRTQNIQTNLSMQIHNSHQQGIKQRRRWTTEYNETIIRNYYIITELEANRSAYRQPLHQAVIAEHPELSEVSEQRISDQLRVILNNKMISDQKLKEIREEISNDLRLRRNHLENTSQHLTIPQNTASAENNNHPHISPQTQPILDISTIAEQDQTPNYLDVEKIKKQYNITLEKFQNTNPISRPYIPKQNSSRKLAQIINVINTKVLPQLISVEQDFVTTHTLIYCAAYTAATCNGTNIKDITSQPCQLQKRIPAWQKRLQKKIQNLRRDIGRLTEHINGNRTNRLTLLVEAIKNKYKIHSQHEEPNSSNEHFLDTLKQKLNAASSRLKRYLNCTLRKSQNTQFCNNEKKFYRILSSATQRNTNTNTQDITPPPANAIHTFWSNIWSDPVCHNTDAAWLDTDHEVIKSIEPMNFEHISVEVFMRVLNKANNWKSPGSDHIHNYWYKKFTSTHSLLHKHMNNFIQTPNIMPHFVTQGLTFMIPKDTDHQNPAKYRPITCLQTIYKILTGCITELLHEHIAVNNILAEEQKGCRKGRQGCKEQLVIDSVTMKHAISKKKNINTMYIDYRKAFDSIPHSWLLYVLHHYKVHPQLIYFLENSMQNWKTTLKISGHANTETPDILIRRGIFQGDALSPLWFCLALNPLSNMLHKSNLGYIITTPHKDTTLTHLMYMDDIKLYSNTIQSLHHLADITQTFSKDIHMEFGIDKCKTFSVKNGKIVPNSYMLESGNIIEPLEEETTYKYLGFQQARKINQKETKNSLKTKFKHRLNILFRSQLNSHNLFKAINSYAIPVLTYSFGIINWSQCELHNLQRIINTTLTAHRKHHPRSCVQRMTLPRGEGGRGLIDIVNLHNKQITSLRHYFHQRSEYSPLHETVTLADKRFTPLNLKDRHPQKNERITDMNEKTALWRQKSLHGRHHHDLQQSYVDKAASNAWLRRGELFPETEAFMLAIQDQVIDTRNYQKHIIRTSNFQSDACRHCHSNPETIQHITSACRALAQTDYKHRHDQVSAIIHQHLAHKYNFIDKKIPYYKYKPDTILENNRYRIYWDRTIITDKTIHFNRPDITLHDKINKTVYLIDIAIPNTHNIQSTISEKLSKYQDLAIELKRQWRADTIHIVPIVISSTGIVPKSLQRSLDILHISHHTNHLLQKAVILNTCRLTRKFLTTSSISAAIT

SEQ ID NO: 26279 - protein, 1411 aa, Vanessa atalanta
MEMSKKEYNLRPLPGVRRGASGADAGCYSMRTIGGEELSRRALINKIVTAGRCELNRRTHNVEATADPLGNETNTPSTRPQHMTQAEHEKDSDMLNDIISASPSPFNSYESPSSSPLSYQVSSRSNTISPMSVDVVQEAHAIEPAPATGTNRARKRWSDEMNKFIWRTYLIATKLNTSKIYLAHLHHEFSLKFPQMQASRQRLGDQCRAIVRNKLLSQEILEQIKEEVTESLQQTNNQDRTQNIQTNLSMQIHNSHQQGIKQRRRWTTEYNETIIRNYYTITELEANRSAYRQPLHQAVIAEHPELSEVSEQRISDQLRVILNNKMISDQKLKEIREEISNDLRLRRNHLENTSQHLTIPQNTASAENNNHPHISPQTQPILDISTIAEQDQTPNYLDVEKIKKQYNIILEKFQNTNPISRPYIPKQNSLRKLAQIINIINTKVLPQHISVEQDFVTTHTLIYCAAYTAATCNGTNIKDITSQPCQLQKRIPAWQKRLQKKIQNLRRDIGRLTEHINGNRTNRLTLLVEAIKIKYKIHSQHEEPNSSNEHFLDTLKQKLNAASSRLKRYLNCTLRKSQNTQFCNNEKKFYRILSSATQRNTNTNTQDITPPPANAIHTFWSNIWSDPVCHNTDAAWLDTDHEVINSIEPMNFEHISVEVFMRVLNKANNWKSPGSDHIHNYWYKKFTSTHSLLHKHMNNFIQTPNIMPHFVTQGLTFMIPKDTDHQNPAKYRPITCLQTIYKILTGCITELLHEHIAVNNILAEEQKGCRKGRQGCKEQLVIDSVTMKHAISKKKNINTMYIDYRKAFDSIPHSWLLYVLHHYKVHPQLIYFLENSMQNWKTTLKITGHANTETPDILIRRGIFQGDALSPLWFCLALNPLSNMLQKSNLGYIITTPHKDTTLTHLMYMDDIKLYSNTIQSLHHLADITQTFSKDIHMEFGIDKCKTFSVKNGKIVPNSYMLESGNIIEPLEEETTYKYLGFQQARKINQKETKNSLKTKFKHRLNILFRSQLNSHNLFKAINSYAIPVLTYSFGIINWSQCELHNLQRIINTTLTAHRKHHPRSCVQRMTLPRGEGGRGLIDIVNLHNKQITSLRHYFHQRSEYSPLHETVTLADKRFTPLNLKDRHPQKNERITDMNEKTALWRQKSLHGRHHHDLQQSHVDKAASNAWLRRGELFPETEAFMLAIQDQVIDTRNYQKHIIRTSNLQSDACRHCHSNPETIQHITSACRALAQTDYKHRHDQVSAIIHQHLAHKYNFIDKKIPYYKYKPDTILENNRYRIYWDRTIITDKTIHFNRPDITLHDKINKTVYLIDIAIPNTHNIQSTISEKLSKYQDLAIELKRQWRADTIHIVPIVISSTGIVPKSLQRSLDILHISHHTNHLLQKAVILNTCRLTRKFLTTSSISAAIT

SEQ ID NO: 26280 - protein, 1282 aa, Vanessa cardui
MSMDVVQEAQAIKPAPAIDTNRARKRWSEDMNKFIWRTYLIATKLNTSKIYLAHLHQEFSLKFPHMQASRQRLGDQCRAIVRNKLLPQEILEQIKEEVTEYLQQTNNQNRTHAQTHLSMQIHNNPQGITQRRRWTTEYNETIIRNYYKITELEENRSAYRQPLHQAVITEHPELSEVSEQRISDQLRVILNNKMISDQKLKEIREEISNDLRLRRNHLENSLQHLTIPENMAPAENNNHPHISPQTHVPIADMPTVTDQEQTTYYLDAEKIKNQYNTTLEKFQNTNPISRPYIPKQNSSRKLTQIVNIINTKILPQHISDDQDFMTTHTLIYCAAYTAATCNGTNIKDITIQSSQVQKRVPAWQKRLQKKIQDLRRDIGRLTEYINGNKTNRLTLLVEAIKNKYKIHSQHEEPNSSNEHFLDTLKQKLNAASSRLKRYLNCTLRKSQNTQFANNEKKFYRILSSATQRNTSTNTQDIAPPPTNAIHTFWSGIWSEPVCHNTDAAWLDTDYEVTNSIEPMNFEHIPLEVFMRVLNKAHNWKSPGSDHIHNYWYKKFTSVHSLLHKQINKFIQTPNTMPHFVTQGLTFMIPKDTDHQNPAKYRPITCLQTIYKILTGCITELLHEHIAANNILTEEQKGCRKGRQGCKEQLIIDSVTMKHATSKKKNINTMYIDYRKAFDSIPHSWLLYVLQHYKIHPQLIYFLKNSMQNWKTTLKITGHSNTETPDIFIRRGIFQGDALSPLWFCLALNPLSHMLHKSNLGYIITTPHKDTTLTHLMYMDDIKLYSDTIQSLHHLADITQTFSSDIHMKFGIDKCKTFSVKNGKIVSNSYILESGNIIEPLDEESTYKYLGFQQARKIDQKETKNSLKTKFKHRLNTLFRSQLNSHNLFKAINSYAIPVLTYSFGIINWSQCELQNLQRIVNTTLTAHRKHHPRSCVQRMTLPRGEGGRGLIDIVNLHNKQITSLRHYFHQRSEYSPVHETVTLADKRLTPLNLNDRHPQKNERIIDMNEKTALWRQKSLHGRHRHDLQQSYVDKAASNAWLKRRELFPETEAFMLAIQDQVIDTRNYQKQIIRAPNLQSDTCRHCHSNPETIQHITSACRALAQTDYKHRHDQVSAIIHQHLAHKHNFINKKIPYYKYKPDTILENSRYRIYWDRTIITDKTIHFNRPDITLHDKTNKTVYLIDIAIPNTHNIQSTISEKLSKYQDLAIELKRQWRADTIHIVPIVISSTGVVPKSLQRSLDILHIPHHTNDLLQKAVILNTCRLTRKFLTTSSISAAYTIT

SEQ ID NO: 26281 - protein, 1412 aa, Vanessa cardui
MEMSKRIYNLRPLPGVRRGASGADAGCYSMRTIGDEELSRRALISKSDTAGRCELSRRTYNVEATADPLGDETNTPSTRPQHMTPGKHEKDSDMLNEIISVSPSPFSSYESPTSSPLSFQVSSRSNTISPMSMDVVQEAQAIEPAPAIDTNRARKRWSEDMNKFIWRTYLIATKLNTSKIYLAHLHQEFSLKFPHMQASRQRLGDQCRAIVRNKLLPQEILEQIKEEVTEYLQQTNNQNRTHAQTHLSMQIHNNPQGIRQRRRWTTEYNETIIRNYYKITELEENRSAYRQPLHQAVITEHPELSEVSEQRISDQLRVILNNKMISDQKLKEIREEISNDLRLRRSHLENSLQHLTIPENMAPAENNNHPHISLQTHVPIADIPTVTDQEQTTYYLDAEKIKNQYNTTLEKFQNTNPISRPYIPKQNSSRKLAQIVNIINTKILPQHISDEQDFITTHTLIYCAAYTAATCNGTNIKDITIQSSQVQKRVPAWQKRLQKKIQDLRRDIGRLTEYINGNKTNRLTLLVEAIKNKYKIHSQHEEPNSSNEQFLDTLKQKLNAASSRLKRYLNCTLRKSQNTQFANNEKKFYRILSSATQRNTSTNTQDTAQPPTNAIHTFWSGIWSEPVCHNTDAAWLDTDYEVTNSIEPMNFEHIPLEVFMRVLNKAHNWKSPGSDHIHNYWYKKFTSVHLLLHKHINKFIQTPNTMPHFVTQGLTFMIPKDNDHQNPAKYRPITCLQTIYKILTGCITELLHEHIAANNILTEEQKGCRKGRQGCKEQLIIDSVTMKHATSKKKNINTMYIDYRKAFDSIPHSWLLYVLQHYKIHPQLIYFLKNSMQNWKTTLKITGHSNTETPDILIRRGIFQGDALSPLWFCLALNPLSHMLHKSNLGYIINTPHKDTTLTHLMYMDDIKLYSDTIQSLHRLADITQTFSSDIHMKFGIDKCKTFSVKNGKIVSNSYILESGNIIEPLDEESTYKYLGFQQARKIDQKETKNSLKTKFKHRLNILFRSQLNSHNLFKAINSYAIPVLTYSFGIINWSQCELQNLQRIVNTTLTAHRKHHPRSCVQRMTLPRGEGGRGLIDIVNLHNKQITSLRHYFHQRSEYSPLHETVTLADKRLTPLNLNDRHPQKNERIIDMNEKTALWRQKSLHGRHRHDLQQPYVDKAASNAWLKRGELFPETEAFMLAIQDQVIDTRNYQKHIIRAPNLQSDTCRHCHSNPETIQHITSACRALAQTDYKHRHDQVSAIIHQHLAHKHNFINKKIPYYKYKPDTILENSRYRIYWDRTIITDKTIHFNRPDITLHDKTNKTVYLIDIAIPNTHNIQSTISEKLSKYQDLAIELKRQWRADTIHIVPIVISSTGVVPKSLQRSLDILHIPHHTNDLLQKAVILNTCRLTRKFLTTSSISAAYTIT

SEQ ID NO: 26282 - protein, 1424 aa, Vanessa atalanta
MPFTTNGPKPKTQMEMSKKEYNLRPLPGVRRGASGADAGCYSMRTIGGEELSRRALINKNVTAGRCELNRRTHNVEATADPLGNETNTPSTRPQHMTQAEHEKDSDMLNDIISASPLPFNSYESPSSSPLSYQVSSRSNTISPMSVDVVQEAHAIEPAPVTGTNRARKRWSDEMNKFIWRTYLIATKLNTSKIYLSHLHHEFSLKFPQMQASRQRLGDQCRAIVRNKLLSQEILEQIKEEVTESLQQTNNQDRTQNIQTNLSMQIHNSHQQGIKQRRRWITEYNETIIRNYYTITELEANRSAYRQPLHQAVIAEHPELSEVSEQRISDQLRVILNNKMISDQKLKEIREEISNDLRLRRNHLENTSQHLTIPQNTASAENNNHPHISPQTQPILDISTIAEQDQTPNYLDVEKIKKQYNITLEKFQNTNPISRPYIPKQNSSRKLAQIINVINTKVLPQHISVEQDFVTTHTLTYCAAYTAATCNGTNIKDITSQPCQLQKRIPAWQKRLQKKIQNLRRDIGRLTEHINGNRTNRLTLLVEAIKNKYKIHSQHEEPNSSNEHFLDTLKQKLNAASSRLKRYLNRTLRKSQNTQFCNNEKKFYRILSSATQRNTNTNTQDITPPPANAIHTFWSNIWSDPVCHNTDAAWLDTDHEVINSIEPMNFEHISVEVFMRVLNKANNWKSPGSDHIHNYWYKKFTSTHSLLHKHMNNFIQTPNIMPHFVTQGLTFMIPKDTDHQNPAKYRPITCLQTIYKILTGCITELLHEHIAVNNILAEEQKGCRKGRQGCKEQLVIDSVTMKHAISKKKNINTMYIDYRKAFDSIPHSWLLYVLHHYKVHPQLIYFLENSMQNWKTTLKITGHANTETPDILIRRGIFQGDALSPLWFCLALNPLSNMLQKSNLGYIITTPHKDTTLTHLMYMDDIKLYSNTIQSLHHLADITQTFSKDIHMEFGIDKCKTFSVKNGKIVPNSYMLESGNIIEPLEEETTYKYLGFQQARKINQKETKNSLKTKFKHRLNILFRSQLNSHNLFKAINSYAIPVLTYSFGIINWSQCELHNLQRIINTTLTAHRKHHPRSCVQRMTLPRGEGGRGLIDIVNLHNKQITSLRHYFHQRSEYSPLHETVTLADKRFTPLNLKDRHPQKNERITDMNEKTALWRQKSLHGRHHHDLQQSYVDKAASNAWLSRGELFPETEAFMLAIQDQVIDTRNYQKHIIRTSNLQSDACRHCHSNPETIQHITSACRALAQTDYKHRHDQVSAIIHQHLAHKYNFIDKKIPYYKYKPDTILENNRYRIYWDRTIITDKTIHFNRPDITLHDKINKTVYLIDIAIPNTHNIQSTISEKLSKYQDLAIELKRQWRADTIHIVPIVISSTGIVPKSLQRSLDILHISHHTNHLLQKAVILNTCRLTRKFLTTSSISAAIT

SEQ ID NO: 26283 - protein, 1424 aa, Vanessa atalanta
MPFTTNGPKPKTQMEMSKKEYNLRPLPGVRRGASGADAGCYSMRTIGGEELSRRALINKIVTAGRCELNRRTHNVEATADPLGNETNTPSTRPQHMTQAEHEKDSDMLNDIISASPSPFNSYESPSSSPLSYQVSSRSNTISPMSVDVVQEAHAIEPAPATGTNRARKRWSDEMNKFIWRTYLIATKLNTSKIYLAHLHHEFSLKFPQMQASRQRLGDQCRAIVRNKLLSQEILEQIKEEVTENLQQTNNQDRTQNIQTNLSMQIHNSHQQGIKQRRRWTTEYNETIIRNYYTITELEANRSAYRQPLHQAVIAEHPELSEVSEQRISDQLRVILNNKMISDQKLKEIREEISNDLRLRRNHLENTSQHLTIPQNTASAENNNHPHISPQTQPILDISTTAEQDQTPNYLDVEKIKKQYNITLEKFQNTNPISRPYIPKQNSSRKLAQIINIINTKVLPQHISVEQDFVTTHTLIYCAAYTAATCNGTNIKDITSQPCQLQKRIPAWQKRLQKKIQNLRRDIGRLTEHINGNRTNRLTLLVEAIKNKYKIHSQHEEPNSSNEHFLDTLKQKLNAASSRLKRYLNCTLRKSQNTQFCNNEKKFYRILSSATQRNTNTNTQDITPPPANAIHTFWSNIWSDPVCHNTDAAWLDTDHEVINSIEPMNFEHISVEVFMRVLNKANNWKSPGSDHIHNYWYKKFTSTHSLLHKHMNNFIQTPNIMPHFVTQGLTFMIPKDTDHQNPAKYRPITCLQTIYKILTGCITELLHEHIAVNNILAEEQKGCRKGRQGCKEQLVIDSVTMKHAISKKKNINTMYIDYRKAFDSIPHSWLLYVLHHYKVHPQLIYFLENSMQNWKTTLKITGHANTETPDILIRRGIFQGDALSPLWFCLALNPLSNMLQKSNLGYIITTPHKDTTLTHLMYMDDIKLYSNTLQSLHHLADITQTFSKDIHMEFGIDKCKTFSVKNGKIVPNSYMLESGNIIEPLEEETTYKYLGFQQARKINQKETKNSLKTKFKHRLNILFRSQLNSHNLFKAINSYAIPVLTYSFGIINWSQCELHNLQRIINTTLTAHRKHHPRSCVQRMTLPRGEGGRGLIDIVNLHNKQITSLRHYFHQRSEYSPLHETVTLADKRFTPLNLKDRHPQKNERITDMNEKTALWRQKSLHGRHHHDLQQSHVDKAASNAWLRRGELFPETEAFMLAIQDQVIDTRNYQKHIIRTSNLQSDACRHCHSNPETIQHITSACRALAQTDYKHRHDQVSAIIHQHLAHKYNFIDKKIPYYKYKPDTILENNRYRIYWDRTIITDKTIHFNRPDITLHDKINKTVYLIDIAIPNTHNIQSTISEKLSKYQDLAIELKRQWRADTIHIVPIVISSTGIVPKSLQPSLDILHISHHTNHLLQKAVILNTCRLTRKFLTTSSISAAIT

SEQ ID NO: 26284 - protein, 1424 aa, Vanessa atalanta
MPFTTNGPKPKTQMEMSKKEYNLRPLPGVRRGASGADAGCYSMRTIGGEELSRRALINKIVTAGRCELNRRTHNVEATADPLGNETNTPSTRPQHMTQAEHEKDSDMLNDIISASPSPFNSYESPSSSPLSYQVSSRSNTISPMSVDVVQEAHAIEPAPATGTNRARKRWSDEMNKFIWRTYLIATKLNTSKIYLAHLHHEFSLKFPQMQASRQRLGDQCRAIVRNKLLSQEILEQIKEEVTESPQQTNNQDRTQNIQTNLSMQIHNSHQQGIKQRRRWTTEYNETIIRNYYTITELEANRSAYRQPLHQAVIAEHPELSEVSEQRISDQLRVILNNKMISDQKLKEIREEISNDLRLRRNHLENTSQHLTIPQNTASAENNNHPHISPQTQPILDISTIAEQDQTPNYLDVEKIKKQYNITLEKFQNTNPISRPYIPKQNSSRKLAQIINIINTKVLPQHISVEQDFVTTHTLIYCAAYTAATCNGTNIKDITSQPCQLQKRIPAWQKRLQKKIQNLRRDIGRLTEHINGNRTNRLTLLVEAIKNKYKIHSQHEEPNSSNEHFLDTLKQKLNAASSRLKRYLNCTLRKSQNTQFCNNEKKFYRILSSATQRYTNTNTQDITPPPANAIHTFWSNIWSDPVCHNTDAAWLDTDHEVINSIEPMNFEHISVEVFMRVLNKANNWKSPGSDHIHNYWYKKFTSTHSLLHKHMNNFIQTPNIMPHFVTQGLTFMIPKDTDHQNPAKYRPITCLQTIYKILTGCITELLHEHIAVNNILAEEQKGCRKDRQGCKEQLVIDSVTMKHAISKKKNINTMYIDYRKAFDSIPHSWLLYVLHHYKVHPQLIYFLENSMQNWKTTLKITGHANTETPDILMRRGIFQGDALSPLWFCLALNPLSNMLQKSNLGYIITTPHKDTTFTHLMYMDDIKLYSNTLQSLHHLADITQTFSKDIHMEFGIDKCKTFSVKNGKIVPNSYMLESGNIIEPLEEETTYKYLGFQQARKINQKETKNSLKTKFKHRLNILFRSQLNSHNLFKAINSYAIPVLTYSFGIINWSQCELHNLQRIINTTLTAHRKHHPRSCVQRMTLPRGEGGRGLIDIVNLHNKQITSLRHYFHQRSEYSPLHETVTLADKRFTPLNLKDRHPQKNERITDMNEKTALWRQKSLHGRHHHDLQQSHVDKAASNAWLRRGELFPETEAFMLAIQDQVIDTRNYQKHIIRTSNLQSDACRHCHSNPETIQHITSACRALAQTDYKHRHDQVSAIIHQHLAHKYNFIDKKIPYYKYKPDTILENNRYRIYWDRTIITDKTIHFNRPDITLHDKINKTVYLIDIAIPNTHNIQSTISEKLSKYQDLAIELKRQWRADTIHIVPIVISSTGIVPKSLQRSLDILHISHHTNHLLQKAVILNTCRLTRKFLTTSSISAAIT

SEQ ID NO: 26285 - protein, 764 aa, Vanessa cardui
MNFEHIPLEVFMRVLNKAHNWKSPGSDHIHNYWYKKFTSVHLLLHKHINKFIQTPNTMPHFVTQGLTFMIPKDNDHQNPAKYRPITCLQTIYKILTGCITELLHEHIAANNILTEEQKGCRKGRQGCKEQLIIDSVTMKHATSKKKNINTMYIDYRKAFDSIPHSWLLYVLQHYKIHPQLIYFLKNSMQNWKTTLKITGHSNTETLDILIRRGIFQGDALSPLWFCLALNPLSHMLHKSNLGYIINTPHKDTTLTHLMYMDDIKLYSDTIQSLHRLADITQTFSSDIHMKFGIDKCKTFSVKNGKIVSNSYILESGNIIEPLDEESTYKYLGFQQARKIDQKETKNSLKTKFKHRLNILFRSQLNSHNLFKAINSYAIPVLTYSFGIINWSQCELQNLQRIVNTTLTAHRKHHPRSCVQRMTLPRGEGGRGLIDIVNLHNKQITSLRHYFHQRSEYSPLHETVTLADKRLTPLNLNDRHPQKNERIIDMNEKTALWRQKSLHGRHRHDLQQPYVDKAASNAWLKRGELFPETEAFMLAIQDQVIDTRNYQKHIIRAPNLQSDTCRHCHSNPETIQHITSACRALAQTDYKHRHDQVSAIIHQHLAHKHNFINKKIPYYKYKPDTILENSRYRIYWDRTIITDKTIHFNRPDITLHDKTNKTVYLIDIAIPNTHNIQSTISEKLSKYQDLAIELKRQWRADTIHIVPIVISSTGVVPKSLQRSLDILHIPHHTNDLLQKAVILNTCRLTRKFLTTSSISAAYTIT

SEQ ID NO: 26286 - protein, 1329 aa, Vanessa tameamea
MTQAEREKDSDMLNEIISASPSPFNSYESPSSSPLSYQVFSRSNIISPMSVDVVQEAHAIEPTSATGTNRARKRWSDDMNKFIWRTYLIATKLNTSKIYLAHLHHEFSLKFPQMEASRQRLGDQCRAIVRNKLLPQEILEQIKQEVTESLQQTNNQDRTQNTQTNLSMQIHNSHQQGIRQRRRWTTEYNETIIRNYYKITELEENRSAYRQPLHQAVIAEHPELSEVSEQRISDQLRVILNNKMISDQKLKEIREEISNDLRLRRNHLENTSQHLTIPQNAAPAENNNHPHISPQTQPILDISAIAEQDQTTYYLDVEKIKKQYNITLEKFQNTNPISRPYIPKQNSSRKLAQIINVINTKILPQHISVEQDFVTTHTLIYCAAYTAATCNGTNIKDITSQPCQLQKRVPAWQKRLQKKIQDLRRDIGRLTEHINGNKTNRLTLLVEAIKNKYKIHSQHEEPNSSNEHFLDTLKQKLNAASSRLKRYLNCTLRKSQNTQFSNNEKKFYRILSSATQRNTSTNTQDITPPPANAIHTFWSSIWSDPVCHNTDAAWLVTDHEVINSIEPMNFEHISVEVFMRVLNKAHNWKSPGSDHIHNYWYKKFTSTHSLLHKHMNNFIQTPNLMPHFVTQGLTFMIPKDTDQQNPAKYRPITCLQTIYKILTGCITELLHEHIAVNNILAEEQKGCRKGRQGCKEQLVIDSVTMKHAISKKKNINTMYIDYRKAFDSIPHSWLLYVLQHYKIHPQLIYFLENSMQNWKTTLKITGHANTETPDILIRRGIFQGDALSPLWFCLALNPLSNMLQKSNLGYIITTPHKDTTLTHLMYMDDIKLYSDTIQSLHHLADITQTFSRDIHMEFGIDKCKTFSVKNGKVVPNSYILESGNIIEPLEEEATYKYLGFQQARNINQKETKNSLKTKFKHRLNILFRSQLNSHNLFKAINSYAIPVLTYSFGIINWSQCELHNLQRMINTTLTAHRKHHPRSCVQRMTLPRGEGGRGLIDIVNLHNKQITSLRHYFHQRSVYSPLHETVTLADKRFTPLNLKDRHPQKNERITDLNEKTALWRQKSLHGRHHHDLQQSYVDKAVSNAWLRRGELFPETEAFMLAIQDQVIDTRNYQKHIIRTSNLQSDTCRHCHSNPETIQHITSACRALAQTDYKHRHDQVSAIIHQHLAHKYNFIDKKIPYYKYKPDTILENNRYRIYWDRTIITDKTIHFNRPDITLHDKIKKNVYLIDIAIPNTHNIQSTISEKLSKYQDLAIELKRQWRADTIHIVPIVISSTGVVPKSLQRSLDILHIPHHTNHLLQKAVILNTCRLTRKFLTTSSISAAIT

SEQ ID NO: 26287 - protein, 1105 aa, Heliothis virescens
MISDQRLDEIRTEITQGINTYNTDNISLTTTQHATYTPQSADIQETDMLSSQNTASYELNPTLNTQSQSFLTDYQIPEFHQNRLSDTNDLEKIKDQFKKTFDRFLDTNPTDRPYIPKQKTSRRLAEIVDLINTKILPQYIATEQIFETTHTITYCAAYTAAISNGARIRESAAVPTQQQKRIPKWQKRLEKKIESLRRDIARLLEYARGTRSNRLILLIETIKNKYRIHSQHEEPNLNNEDFLDTLKQKLNAACSRLKRYVTCTLRKKQNSQFINNEKQFYRTLSSNTQNTSTAPQETLTPPADELHRFWSGIWAEPIQHNVDAEWLEADADIVDKITPMQFDHIPIDVFVKVLCKTHNWKAPGSDRIHNYWYKKFTALHPLLHTHINNFIQTPNSMPHFVTQGLTYMIPKDNNDYQNPAKYRPITCLQTIYKIITGCIAELLHQHINTDNNILAEEQKGCRKSSQGCKEQLIIDSVAMKTAIAKKTDINTMYIDYKKAFDSVPHSWLLNILQRYKIHPQITNFLENSMKHWTTTLKTLGPTTTVTDDIPIRRGIFQGDALSPLWFCLALNPLSHMLNKSKLGYTIKTPHKHTTLTHLMYMDDIKLYSDTKQSLHRLADITQSFSNDIHMEFGIDKCKTFSVSGGKISENSYTLDSGDVIEPLEPHTTYKYLGFQQARQINQKDTKENLKKKFKHRLNTICRSQLNSRNTSKAINSYAIPVLTYSFGIINWSQGDLLNLQRVINTTLTTHRKHHPRSCVQRMTLPRREGGRGIIDVANLHNRQITNLRQYFYHHSEHTTLHETVTLADTRLTPLNLADRNPQKNEKITDAKEKIATWRQKSLHGRHYHDLQQPHVDKTASNAWLQRGELFPETEAFMMAIQDQVIDTRNYQKHIMRVPNLPTDTCRHCHSSPETIQHITSACRSLAQTDYKHRHDQVASIIHQHLAHKLKFIDNKTAYYKYKPNTIFENNSHRLYWDRTIITDKTIHFNRPDITLFDKNNRIAYLIDIAIPNTHNIQSTIADKLTKYQDLAIELKRQWQAQTINIVPIVMSSTGVVPKSLKRSLDILEVPQYLSQIMQKAVLLNTCRITRKFLTTSSVSSTYSIT

SEQ ID NO: 26288 - protein, 1381 aa, Heliothis virescens
METRSKKKRIGPLPGGDRRGTPGADAGCLSMRSVSGEELSRRAPTMQYATADVEIDRSNSPIEPFSPSTISYVPSLSSSPSAISIDTSISHNLESHTLSEDVVQEALATEPAPAPGANRARKRWSEEMNIFIWRTYLIATKLNTSKIYLQHLHTEFSKKFPQMQASRQRLGDQCRAIQRNKLLSQEILDQITNEVKSYLQQTHTEPNTLTHSNTIPATGQRRRWTTEQNECIVRNYYKITEIDLNRSAYRPLLHQAVISEHPELSGVTEQRISDQLRVVLNNKMIPEQRLEEIRNEVSNRTSVSNTDDIYMFTQTTQSESTQENDIQPTFHSLNQSSLTHSQPHSPFTHSGPESHQNQVAYTIDMEKIEEQFKITIEKFRNTNPTDRPYIPKQKTSKKLAIIVDYINTKILPEYITPDQNFEVTHTYIYCAAHTAAICNGTKIRDSALLPNSPERRIPAWQKRLRKKIEELRRDIGRMSEYVKGSRSNRLIIRIEIIKNKYRIHSQHEEPNLSNEEFLDTLKQRLNAASSRLKRYITCTLRKQQNSRFTNNEKQFYRILTSNTQCITNRDTQHTTSPSPDELHRFWSGIWSEPVRHNTDAEWLEADADIIEKITPMQFEHIPIDVFVRVLNKAHNWKAPGSDQIHNYWYKKLTTVHPLIHNHINQFIQTPHSMPHFVTQGLTYMIPKDVNDYQNPAKYRPITCLQTIYKILTGCIAELLHDHTVKDNNILAEEQKGCRKSSQGCKEQLLIDSVAMKSAISKKKDINTMYIDYRKAFDSVPHSWLLNVLQRYKIHPLIVEFLEKSMQHWSTTLKTIGRSSTVTSEIPIRRGIFQGDALSPLWFCLALNPLSHILNKSKLGYTIETEHKHTTLTHLMYMDDIKLFSNTTQSLHHLADITQSFSNDIQMEFGIDKCKTFSINNGKVVQNSYTLNSGDIIDPLEPNTSYKYLGFQQARQIEQKETKETLKKKFKHRLNILFRSQLNSRNTTKAINSYAIPVLTYSFGIINWSQSDLLSLQRLINTTLTAHRKHHPRSCVQRITLSRREGGRGIIDVANLHNKQITNLRQYFYKQAQQSTLHELITLADNHLTPLNLADRNQQRNEKIVDTKEKIASWRQKSLHGRHYHDLQQPHVDKNASNAWLQRGELFPETEAFMMAIQDQVIDTRNYQKHIIRAPNLPTDTCRHCHASPETIQHITSACRSLAQTDYKHRHDQVASIVHQYLAHKFKFTQKKTAYYKYKPDTILENNSYRIYWDRTIITDKTIHFNRPDITLFNKTNRTVYLIDIAIPNTHNIQSTIADKLTKYQDLAIELKRQWQAQIIHIVPIVISSTGVIPKSLQRSLEILEIPLHTSHIIQKAVILNTCRITRKFLTTTSVSSTYSIA

SEQ ID NO: 26289 - protein, 932 aa, Craniophora ligustri
MDKFQNTDLNDRPYLPKQKTSKKIAQIVHYININILPHYITSEQGFETTQTIIYCAAYTASICTGCKIRDLEYQNTTTFTPKHKRIPPWQKRLQNKIQDFRRDIGRLTEYIKGNQSSRLKSLVEIIKNKYRIHSQHETANVSNDQFLDTLKQKLNAASSRLKRYLNCTQRKAQNSQFISNEKQFYRILSLDTQNNTNRTTIEISPPPADQLHSFWSGIWSEPVRHNANAEWLDTDHTDVSNTITPMTFEYIPVEVFIRVLNKTHNWKAPGTDHIHNYWYKKLTTIHHLLHKHINDFIQTPHIMPHYVTQGLTYMIPKDINDSNNPAKYRPITCLQTIYKILTACIAELIHEHTVKNNILSEEQKGCRKNSQGCKEQLIIDSVAMKHAITKKKNINTMYIDYQKAFDSVPHSWLLYVLNRYKIHPQIINFLESSMHHWTTTLKTMGQSSIRTPEIQIRRGIFQGDALSPLWFCLALNPLSHLLNKLNVGYNITTPHKHVTLSHLMYMDDIKLYSNTIQSLYQLADVAQSFSNDIHMEFGIDKCKIFSFNNGKIMPNTYTLQSGDTIEPLDQHTTYKYLGFHQARQINQKEAKQCLKRKFKHRLNILLRSQLNSRNLIKSINSYAIPILTYSFGIINWTQGDLLNLQRLINTTLTALRKHHPRSYVQRMTLPRIEGGRGIIDVINLHNKQITSLRHYFHQHAEHSTFHDVISIADKRLTPLNLLDRNIQRNERITDVKEKIAAWQQKSLHGRHHHDLQQSHVDKTASNAWLQRGELFPETEAFMMAIQDQVIDTRNYQKHIIRNLHTDTCRHCHSSPETIQHITSACRSLAQTDYKHRHDQVASIIHQHLAHKHKFIDKKTPYYKYLPDTILENNSARIYWDRTIITDKTIHFNRPDITLFNKNNKIVYLIDIAVPNTHNIQSTIAEKLTKYQN

SEQ ID NO: 26290 - protein, 1379 aa, Amyelois transitella
MVQTRSSSKRPQVLGGPSTSTGYDGSQPETGSRGAKNPRAEIPTRQTTRAMKKDNDMLSELDRKSTPSPFGSYESPSSSPYSFQTPFHSSSNSPMSVDVVQEADAIKPAPAIGSNRARKRWSDEMNKFIWRTYLIATKLNTNKIYLDHLYSEFARIFPDMQASKQRLGDQCRAIQRNKLLPQDTLDSIKEEVRIYLQETQHDQTHSHNTQTETNKRRRWTNDYNESIIRNYFKITELGNNKSAYRPPLHQAVITEFPELSDVSEQRISDQLRAILNNKYITEQRLKEIRDEVSRDIGINYNEHDTTQIEHISVQVDCTLECTNESDIENLPSSFLHTQSHNIQSSSPDANHQEQGNSDLITVERIRIEETFNTTLEKFEATDPTTRPFIPKQKPSKRLSNIANFINTQILPRHIKGNQDFLTTQTIIYCAAYTAAICNGSKIKDTFPHNSTNQHCKRIPNWQKRLEKKIKTIRGDIARMTEYMRGTASNRLKSLVELIKNKYRIHSQHEQPNITDQEFLDTIKQKLNAATSRLRRYINCTLRKSQNSQFINNEHQFYRKLSKDTQNTAPAQHYTTPIPNTELHRYWSEIWAKPVSHNINAEWLQNYNSFTDSTRPMQFEHIPIDIFVKVLQKAHNWKAPGSDRLHNYWYKKFTTIHPVLHNHINDFINTPHTMPDFITQGITYMIPKDSDHQNPAKYRPITCLQTIYKIITGCISELISKHATDNNILYEEQKGCRKGSQGCKEQLIIDSVVMKHALFKKKDISTMYIDYKKAFDSVPHTWLLFTLELYKIHPKLINFLKSSMQHWKTVLKTIEPFPTETMEIPIKRGIFQGDALSPLWFCLALNPLSYLLNKSNKGFTLSTPNSHTIITHLMYMDDIKLYSHSKDSLHQLADITQTFSNDICMAFGIDKCKTFTVVHGEITPHNYTLLSGNIIEPLDSNTFYKYLGFQQARQINQEDTKEDLRKKFRHRLNILLRSQLNSRNLCKSINSFAIPILTYSFGVINWTQGNLLNLQRIINTLLTSHRKNHPRSCLQRLTLPRDEGGRGLIDIINLHNKQIKSLRQYFYSRVGESTFHSVIVEADKKLTPLNLEDHNIQRKEQITDEKEKIATWKRKALHGRHRSDLEQPHVDKQASNSWLKRGELFPETEGFMIAIQDQVIDTRNYQKYIIRSNIPTDTCRHCHSNSETIQHITSACKSLAQTDYKHRHDQVASIIHQHLAHKYNFIPKKVPYYKYKPENIHDNSNYRIYWDRTIITDKTIHYNRPDITLHDKINKTAFLIDIAVPNTHNIQQTISQKLTKYQDLAIELKRQWRVESVHIVPIVISATGIIPKSLQKSLDMLNFSKGTLFLLQKAIILNTCRLTRKFLTTSSISSAFNTVM

SEQ ID NO: 26291 - protein, 1403 aa, Ephestia elutella
MFSLAFRGNKIGEVNKRYFLRSRPARYRDHPSNRADNRVEVDRSEGGSPPLSISSLFPSLASSRHSFSPHSSPTHAVSPASVVSTDFLNPHPHSSPTISPAMSIDVAHEAYAINRAPTTGTNRARKSWSEEMNRFIWRTYLIATKLNTSKIYLDHLYSEFTVKYPQMQASKQRLGDQCRAIVRNKLLPQEILDTIREEVRIYLQDTQHIHSSTYSNHQHEKGKRRRWTNEYNESIIRNYYKITELEGNKSAYRQLLHQTVTAEFPELSEVSEQRVSDQLRAILNNKYITDERLKEIRDEVTSDLGQIHNEQEIMQTPPPLDSLDDIRESSHQSITEILPSCSQTQSHNQSIIQTDYTQTSSLTEDLITENILEIQNNNETTTTEPNSIENTYRITLDKFQNTNPTTRPFIPRQKPSKKLSYIVNYINTHILPHHISIDHDFLTTQLIIYCAAYTAATCNGAKIKDINTNNTSNLNQRHKRIPAWQKRLEKRIKDIRKDIGRMTEYMRGTRSNRLTSLIEKIKNKYRIHSQHEHPNTTDQEYLDTIKQKLNAATSRLKRYLNCTLRKTQNAQFSNNERQFYRKLSEETQRIRPTQQPSETISNTELHSFWSEIWAKPVTHNTDAEWLNKDCDFIDSITPMQFEYIPIEIFVKVLQKAHNWKAPGSDCLHNFWYKKFTAVHTALHNHINDFIRDPHTMPDYITQGVTYMIPKDTDHQNPAKYRPITCLQTIYKILTGCITELINQHSNANNILSEEQKGCRKGSQGCKEQLVIDSVAMKQAIAKKKDISTMYIDYRKAFDSVPHTWLLHVLQRYKIHPTLIHFLENSMQNWTTVLKTTGPTSIQTPQIPIRRGIFQGDALSPLWFCLALNPLSHMLNQSIHGYTITTQNSQSIQLTHLLYMDDIKLYSNTTESLHFLADITQVFSNDIHMEFGIDKCKTFTVTNGEITPHSYTLTTGDTIDPLEPDTYYKYLGFQQARQISQEETKEELRKKFRHRLNILSRSQLNSRNLSKSINSYAIPVLTYSFGVINWTQSNLLSLQRTINTLLTFHRKHHPRSCLQRLTLPRYEGGRGLIDIVNLHNKQIKSLRQYFFSRVDGSILHKIIVDADKKLTPLNLADRNPQRKEQIIDSREKIATWNRKSLHGRHRHDLEQPYVDKQASNAWLRRGELFPETEGFMIAIQDQIIDTRNYQKYIIHANIPTDNCRHCHSSSETIQHITSACKSLAQSDYKHRHDQVASIIHQHLSHKHNFIPKKIPYYKYKPETIHDNSSCRIYWDRTIVTDKTIHFNRPDITLHDKINKTAYLIDIAIPNTHNIQATISQKLTKYQDLAIELKRQWRVESVHIVPIVISATGVVPKSLQKGLDMLKTNKNTLYLLQKAVILNTCRLTRKFLTTSSISTSFNTIL

SEQ ID NO: 26292 - protein, 1388 aa, Autographa pulchrina
MVQTRSKTKRPQVPGGSSSSTGDDGSQPAARPRGAKNPREAISPRQTTQASNMETDLLSERAINSSPSLTSSLSSLFESPSSSPQLYQVSSRSSTVSPQPGDVVQEANATDPAPATGVNRARKRWTEEINRFIWRTYLIATKLNTSKLYLDHLHYEFSLKYPQMQATRQRLGDQCRAIVRNRLLPQEVLEDIKNEVAAFLQRTQMDLETPTLTLPHNCSQQGQRRKWTTEFNEAIIRNYYKITELENNRSAYRRPLHQAVIAEHPELSEVSEQRISDQLRVILNNKMISDQRLHEIRDLVSNDLNLSSSRIENRLHIGPLSTTHTPLHDTIQEPDSYSATLTPHSFESGLQPPTTEFHSDFSNLEPEKIKDYFRTALDKFQNADPTSRPYIPKQKTSRRQAQILHFINTEILPQYITTDQDFITTHTIIYCAALTAAIFNGTKIRENDHSYDRNKRRMPPWQKRLQNKILGIRRDIARMTEYIRGNRTNRIIALVTEIKNKHRIHSQHEEPNTNDEHFVDTLKQKLNAASSRLKRYLNCTLRKTQNTQFLTNEKQFYRNLLSDTQRTRSTENASSNTPSADELHSFWSKIWSVPVSHNPNAEWLQADRNFIDSITPMEFEQIPIDIFMRVLNKTHNWKAPGSDRIHNFWYKKFTTIHPLLFAHINKFMQSPDIIPKFITQGLTYMIPKDADHHNPAKYRPITCLQTIYKLLTGCVAELLHQHTSKNNIISEEQKGCRKNSQGCKEQLVIDSVAMKQAIAMKKDINTMYIDYRKAFDSVPHSWLVFILQHYKVHPLIINFLKTSMQYWTTKLKTVGKTCLETPEIAIRRGIFQGDALSPLWFCLALNPLSTMLNSSAAGYGIIAPYKQVTLTHLMYMDDIKLYSDTSQSLHHLADITQTFSNHIHMEFGIDKCKTFSVKSGKISHNSYTLESGINIEPLEPNTFYKYLGFLQARQINQKEAKEELKKKFKHRLNILFRSQLNSRNLCKAINSYAIPVLTYSFGIIKWTQNDLHNLQRIINTTLTGHRKHHPRSCVQRMTLPRDEGGRAIIDISNLHNKQITTLRQYFYSTSEHSSIHEIVTLVDKHHTPLNLIDRNQQRNERIIDKKEKITLWQQKSLHGRHRHDLQQPHVDKVMSNAWLRRGELFPETEAFMMAIQDQVIDTRNYQKYIIRSPNLPTDTCRHCHACPETIQHITSACRSLAQNDYKHRHDQVASIIHQHLAHKNNFIAKKSPYYKYKPDTILEDQSCKIYWDRTIITDKTIHYNRPDITVHDKTSKTVFLIDIAVPNTHNIQSTISEKLTKYQDLAIELKRQWRAETIHVVPIVISATGIIPRSLQRCLDILDIPKHTFNTLQKAVILNTCRLTRKFFTTSSISSSYTVVYDVEVMLV

SEQ ID NO: 26293 - protein, 1370 aa, Nymphalis urticae
MEMNKRRYNLRPLPGVRRGASGADAGCYSMRTIGGEELSRRALTSKNVTAGRCELNRRTHNVEVTADPLGDDTNLLILSTPTTCSHNVTLAEDKKDSDLLSEIISSTSSPLNSYESPISSPLSCHISPNTISPTSVDVVQEALAIEPAPATDTSRARKRWSKEMNEFIWRTYLIATKLSTSKIYLDHLHHEFSRKFPQMQASRQRLGDQCRAIVRNKLLSQETLDQIKKEVTVYLLQTNNQDTVQNIQTYPNIQTHKHCNQGVRQRRRWTPEYNETIIRNYYKITELEENRSAYREPLYQAGIAEHPEFSEVSEQRISDQLRVILNNKMISDEKLKRIREEISNDLRVRRNRLELTSQHAMLSQNTTPVQASNHDGENNNHTHLFTPSTETHAPSDIAGNNELNQTTYYPDVEKIKEQYNITVQKFQNTNPVARPYIPKQNTSRKLARIVNIINTEIMPQQISAEQDFQTTHAIIYCAAYTAAVCNGTKIKDTTPQLNKQLKKETAWQKRLQKKIQDLRRDIGRLTEYNNGNRSNRLILLVEKIKNKHRIHSQHEEPNTNNEHFLDTLKQKLNASSSRLKRYLICTLRKSQNTHFSNNEKHFYRTLSSASQHNTRTDNQDLPSPPTNTIHSYWSSVWADPVNHNKDAAWLDPEEINSIKPMNFNHIPFDIFLRVLNKTHNWKAPGSDCIHNYWYKKFTSVHTLLHNHINDFIQTPNIMPHFVTQGLTYMIPKDTDHQNPAKYRPITCLQTIYKILTGCIAEILHEHVATNNILAEEQKGCRKSRQGCKEQLVIDTIAMKHATSRKKNINTMYIDYRKAFDSVPHSWLLYVLQYYKVHPQLIYFLESSMQNWKTKLKIAGQVKSETAEIPIRRGIFQGDALSPLWFCLALNPLSHMLNKSNLGYSITTPNTETTLTHLMYMDDIKLYSSTIASLHHLADITQTFSNDIHMEFGIDKCKTFSVKNGKIIPNSYILESGEIIEPLDPYTTYKYLGFEQARQIDQKGAKDSLKTKFRHRLNILFRSQLNSRNLFKAINSYAIPVLTYSFGIIKWSQCELLNIQRIINTSLTAHRKHHPRSCVQRMTLPRGEGGRGLIDVVNLHNKQIISLRHYFYQRSEHSALHKTVTLADKHFTPLNLKDQNPQKNERITDINEKTASRQQKSLHGRHRHDLQQSYVDKAASNAWLRRGELFPETEAFMLAIQDQVIDTRNYQKHIIRTLNIQSDSCRHCHSNPETIQHITSACRALAQTDYKHRHDQVSAIIHQHLAHKHNFIKKKTPYYKYKPNTILENNSYRIYWDRTIITDKTIHFNRPDITFHDKINKTIYLIDIAIPNTHNIQSTISEKLSKYQDLALELKRQWRANTIHIIPIVIS

SEQ ID NO: 26294 - protein, 1381 aa, Autographa gamma
MVQTRSKTKRPQVPGGSSSSTGDDGSQPAARPRGAKNPREAISLRQTTQASNMETDLLSEKAINSSPILTSSSSSLFESPSSSPQLYQVSSRSSTVSPQPGDVVQEANATDPAPATGVNRARKRWTEEMNRFIWRTYLIATKLNTTKVYLDHLHYEFSLKYPQMQATRQRLGDQCRAIVRNRLLPQEVLEDIKNEVAAFLQRTQTDPTSTLPNNCSQQGQRRKWTTEFNESIIRNYYRITELENNRSAYRRPLHQAVIAEHPELSEVSEQRISDQLRVILNNKMISDQRLQEIRDQVTIDLNLNSSGTIENYSHTESLRITHTPLQDGGIQEPNIQSSTLTGHSFESRLHTPTIELGSNFNHLEPEIIKDHFRTAVEKFRNADPTSRPYIPKQKTSRKQAQIVQFINIEILPQYITTDQDFNTTHTMIYCAAYTAAIFNGTKIKENENSHDKNIKRSPPWQRRLEKKILDIRRDIARMNEYIRGNRSSRIIELVAEIKNKHRIHSQHEEPNTNDEHFVDTLKQKLNAAASRLKRYINCTLRKTQNSQFSSNEKQFYRNLLSDTQRARTTEHTTPNTPLAEELHSFWSDIWSVPVNHNPDAEWLQADRSFTDSITPMEFEQIPIDIFMRVLNKTHNWKAPGSDRIHNFWYKKFTTTHRLLYRHINNFIQVPEAVPKFITQGVTYMIPKDTDHHNPAKYRPITCLQTIYKLLTGCVAELIHQHTSENNIVSEEQKGCRKNSQGCKEQLVIDSVAMKQAIAMKTDINTMYIDYRKAFDSVPHSWLVYILQHYKTHPLIINFLKTSMQNWTTRLKTVGKTCLETPEISIRRGIFQGDALSPLWFCLALNPLSHMLNKSSAGYGITAPNKQIKLTHLMYMDDIKLYSDTSQSLHHLADITQTFSNHIHMEFGIDKCKTFSVEQGKITQNSYALESGVNIEPLEPNTFYKYLGFLQARQINQKDTKEQLKKKFKHRLNILFRSQLNSRNLCKAINSYAIPVLTYSFSIINWTQNDLHNLQRIINTTLTAHRKHHPRSCVQRMTLPRDEGGRAIIDITNLHNKQITTLRQYFYNTSEHSLIHEIVILADKHHTPLKLVDRNPQRNERINDKKDKIALWQQKSLHGRHRHDLQQPHVDKVMSNAWLRRGELFPETEAFMMAIQDQVIDTRNYQKYIIRNPNLPTDTCRHCHACPETIQHITSACRSLAQNDYKHRHDQVASIIHQHLAHKHNFIAKKSPYYKYKPDTILEDQSCKIYWDRTIITDKTIHYNRPDITVHDKTSKTVFLIDIAVPNTHNIQSTISEKLTKYQDLAIELKRQWRAETIHVVPIVISATGIIPRSLQRCLDILDIPKHTFNTLQKAVILNTCRLTRKFFTTSSISSSYTTTLA

SEQ ID NO: 26295 - protein, 963 aa, Autographa gamma
MDQNFITTHTIIYCAAFTAAIFNGTKIRENDHSYDQNKLRIPPWQKRLQNKILGIRRDIARMAEYIKGNRTNRIIALVTEIKNKYRIHSQHEEPNTNDEHFVDTLKQKLNAASSRLKRYLNCTLRKTQNTQFSTNEKHFYRNLLSDTQRTRSTENASSNAPSADELYSFWSTIWSVLVSHNRDAEWLQADRNFIDSITPMEFEQIPIDIFMRVLHKTHNWKAPGSDRIHNFWYKKFTTIHPLLYTHINTFIQSPDVVPKFITQGLTYMIPKDADHHNPAKYRPITCLQTIYKLLTGCVAELIHQHSSKNKILSEEQKGCRKNSQGCKEQLVIDSVAMKQAIAMKKDINTMYIDYRKAFDSVPHSWLVFILQHYKVHPLIINFLKTSMQYWTTKLKTVGKTCLETPEIAIRRGIFQGDALSPLWFCLALNPLSTMLNSSTAGYSIIAPFKQVTLTHLMYMDDIKLYSDTSQSLHHLADITQTFSNHIHMEFGIDKCKTFSVKSGKIAHNSYTLDSGINIEPLESDTFYKYLGFLQARQINQKEAKEELKKKFKHRLNILFRSQLNSRNLCKAINSYAIPVLTYSFGIIKLTQNDLHNLQRIINTTLTAHRKHHPRSCVQRMTLPRDEGGRAIIDITNLHNKQITTLRQYFYNTSEHSLIHETVILADKHHTPLNLVDRNPQRNERINDKKDKITLWQQKSLHGRHRHDLQQPNVDKVMSNAWLRRGELFPETEAFMMAIQDQVIDTRNYQKYIIRSPNLPTDTCRHCHACPETIQHIISACRSLAQNDYKHRHDQVASIIHQHLAHKHNFIAKMSPYYKYKPDTILEDQSCKIYWDRTIITDKTIHYNRPDITVHDKTSKTVFLIDIAVPNTHNIQSTISEKLTKYQDLAIELKRQWRAETIHVVPIVISATGIIPRSLQRCLDILDTPKHTFNTLQKAVILNTCRLTRKFFTTSSISSSYTTS

SEQ ID NO: 26296 - protein, 1379 aa, Trichoplusia ni
MKIKKMVQTRSSTKRPQVPGGSSSSTGDDGSQPAARPRGAKNPREAITSRQTTTATNMDTDLQSETARNSSPSSTSSSPSLFSLFESPTSSPLFCQDSSRSSTVSPEPVDVAQEAIATNPAPTSGANRARKRWTEDMNRFIWRTYLIATKLNTSKLYLDHLHHEFSIKYPQMQATRQRLGDQSRAIVRNKLLSQETLDDIKREVTLFLQRTETDPAPPPLRVSHNFSQQLQRRKWTIEFNESIIRNYYKVTEVENNRSAYRRPLYQAVIAEHPELSEVSEQRISDQLRVVLKNKMISDQRLQEIRDQVSSELNLNSTNLENNSEIEPAFTETPLQDSTQESVSNLHAVAQPHFESGPNYDHVEPEKIKDQFKIAVEMFSAADPTSRPYIPKQKSSRKHAQTVQFINREILPQFTTTDLEFNTTHTLIYCAAYTAAILNGSKIKENNNAVNKDERRVPFWQERLQKKISGFRRDIGRMTQYIRGNRTSRIIHLVTEIKNKHRIHTQYEEPNINDEQFLDTLKQKLNAASNRLKRYLNCTLRKTQNAQFRNNERQFYRNLLLDKQRIRSPENTTSNTPTENEMHSFWSNIWSVSVNHDPDAEWLQADFNFVNSIAPMEFEHIPVDIFMRVLNKAHNWKAPGSDRIHNFWYKKFTTMHPLLYKHINNFIQTPDLIPKFITQGVTYMIPKDTDLHNPAKYRPITCLQTIYKLLTGCIAELLHQHTSENNIISEEQKGCRKNSQGCKEQLIIDSVTMKQAIAMKKDINTMYIDYRKAFDSVPHSWLIHVLKHYKVHPVIINFLKTSMQFWVTKLKTVGKTCLETSEIPIRRGIFQGDALSPLWFCLALNPLSYLLNTSSYGFHISTPHKQTTLTHLMYMDDIKLYSDTPQSLHRLADITQTFSNHIHMDFGIDKCKTLSVEHGKVVQNSYLLETGAYIEPLEPNTFYKYLGFLQARQINQKGSKEELKKKFKHRLNILFRSQLNSLNLCKAINSYAIPVLTYSFGIINWTQNDLHNLQRVINTTLTAHRKHHPRSCVQRITLPRDEGGRAIIDINNLHNKQITTLRQYFYYTSRQSSIHEIVSLADKRYTPLNLTDRDPQRNERILDKSEKITLWQQKSLHGRHRHDLQQPHVDKVMSNAWLRRGELFPETEAFMMAIQDQVIDTRNYQKYIIRNPNQRTDMCRHCHASSETIQHITSACRSLAQTDYKHRHDQVAAIVHQHLAHKHSFIAKKSPYYKYKPDTILENQSCKIYWDRTIITDKTIHYNRPDITVHEKTSKTVYLIDIAVPNTHNIQATISEKLSKYQDLAIELKRQWRAETIHVVPIVISATGIIPKSLQRCLDILDIPKYTFNTLQKAVILNTCRLTRKFFTTSAISTAYTTLI

SEQ ID NO: 26297 - protein, 1379 aa, Autographa gamma
MVQTRSKTKRPQVPGGSSSSTGDDGSQPAARPRGAKNPREAISLRQTTQASNMETDLLSEKAINSSPILTSSSSSLFESPSSSPQLYQVSSRSSTVSPQPGDVVQEANATDPAPATGVNRARKRWTEEMNRFIWRTYLIATKLNTTKVYLDHLHYEFSLKYPQMQATRQRLGDQCRAIVRNRLLPQEVLEDIKNEVAAFLQRTQTDPTSTLPNNCSQQGQRRKWTTEFNESIIRNYYRITELENNRSAYRRPLHQAVIAEHPELSEVSEQRISDQLRVILNNKMISDQRLQEIRDQVTIDLNLNSSSTIENYSHTESLRITHTSLQDGGIQEPNIQSSTLTGHSFESRLHTPTIESNLNHLEPEIIKDHFRTAVEKFRNADPTSRPYIPKQKTSRKQAQIVQFINIEILPQYITTDQDFNTTHTMIYCAAYTAAIFNGTKIKENENSHDKNIKRSPPWQRRLEKKILDIRRDIARMNEYIRGNRSSRIIELVAEIKNKHRIHSQHEEPNTNDEHFVDTLKQKLNAAASRLKRYINCTLRKTQNSQFSSNEKQFYRNLLSDTQRARTTEHTTPNTPLAEELHSFWSDIWSVPVNHNPDAEWLQADRSFTDSITPMEFEQIPIDIFMRVLNKTHNWKAPGSDRIHNFWYKKFTTTHRLLYRHINNFIQVPEAVPKFITQGLTYMIPKDTDHHNPAKYRPITCLQTIYKLLTGCVAELIHQHTSENNIVSEEQKGCRKNSQGCKEQLVIDSVAMKQAIAMKTDINTMYIDYRKAFDSVPHSWLVYILQHYKIHPLIINFLKTSMQNWTTRLKTVGKTCLETPEISIRRGIFQGDALSPLWFCLALNPLSHMLNKSSAGYGITAPNKQIKLTHLMYMDDIKLYSDTSQSLHHLADITQTFSNHIHMEFGIDKCKTFSVEQGKITQNSYALESGVNIEPLEPNTFYKYLGFLQARQINQKDTKEQLKKKFKHRLNILFRSQLNSRNLCKAINSYAIPVLTYSFGIINWTQNDLHNLQRIINTTLTAHRKHHPRSCVQRMTLPRDEGGRAIIDITNLHNKQITTLRQYFYNTSEHSLIHEIVILADKHHTPLKLEDRNPQRNERINDKKDKIALWQQKSLHGRHRHDLQQPHVDKVMSNAWLRRGELFPETEAFMMAIQDQVIDTRNYQKYIIRSPNLPTDTCRHCHACPETIQHITSACRSLAQNDYKHRHDQVASIIHQHLAHKHNFIAKKSPYYKYKPDTILEDQSCKIYWDRTIITDKTIHYNRPDITVHDKTSKTVFLIDIAVPNTHNIQSTISEKLTKYQDLAIELKRQWRAETIHVVPIVISATGIIPRSLQRCLDILDIPKHTFNTLQKAVILNTCRLTRKFFTTSSISSSYTTTLA

SEQ ID NO: 26298 - protein, 1383 aa, Autographa pulchrina
MVQTRSKTKRPQVPGGSSSSTGNDGSQPAARPRGAKNPREAISPRQTTQASNMETDLLSEKAINSSPSLTSSSSSLFESPSSSPHLYQVSSRSSTVSPQPGDVVQEANATDPAPTTGVIRARKRWTEEMNRFIWRTYLIATKLNTTKLYLDHLHYEFSLKYPQMQATRQRLGDQCRAIVRNRLLPQEVLEDIKNEVAAVLQRTQTDPETPTPTLPHNCSQQGQRRKWTTEFNESIVRNYYKITELENNRSAYRRPLHQAMIAEHPELSEVSEQRISDQLRVILNNKMISDQRLQEIRDQVTTDLNLNSSSIENDSHTVSLSITHTPLQDGGVQESNIHSSTLTAHLFESGLHTPTTEFQSNFNHLEPEKIKDHFRTAVEKFRNADPTNRPYIPKQKTSRKQAQIVQFINIEILPQYITTEQDFNTTHTIIYCAAYTAAIFNGTKIKENENSHDKTIRRSPPWQRRLQKKILDIRRDIARMNEYIRGNRSSRIIALVAEIKNKHRIHSQHEEPNTNDEHFVDTLKQKLNAAASRLRRYINCTLRKTQNTQFSSNEKQFYRNLLSDTQRARSTEYTTPNTPLAEELHSFWSNIWSVPVSHNPDAEWLQADRNFTDSITPMEFEQIPFDIFMRVLNKTHNWKAPGSDRIHNFWYKKFTTIHPLLYRHINNFIQLPEAVPKFITQGLTYMIPKDTDHHNPAKYRPITCLQTIYKLLTGCVAELIHQHTSENNIVSEEQKGCRKNSQGCKEQLIIDSVAMKQAIAMKKDINTMYIDYRKAFDSVPHSWLVYILQHYKIHPLIINFLKTSMQYWTTRLKTVGKTCLETPEISIRRGIFQGDALSPLWFCLALNPLSHMLNKSSAGYGIIAPNKQIKLTHLMYMDDIKLYSDTSQSLHYLADITQNFSNHIHMEFGIDKCKTFSVEQGKITQNSYALESGVNIEPLEPNTFYKYLGFLQARQINQKDTKEQLKKKFKHRLNILFRSQLNSRNLCKAINSYAIPVLTYSFGIINWTQNDLHNLQRIINTTLTAHRKHHPRSCVQRMTLPRDEGGRAIIDITNLHNKQITTLRQYFYNASEHSLIHEIVTLVDKHHTPLNLVDRNPQRNERINDKKDKITLWQQKSLHGRHRHDLQQPHVDKVMSNAWLRRGELFPETEAFMIAIQDQVIDTRNYQKYIIRSPNLPTDTCRHCHACPETIQHITSACRSLAQNDYKHRHDQVASIIHQHLAHKHNFIAKKSPYYKYKPDTILEDQSCKIYWDRTIITDKTIHYNRPDITVHDKNSKTVFLIDIAVPNTHNIQSTISGKLTKYQDLAIELKRQWRAETIHVVPIVISATGIIPRSLQRCLDILDIPKHTFNTLQKAVILNTCRLTRKFFTTSSISTSYTTTLA

SEQ ID NO: 26299 - protein, 1386 aa, Trichoplusia ni
MVQTRSSTKRPQVPGGSSSSTGDDGSQPVARPRGAKNPREAISTRQTTMATNMDTDMHIETARHSSPSLTSSSSPSLFSLFESPSSSPLFYQVSSRSSTESPEPGDVVQEAIAINPAPTPGTNRARKRWTEEMNRFIWRTYLIATKLNTSKLYLDHLHHEFSLKYPAMQASRQRLGDQCRAIVRNRLLPQSVLDDIKNDVVVLLQRSQTEPVAVTLPLSLISSQQGQRRKWTTEFNESIIKNYYRITELDNSRSAYRRPLHQAVIAEHPELSSVSEQRISDQLRVILNNKMISDQRLQEIRDLVSNDLNLNRIGSENYTDTETNYTTHTPAQDIVDVSNSHTGTLISEVCESGLQTLNTEIHSNFNHVEPEKIKDHFSATLLKFKNSDPTSRPYIPKQKTSRKQAQIVQFINTEILPQYIKTDLDFNSTHTLIYCAAYTAAIFNGTKIRENDTLQNNQDGSRVPSWQRRLEKKILGFRKDIARMTQYIRGNRSNRIIALVTEIKSKYRIHSQHEEPNLHDEQFLDTLKQKLNAASSRLKRYLNCTLRKTQNAQFRRNEKQFYRSLLSDAQRSRGTENTTPNTSLIDNLYSFWSNIWSVPIDHNPDAERLQADSSLVDSISPMVFEQIPLDIFMRVLNKTHNWKAPGSDRIHNFWYKKLSTIHPLLFTHINNFIQTPEVIPTFITQGLTYMIPKDTDQNNPAKYRPITCLQTIYKLLTGCVAELIQHTSENKIISEEQKGCRKSSQGCKEQLIIDSVTMKHAIAMKADINTMYIDYRKAFDSVPHSWLIFILKHYKIHPLIINFLKTSMQYWTTRLKTVGKTCLETSHIPIRRGIFQGDALSPLWFCLALNPLSYMLNSSTSGYHIITPNKHTTLTHLMYMDDIKLFSSTLQTLHQLADITQTFSNHIQMEFGIDKCKTFSIQQGKITQNRYTLETGVNIEALEPNSFYKYLGFLQARQIIQKETKEDLKKKFKLRLNAILRSQLNSRNLCKAINSYAIPILTYSFGIINWTQNDLQNMQRSIHTSLTTHRKHHPRSCVQRMTLPRDEGGRAIIDINNLHNKLITALRQYFYDTAEHSLIHEVVTLADKHYTPLNLKDKNTQRNERIIDKKEKITSWQQKSLHGRHRHDLQQPFVDKAMSNAWLTRGELFPETEAFMMAIQDQVIDTRNYQKYIIRSPNLPTDVCRHCHACSETIQHVTSACRSLAQNDYKHRHDQVAAIIHQHLAHKYNFIKKKIAYYKYKPETILENQCCKIYWDRTIITDKTIHYNRPDITLHNKVNKTIYLIDIAVPNTHNIQSTISEKITKYQDLAIELKRQWRAETIHVVPIVISATGIIPKTLRRCLDILDIPKHTFNTLQKAVILNTCRITRKFFTTSSISADFSTLLA

SEQ ID NO: 26300 - protein, 1164 aa, Autographa pulchrina
MSLPITRQQGQRRKWTTEYNESIITNYYRLTELGENRSAYRQPLYQAVIAEHPELSEVSEQRISDQLRVVLNNKMISEQRLTEIRNQVANSLCLSRNSVENSLHFTSPHFTDNTQESNLQSPSVTSQLLESQLQAPLESQNTIITSNLDVEKIKDQFKISLDKFRDTDPTRRPYIPKQKTSRKQAQIVQLINMHVLPDYIKSDQSFETTHTFIYCAAYTAAICNGTKIREGDNTPNQNKRRVPAWQRRLQKKILDMRRDIGRMTEYIKGNRSNRIITLVEVIKNKYRIHSQHEEPNSNNEHFLDTLKQKLNAAASRLKRYINCTLRKTQNSQFANNQKQFYRNLSVSTQHLRTSDNTAPGPSADDLHDFWSSIWAVPVQHNSEADWLQAGCNATDNITQMEFDHIPLDVFMYVLKKTHNWKAPGSDGIHNYWYKKLTSVHPVLYKHINNFIQTPNIIPRFVTQGLTYMIPKDTDHQDPAKYRPITCLQTVYKILTACIAELIHKHSSKNNILSEEQKGCRKSSQGCKEQLIIDSVAMKQAITMKKDINTMYVDYRKAFDSVPHSWLLHILRHYKVHHLLIQFLENSMQHWTTRLKTLGCMHTETSEIPIRRGIFQGDALSPLWFCLALNPLSHALNSCAAGFDITAPHKRVSLTHLMYMDDIKLYSNTPQSLHRLADMTQAFSNDIHMKFGIDKCKTLSVKRGQIIPNIYTLDSGETVEPLEANTTYKYLGFQQARQIHQKETKQELKQKFKHRLNTLFRSQLNSRNLSQAINSYAIPVLTYSFGLINWTQSDLVNLQRIINTSLTTHRKHHPRSCVQRMTLPRDEGGRGVIDISNLHNKQISTLRNYFYEYSDRSTLHEIVILADKHLTPLNLIDRNTQRNERITDMKDKIALWQQKSLHGRHRHDLQQPHVDKVMSNAWLRRGELFPETEAFMMAIQDQVIDTRNYQKHIIRSRNFPTDLCRHCHACSETIQHITSACRSLAQSDYKHRHDQVAAIIHQHLAHTYKFIPKKDPYYKYKPDAILENRNCKIYWDRTIITDKTIHFNRPDITLHNKINKTVYLIDIAVPNTHNLQSTISEKLSKYQDLAIELKRQWHAETIHVIPIVVSATGIIPKSLQRCLDVLDIPKHTLNTIQKAVVLNTCRLTRKFLTTSSVSTGYTTNT

SEQ ID NO: 26301 - protein, 1372 aa, Autographa gamma
MKTRSSSKRPQVPGGSSSSTGNDGSQPAARPRGAKNPREAISLRQTTTATNMEPEMQNDMDRFTETPSPFSLFESPSSSPIFYQASSRSSTVSPVPEDVVQEASATLSAPATGTKRARKRWTEDMNKFIWRTYLTATKLNTSKQYLDHLHREFTVTFPQMEASRQRLGDQCRAIIRNKLLPQNILDDIRNQVAILLEQTQLDEIAPSLMSLPVTSQPGQRRKWTTEYNESIITNYYRLTELGENRSAYRQPLYQAVIAEHPELSEVSEQRISDQLRVVLNNKMISEQRLTELRHQVANSLRLSRSDVENNLHFTSPHLTDDTQEPNLQSPSITSQLLESQLQTPLELQNTIINSNLDVEKIKDQFKISLDKFRDTDPTRRPYIPKQKTSRKQAQIVQLINMHVLPDYIKSDQSFETTHTVIYCAAYTAAICNGTKIREGDNTPNQNKRRVPARQRRLQKKILNIRRDIGRMTEYIKGNRGNRLITLIEVIKNKYRIHSQHEEPNSSNEHFLDTLKQKLNAATSRLKRYINCTLRKTQNSQFANNQKQFYRNLSASTQHLRTSDSTAPGPSADDLHDFWSSIWAVPVQHNSEADWLQAGCNATDNITQMEFDHIPLDVFMYVLKKTHNWKAPGSDGIHNYWYKKFTSVHPVLYNHINNFIQTPNIVPRFVTQGLTYMIPKDTDHQDPAKYRPITCLQTVYKILTACIAELIHKHSSKNNILSEEQKGCRKSSQGCKEQLIIDSVAMKQAISMKKDINIMYVDYRKAFDSVPHSWLLHILRHYKIHHLLIQFLENSMQHWTTRLKTLGCMHTETSEIPIRRGIFQGDALSPLWFCLALNPLSHALNSCDAGFDITAPHKRVSLSHLMYMDDIKLYSNTPESLHRLADMTQAFSNDIHMKFGIDKCKTLSVRRGQVISNFYTLDSGETVEPLEANTTYKYLGFQQARQIHQKETKQELKRKFKHRLNTLFRSQLNSRNLSQAINSYAIPVLTYSFGLINWTQSDLVNLQRTINTSLTTHRKHHPRSCVQRMTLPRDEGGRGVIDIVNLHNKQISTLRSYFYEYSDRSSLHEIVILADKHLTPLNLIDRNIQRNERITDMKDKIALWQQKSLHGRHRHDLQQPHVDKVMSNAWLRRGELFPETEAFMMAIQDQVIDTRNYQKHIIRSRNFPTDLCRHCHACSETIQHITSACRSLAQSDYKHRHDQVAAIIHQHLAHTHKFIPKKDPYYKYKPDAILENRNCKIYWDRTIITDKTIHFNRPDITLHNRINKTVYLIDIAVPNTHNLQSTISEKLSKYQDLAIELKRQWLAETIHVIPIVVSATGIIPKSLQRCLDLLDIPKHTLNTIQKAVLLNTCRLTRKFLTTSSVSSGYTTNT

SEQ ID NO: 26302 - protein, 955 aa, Autographa gamma
MIYCAAYTAAIFNGTKIKENENSHDKNIKRSPPWQRRLEKKILDIRRDIARMNEYIRGNRSSRIIELVAEIKNKHRIHSQHEEPNTNDEHFVDTLKQKLNAAASRLKRYINCTLRKTQNSQFSSNEKQFYRNLLSDTQRARTTEHTTPNTPLAEELHSFWSDIWSVPVNHNPDAEWLQADRSFTDSITPMEFEQIPIDIFMRVLNKTHNWKAPGSDRIHNFWYKKFTTTHRLLYRHINNFIQVPEAVPKFITQGLTYMIPKDTDHHNPAKYRPITCLQTIYKLLTGCVAELIHQHTSENNIVSEEQKGCRKNSQGCKEQLVIDSVAMKQAIAMKTDINTMYIDYRKAFDSVPHSWLVYILQHYKIHPLIINFLKTSMQNWTTRLKTVGKTCLETPEISIRRGIFQGDALSPLWFCLALNPLSHMLNKSSAGYGITAPNKQIKLTHLMYMDDIKLYSDTSQSLHHLADITQTFSNHIHMEFGIDKCKTFSVEQGKITQNSYALESGVNIEPLEPNTFYKYLGFLQARQINQKDTKEQLKKKFKHRLNILFRSQLNSRNLCKAINSYAIPVLTYSFGIINWTQNDLHNLQRIINTTLTAHRKHHPRSCVQRMTLPRDEGGRAIIDITNLHNKQITTLRQYFYNTSEHSLIHEIVILADKHHTPLKLEDRNPQRNERINDKKDKIALWQQKSLHGRHRHDLQQPHVDKVMSNAWLRRGELFPETEAFMMAIQDQVIDTRNYQKYIIRSPNLPTDTCRHCHACPETIQHITSACRSLAQNDYKHRHDQVASIIHQHLAHKHNFIAKKSPYYKYKPDTILEDQSCKIYWDRTIITDKTIHYNRPDITVHDKTSKTVFLIDIAVPNTHNIQSTISEKLTKYQDLAIELKRQWRAETIHVVPIVISATGIIPRSLQRCLDILDIPKHTFNTLQKAVILNTCRLTRKFFTTSSISSSYTTTLA

SEQ ID NO: 26303 - protein, 1403 aa, Acronicta aceris
MVLTRSSSKRPLVLGAPSSSTGSDGSQPETGRRGAKNPRAATEPRQTTQATQLDSDSLSERNSSTPSPFHSFESPRSSPYSYQVSSRSGTISPMSEDVVQEALATEPAPTPGTNRARKRWSEEMNKFIWRTYLIATKLNTSKIYLDHLHREFSIKYPQMQATRQRLGDQCRAIARNRLLPQEILDHIKDEVILYLQQTQNNQVHSNSPIQSHTQPHDSNPQQTGQRRRWTNEQNESILRNYFIITELETNKSAYRRPLQEAVTTDHPELLGVSEQRISDQLRVILKNKMISDQRIQEIRNTISRNFKVHPSNVDNNLTHMPQSQPTTLTPDLESTEEPVAQSHTAENIITPDTFSLAFAHTQIDESLTHTQSPSEPQHTQVTANIDELKIKEQFRAILDKFRDTDLSTRPYIPKQKTSRKLAHIVDFINTKILPNEITPEQNFETTHTVIYCAAYTAAMCNGTKIRDTTSTTDHQNQKRVPAWQVRLQNKIENIRRDIGRLTEYIRGNRSNRMILLVEKIKDKYRIHSQHEEPNLNDDHFLDTLKQKLNAASSRLKRYINCTLRKTQNTQFVNNEKQFYRNLSSNTQHNTNRTTQDTQSPQADELHNFWSGIWAEPVQHNAEAGWLNTDTEFIDKITPMTFEFIPVEVFIRVLHKAHNWKAPGTDRIHNYWYKKFTTLHPILHNHINNFILTPDTMPRYVTQGLTYMIPKDIHDYQNPAKYRPITCLQTIYKIITACIAELIHEHITKNNILSEEQKGCRKSSQGCKEQLIIDSVAMKHAITRKKNINTMYIDYKKAFDSVPHSWLLYVLQHYKIHPQIINFLKSSMHHWTTTLKTVGQTPVITSEIPICRGIFQGDALSPLWFCLALNPLSHLLNESNHGYTITAAHKHTKLTHLMYMDDIKLYSDTTQSLHHLADITQSFSNDIHMEFGIDKCKTFSVINGKIASNSYTLQTGSTVEPLEPHSSYKYLGFQQARQIKQKETKQTLIKKFKHRLNILFRSQLNSRNMCKAINSYAIPVLTYSFGIINWAQGDLLNLQRNINTTLTVFRKHHPRSCVQRMTLPRHEGGRGIIDIVNLHNKQITSLRHYFHQHAEYSTLHDVITYADRRITPLNLLDRNSQRNERITETKEKIATWQQKSLHGRHRHDLQQPHVDKTASNAWLRRGELFPETEAFMIAIQDQVIDTRNYQKHIIHAPNLPSDTCRHCHASPETIQHITSACRSLAQTDYKHRHDQVASIIHQHLAHAHKFIEKKTPYYKYTPNTILENNSHRIYWDRTIITDKTIHFNRPDITLYDKSNKTAYLIDIAVPNTHNIQTTIAEKLTKYQDLAIELKRQWRAETIHIVPIVISSTGVIPKTLQRSLDILQVPKYTLHLLQKAVILNTCRITRKFLTTSSVSSAYTIT

SEQ ID NO: 26304 - protein, 1280 aa, Autographa gamma
MMNKKLCLVPAILVLSTGVNRARKRWTEEINRFIWRTYLIATKLNTTKVYLDHLHYEFSLKYPQMQATRQRLGDQCRAIVRNRLLPQEVLEDIKNEVAAFLQRTQTDPTSTLPNNCSQQGQRRKWTTEFNESIIRNYYRITELENNRSAYRRPLHQAVIAEHPELSEVSEQRISDQLRVILNNKMISDQRLQEIRDQVTIDLNLNSSSTIENYSHTESLRITHTSLQDGGIQEPNIQSSTLTGHSFESRLHTPTIESNLNHLEPEIIKDHFRTAVEKFRNADPTSRPYIPKQKTSRKQAQIVQFINIEILPQYITTDQDFNTTHTMIYCAAYTAAIFNGTKIKENENSHDKNIKRSPPWQRRLEKKILDIRRDIARMNEYIRGNRSSRIIELVAEIKNKHRIHSQHEEPNTNDEHFVDTLKQKLNAAASRLKRYINCTLRKTQNSQFSSNEKQFYRNLLSDTQRARTTEHTTPNTPLAEELHSFWSDIWSVPVNHNPDAEWLQADRSFTDSITPMEFEQIPIDIFMRVLNKTHNWKAPGSDRIHNFWYKKFTTTHRLLYRHINNFIQVPEAVPKFITQGLTYMIPKDTDHHNPAKYRPITCLQTIYKLLTGCVAELIHQHTSENNIVSEEQKGCRKNSQGCKEQLVIDSVAMKQAIAMKTDINTMYIDYRKAFDSVPHSWLVYILQHNKIHPLIINFLKTSMQNWTTRLKTVGKTCLETPEISIRRGIFQGDALSPLWFCLALNPLSHMLNKSSAGYGITAPNKQIKLTHLMYMDDIKLYSDTSQSLHHLADITQTFSNHIHMEFGIDKCKTFSVEQGKITQNSYALESGVNIEPLEPNTFYKYLGFLQARQINQKDTKEQLKKKFKHRLNILFRSQLNSRNLCKAINSYAIPVLTYSFGIINWTQNDLHNLQRIINTTLTAHRKHHPRSCVQRMTLPRDEGGRAIIDITNLHNKQITTLRQYFYNTSEHSLIHEIVILANKHHTPLKLEDRNPQRNERINDKKDKIALWQQKSLHGRHRHDLQQPHVDKVMSNAWLRRGELFPETEAFMMAIQDQVIDTRNYQKYIIRSPNLPTDTCRHCHACPETIQHITSACRSLAQNDYKHRHDQVASIIHQHLAHKHNFIAKKSPYYKYKPDTILEDQSCKIYWDRTIITDKTIHYNRPDITVHDKTSKTVFLIDIAVPNTHNIQSTISEKLTKYQDLAIELKRQWRAETIHVVPIVISATGIIPRSLQRCLDILDIPKHTFNTLQKAVILNTCRLTRKFFTTSSISSSYTTTLA

SEQ ID NO: 26305 - protein, 1323 aa, Mellicta athalia
MASNTDNDNASDIYINPVPSTSLTLPDTSPKPHKLLPVLEDVVQEASAKEPGPASSSFCARKKWSKEMNKFIWRTYLIATKLRTNRVYLDYLHHEFSIKYPHMQASRQRLGDQCRAIERNKLLSQEILEQITKEVTEYLQETQNPLTQNKHMQPHLQPHSNSQQRSGHRRKWTNELNEAIVRNYYEITELGINRTAYRRPLHQAVLTEYPELSEVSEQRISDQLRVIFNSKMISDQRLEEIRQNIAKNRTTHTFTSNQSSTLIHSIEPENTSSDLDNINFHSQKHSIEQVNVNPNTPPHSEVQQSFTSVDSEKIQEQFLSAMNKFQNINPINRPYIPKQKTSRKLAHIVNFIDKNVIPHHISIEQDFETTHMIIYCAAYTAAISNGSRIKDVIKPHTPKNNRLPAWQKRLEKKIKDLRRDIARLTEYIRGNRSNRLTLLVEDIKNRHRIHSQHEEPNNSNEQFLDTLKQKLNAASSRLKRYLNCTLRKTQNSQFKNNEKQFYRNLTNNTQRLTTQDTISGPTAEELHSFWSNIWATPLYHNPNALCLESDYDSTNSITPMIFNDIPIEIFQFVLKKTHNWKAPGSDQIHNYWYKKFTTIHPLLHKHINDFIQSPEKLPKFITKGITYMIPKDTDYQNPAKYRPITCLQTFYKILTACIAELTQQHITNNNILTEEQKGCRKSSQGCKEQLIIDSITMKHAISSKNDINTMYIDYKKAFDSVPHSWLLHVLHHYKIHPQIINFLENSMQNWSTTLKTTGLGEIAIPEIPIRRGIFQGDAFSPLWFCLALNPLSKMLNGSNLGYTITTPQKNTTLSHLMYMDDIKLYSNSVQSLHNLADITQTFSNDIHMEFGIEKCKTLSIQNGKITPNQYILNSGQIIEPLDMYTSYKYLGFHQTRKIHQTETKKELKQKFKYRLNILFRSQLNSLNLSKAINTYSIPILTYSFGIIKWSQTDLKNLQRLINTTLTASRKRHPRSSIQRMTLPRVEGGRGIIDIVNLHNKQITTLRQYFHQRAEHSTLHNIITLADKQLTPLNLADRITQRNECTTDLKEKIALWQQKSLHGRHCHDLQQPFVDKEASNAWLQRGELFPETEAFMIAIQDQIIDTRNYQKHIIHAPNLITDMCRHCHANSETIQHITSACRTLAQTDYKHRHDQIASIIHQQLAHKYKFIQKKDPYYKYKPNQTLENSNCKLYWDRTIITDKTIHYNRPDITLHDKTSNTIYLIDIAVPNTHNIQSTISEKLTKYQDLAIELKRSWKADTVHIVPIVISATGIIPKSLKLSLDILQLPKYTLDSLQKATILNTCRITRKFLTTSSISSACVTL

SEQ ID NO: 26306 - protein, 1208 aa, Nymphalis urticae
MITTYQQVAVQRVADAVYLLQTNNQDTVQNIQTYPNIQTHKHCNQGVRQRRRWTPEYNETIVRNYYKITELEENRSAYRQPLYQAVIAEHPELSEVSEQRISDQLRVILNNKMISDEKLKRIREEISNDLRVRRNRLELTSQHAILSQNTTPVQASNHDGENNNHTHLFTPSTETHALSNIAGNNELNQTTYYPDVEKIKEQYNITVQKFQNTNPVARPYIPKQNTSRKLARIVNIINTEIMPQQISAEQDFQTTHAIIYCAAYTAAVCNGTKIKDTTPQLNKQLKKEPAWQKRLQKKIQDLRKDIERLTEYNNGNRSNRLILLVEKIKNKHRIHSQYEEPNTNNEHFLDTLKQKLNASSSRLKRYLNCTLRKSQNTHFSNNEKHFYRTLSSASQHNTRTDNQDLPSPPTNTIHSYWSSVWADPVNHNKDAAWLDPEEINSIKPMNFNHIPFDIFLRVLNKTHNWKAPGSDCIHNYWYKKFTSVHTLLHNHINDFIQTPNIMPHFVTQGLTYMIPKDTDHQNPAKYRPITCLQTIYKILTGCIAEILHEHVATNNILAEEQKGCRKSRQGCKEQLVIDTIAMKHATSRKKNINTMYIDYRKAFDSVPHSWLLYVLQYYKVHPQLIYFLESSMQNWKTKLKIAGQVKSETAEIPIRRGIFQGDALSPLWFCLALNPLSHMLNKSNHGYSITTPNTETTLTHLMYMDDIKLYSSTIASLHHLADITQTFSNDIHMEFGIDKCKTFSVKNGKIIPNSYILESGEIIEPLEPYTTYKYLGFEQARQIDQKGAKDSLKTKFRHRLNILFRSQLNSRNLFKAINSYAIPVLTYSFGIIKWSQCELLNIQRIINTSLTAHRKHHPRSCVQRMTLPRGEGGRGLIDVVNLHNKQIISLRHYFYQRSEHSTLHKTVTLADKHFTPLNLKDQNPQRNERITDINEKTASWQQKSLHGRHRHDLQQSYVDKAASNAWLRRGELFPETEAFMLAIQDQVIDTRNYQKHIIRTLNIQSDSCRHCHSNPETIQHITSACRALAQTDYKHRHDQVSAIIHQHLAHKHNFIKKKTPYYKYKPNTILENNSYRIYWDRTIITDKTIHFNRPDITFHDKINKTIYLIDIAIPNTHNIQSTISEKLSKYQDLAIELKRQWRANTIHIIPIVISSTGVVPKSLQRSLDMLQVPQHTHNLLQKAIILNTCRLTRKFLTTSSISSSYTIT

SEQ ID NO: 26307 - protein, 1379 aa, Autographa gamma
MVQTRSKTKRPQVPGGSSSSTGDDGSQPAARPRGAKNPREAISLRQTTQASNMETDLLSEKAINSSPILTSSSSSLFESPSSSPQLYQVSSRSSTVSPQPGDVVQEANATDPAPATGVNRARKRWTEEMNRFIWRTYLIATKLNTTKVYLDHLHYEFSLKYPQMQATRQRLGDQCRAIVRNRLLPQEVLEDIKNEVAAFLQRTQTDPTSTLPNNCSQQGQRRKWTTEFNESIIRNYYRITELENNRSAYRRPLHQAVIAEHPELSEVSEQRISDQLRVILNNKMISDQRLQEIRDQVTIDLNLNSSSTIENYSHTESLRITHTSLQDGGIQEPNIQSSTLTGHSFESRLHTPTIESNLNHLEPEIIKDHFRTAVEKFRNADPTSRPYIPKQKTSRKQAQIVQFINIEILPQYITTDQDFNTTHTMIYCASYTAAIFNGTKIKENENSHDKNIKRSPPWQRRLEKKILDIRRDIARMNEYIRGNRSSRIIELVAEIKNKHRIHSQHEEPNTNDEHFVDTLKQKLNAAASRLKRYINCTLRKTQNSQFSSNEKQFYRNLLSDTQRARTTEHTTPNTPLAEELHSFWSDIWSVPVNHNPDAEWLQADRSFTDSITPMEFEQIPIDIFMRVLNKTHNWKAPGSDRIHNFWYKKFTTTHSLLYRHINNFIQVPEAVPKFITQGLTYMIPKDTDHHNPAKYRPITCLQTIYKLLTGCVAELIHQHTSENNIVSEEQKGCRKNSQGCKEQLVIDSVAMKQAIAMKTDINTMYIDYRKAFDSVPHSWLVYILQHYKIHPLIINFLKTSMQNWTTRLKTVGKTCLETPEISIRRGIFQGDALSPLWFCLALNPLSHMLNKSSAGYGITAPNKQIKLTHLMYMDDIKLYSDTSQSLHHLADITQTFSNQIHMEFGIDKCKTFSVEQGKITQNSYALESGVNIEPLEPNTFYKYLGFLQARQINQKDTKEQLKKKFKHRLNILFRSQLNSRNLCKAINSYAIPVLTYSFGIINWTQNDLHNLQRIINTTLTAHRKHHPRSCVQRMTLPRDEGGRAIIDITNLHNKQITTLRQYFYNTSEHSLIHEIVILADKHHTPLKLEDRNPQRNERINDKKDKIALWQQKSLHGRHRHDLQQPHVDKVMSNAWLRRGELFPETEAFMMAIQDQVIDTRNYQKYIIRSPNLPTDTCRHCHACPETIQHITSACRSLAQNDYKHRHDQVASIIHQHLAHKHNFIAKKSPYYKYKPDTILEDQSCKIYWDRTIITDKTIHYNRPDITVHDKTSKTVFLIDIAVPNTHNIQSTISEKLTKYQDLAIELKRQWRAETIHVVPIVISATGIIPRSLQRCLDILDIPKHTFNTLQKAVILNTCRLTRKFFTTSSISSSYTTTLA

SEQ ID NO: 26308 - protein, 1403 aa, Acronicta aceris
MVLTRSSSKRPLVLGAPSSSTGSDGSQPETGRRGAKNPRAATEPRQTTQATQLDSDSLSERNSSTPSPFHSFESPRSSPYSYQVSSRSGTISPMSEDVVQEALATEPAPTPGTNRARKRWSEEMNKFIWRTYLIATKLNTSKIYLDHLHREFSIKYPQMQATRQRLGDQCRAIARNRLLPQEILDHIKDEVILYLQQTQNNQVHSNSPIQSHIQPHDSNPQQTGQRRRWTNEQNESILRNYFIITELETNKSAYRRPLQEAVTTDHPELLGVSEQRISDQLRVILKNKMISDQRIQEIRNTISRNFKVHSSNVDNNLTNMPQSQPTTLTPDLESTEEPVAQSHTAENIITPDTFSLAFAHTQIDESLTHTQSPSEPQHTQVTANIDELKIKEQFRAILDKFRDTDLSTRPYIPKQKTSRKLAHIVDFINTKILPNEITPEQNFETTHTVIYCAAYTAAMCNGTKIRDTTSTTDHQNKKRVPAWQVRLQNKIENIRRDIGRLTEYIRGNRSNRMILLVEKIKDKYRIHSQHEEPNLNDDHFLDTLKQKLNASSSRLKRYINCTLRKTQNTQFVNNEKQFYRNLSSNTQHNTNRTTQDTQSPQADELHNFWSGIWAEPVQHNAEAGWLNTDTEFIDKITSMTFEFIPVEVFIRVLHKAHNWKAPGTDRIHNYWYKKFTTLHPILHNHINNFILTPDTMPRYVTQGLTYMIPKDIHDYQNPAKYRPITCLQTIYKIITACIAELIHEHITKNNILSEEQKGCRKSSQGCKEQLIIDSVAMKHAITRKKNINTMYIDYKKAFDSVPHSWLLYVLQHYKIHPQIINFLKSSMHHWTTTLKTVGQTPVITSEIPICRGIFQGDALSPLWFCLALNPLSHLLNESNHGYTITAAHKHTKLTHLMYMDDIKLYSNTTQSLHHLADITQSFSNDIHMEFGIDKCKTFSVINGKIASNSYTLQTGSTVEPLEPHSSYKYLGFQQARQIKQKETKQTLIKKFKHRLNILFRSQLNSRNMCKAINSYAIPVLTYSFGIINWAQGDLLNLQRNINTTLTVFRKHHPRSCVQRMTLPRHEGGRGIIDIVNLHNKQITSLRHYFHQHAEYSTLHDVITYADRRLTPLNLLDRNSQRNERITETKEKIATWQQKSLHGRHRHDLQQPHVDKTASNAWLRRGELFPETEAFMIAIQDQVIDTRNYQKHIIHAPNLPSDTCRHCHASPETIQHITSACRSLAQTDYKHRHDQVASIIHQHLAHAHKFIEKKTPYYKYTPNTILENNSHRIYWDRTIITDKTIHFNRPDITLYDKSNKTAYLIDIAVPNTHNIQTTIAEKLTKYQDLAIELKRQWRAETIHIVPIVISSTGVIPKTLQRSLDILQVPKYTLHLLQKAVILNTCRITRKFLTTSSVSSAYTIT

SEQ ID NO: 26309 - protein, 1371 aa, Mellicta athalia
MVLTRSSSKRPQVPGGPSTRTGCDGNQSGAEPRGAKNLRVATLSRQTTMASNTDNDNASDIYIDPVPSTSLTLPDTSPKPHKLLPVLEDVVQEASAKEPGPASSSFCARKKWSKEMNKFIWRTYLIATKLRTNRVYLDYLHHEFSIKYPHMQASRQRLGDQCRAIERNKLLSQEILEQITKEVTEYLQETQNPLTQNKHMQPHLQPHSNSQQRSGHRRKWTNELNEAIVRNYYEITELGINRTAYRRPLHQAVLTEYPELSEVSEQRISDQLRVIFNSKMISDQRLEEIRQNIAKNRTTHTFTSNQSSTLIHSIEPENTSSDLDNINFHSQKHSIEQVNINPNTQPHSEVQQSFTSVDSEKIQEQFLSAMNKFQNINPINRPYIPKQKTSRKLAHIVNFIDKNVIPHHISIEQDFETTHMIIYCAAYTAAISNGSRIKDVIKPHTPKNNRLPAWQKRLEKKIKDLRRDIARLTEYIRGNRSNRLTLLVEDIKNRHRIHSQHEEPNNSNEQFLDTLKQKLNAASSRLKRYLNCTLRKTQNSQFKNNEKQFYRNLTNNTQRLTTQDTISGPTAEELHSFWSNIWATPLYHNPNALCLESDYDSTNSITPMIFNDIPIEIFQFVLKKTHNWKAPGSDQIHNYWYKKFTTIHPLLHKHINDFIQSPEKLPKFITKGITYMIPKDTDYQNPAKYRPITCLQTFYKILTACIAELTQQHITNNNILTEEQKGCRKSSQGCKEQLIIDSITMKHAISSKNDINTMYIDYKKAFDSVPHSWLLHVLHHYKIHPQIINFLENSMQNWSTTLKTTGLGEIAIPEIPIRRGIFQGDAFSPLWFCLALNPLSKMLNGSNLGYTITTPQKNTTLSHLMYMDDIKLYSNSVQSLHNLADITQTFSNDIHMEFGIEKCKTLSIQNGKITPNQYILNSGQIIEPLDMYTSYKYLGFHQTRKIHQTETKKELKQKFKYRLNILFRSQLNSLNLSKAINTYSIPILTYSFGIIKWSQTDLKNLQRLINTTLTASRKRHPRSSIQRMTLPRVEGGRGIIDIVNLHNKQITTLRQYFHQRAEHSTLHNIITLADKQLTPLNLADRITQRNECTTDLKEKIALWQQKSLHGRHCHDLQQPFVDKEASNAWLQRGELFPETEAFMIAIQDQIIDTRNYQKHIIHAPNLITDMCRHCHANSETIQHITSACRTLAQTDYKHRHDQIASIIHQQLAHKYKFIQKKDPYYKYKPNQTLENSNCKLYWDRTIITDKTIHYNRPDITLHDKTSNTIYLIDIAVPNTHNIQSTISEKLTKYQDLAIELKRSWKADTVHIVPIVISATGIIPKSLKLSLDILQLPKYTLDSLQKATILNTCRITRKFLTTSSISSACVTL

SEQ ID NO: 26310 - protein, 1367 aa, Trichoplusia ni
MVQTRSSTKRPQVPGGSSSSTGNDGSQPAARPRGAKNPREAISTRQTTLATNMETEMQSDMDRNSLTPSPFSLFESPSSSPQFYQVSSRSSTVSPLLGDVVQEANATISAPASGTNRARKRWTEEMNKFIWRTYLIATKLNTSKLYLDYLYQEFSGKYPQMEASRQRLGDQCRAIVRNKLLAQDVLDGIKDEAAIVLQQTQSVSIAQTPQRITGQQGQRRKWTTEYNESIVRNYYEITKLGESRSAYRQPLHQAIIAEHPELSEVSEQRISDQLRVVLNNKMISEQRLSEIREQVANSLNMGPVNAANSLPTSGPTDTGNWQETESPILTTQILETQIPTPLHENIELNLHLESDKIREQFRTSLDKFKDTNPTMRPYIPKQKTSRKQAKIVQLINTEILPQHLKEEQSFETFHTIIYCAAYTAAVCNGTKIREGDDSPNLNKRRVPAWQRRLKKKILEFRKDIGRMTEYIRGNRSNRIIRVVEAIKNKYRIHSQHEEPNTNDEHFLDTLKQKLNAAASRLKRYLNCTLRKTQNTQFSNNQKQFYRNLTANTQNYRHTETTALSPSADDLCEFWSNIWAIPAQHNSEADWLQADSNLRDKITEMQFEHIPLDIFMYVLKKTHNWKAPGSDRIHNYWYKKLTSIHPFLYKHINNSIHTPDLVPRFITQGLTYMIPKDTEHHNPAKYRPITCLQTVYKILTACIAELIHKHSSENNILSEEQKGCRKSSQGCKEQIIIDSVVMKQAIALKRDINTMYIDYRKAFDSVPHSWLIYVLRQYKVHPQLIQFLEKSMQQWSTRLKTVGHVYTETSEIPIRRGIFQGDALSPLWFCLALNPLSHMLNNLTGGYNITTPMKNINLTHLMYMDDIKLYSNTSQSLHLLADITQKFSSDVCMEFGIDKCKTLSVKSGQIIPNSYILDSGDIIEPLEPNSFYKYLGFQQARQINQKVTKQELKNKFKHRLNGLLRSQLNSRNLCQAINSYAIPVLTYSFGLITWTQNDLLSLQRIINTSLTTHRKHHPRSCVQRMTLPRDEGGRGIIDIANLHSKQISTLRHYFFEHLEHSTLHEVVTIADKHYTPLNLADRHPQRKERVIGANEKIVAWQQKSLHGRHRHDLQQPHVDKVMSNAWLRRGELFPETEAFIMAIQDQVIDTRNYQKYIIRNPNCPSDLCRHCRASPETIQHITSACRSLAQSDYKHRHDQVAAIIHQHLAHKHDFILKKDPYYKYKPDAILENNNFKIYWDRTIITDKTIHFNRPDITFHNKINKTVYLIDIAVPNTHNLQSTISEKLSKYQDLAIELKRQWHAETIHVIPIVISATGIIPKSLRRCLDMLDVPEHILNTLQKAVILNTCRLTRKFLTTSSVSAGYTTN

SEQ ID NO: 26311 - protein, 1371 aa, Mellicta athalia
MVLTRSSSKRPQVPGGPSTRTGCDGNQSGAEPRGAKNLRVATLSRQTTMASNTDNDNASDIYIDPVPSTSLTLPDTSPKPHKLLPVLEDVVQEAYAKEPGPASSSFCARKKWSKEMNKFIWRTYLIATKLRTNRVYLDYLHHEFSIKYPHMQASRQRLGDQCRAIERNKLLSQEILEQITKEVTEYLQETQNPLTQNKHMQPHLQPHSNSQQRSGHRRKWTNELNEAIVRNYYEITELGINRTAYRRPLHQAVLTEYPELSEVSEQRISDQLRVIFNSKMISDQRLEEIRQNIAKNRTTHTFTSNQSSTLIHSIEPENTSSDLDNINFHSQKHSIEQVNINPNTQPHSEVQQSFTSVDSEKIQEQFLSAMNKFQNINPINRPYIPKQKTSRKLAHIVNFIDKNVIPHHISIEQDFETTHMIIYCAAYTAAISNGSRIKDVIKPHTPKNNRLPAWQKRLEKKIKDLRRDIARLTEYIRGNRSNRLTLLVEDIKNRHRIHSQHEEPNNSNEQFLDTLKQKLNAASSRLKRYLNCTLRKTQNSQFKNNEKQFYRNLTNNTQRLTTQDTISGPTAEELHSFWSNIWATPLYHNPNALCLESDYDSTNSIKPMIFNDIPIEIFQFVLKKTHNWKAPGSDQIHNYWYKKFTTIHPLLHKHINDFIQSPEKLPKFITKGITYMIPKDTDYQNPAKYRPITCLQTFYKILTACIAELTQQHITNNNILTEEQKGCRKSSQGCKEQLIIDSITMKHAISSKNDINTMYIDYKKAFDSVPHSWLLHVLHHYKIHPQIINFLENSMQNWSTTLKTTGLGEIAIPEIPIRRGIFQGDAFSPLWFCLALNPLSKMLNGSNLGYTITTPQKNTTLSHLMYMDDIKLYSNSVQSLHNLADITQTFSNDINMEFGIEKCKTLSIQNGKITPNQYILNSGQIIEPLDMYTSYKYLGFHQTRKIHQTETKKELKQKFKYRLNILFRSQLNSLNLSKAINTYSIPILTYSFGIIKWSQTDLKNLQRLINTTLTASRKRHPRSSIQRMTLPRVEGGRGIIDIVNLHNKQITTLRQYFHQRAEHSTLHNIITLADKQLTPLNLADRITQRNECTTDLKEKIALWQQKSLHGRHCHDLQQPFVDKEASNAWLQRGELFPETEAFMIAIQDQIIDTRNYQKHIIHAPNLITDMCRHCHANSETIQHITSACRTLAQTDYKHRHDQIASIIHQQLAHKYKFIQKKDPYYKYKPNQTLENSNCKLYWDRTIITDKTIHYNRPDITLHDKTSNTIYLIDIAVPNTHNIQSTISEKLTKYQDLAIELKRSWKADTVHIVPIVISATGIIPKSLKLSLDILQLPKYTLDSLQKATILNTCRITRKFLTTSSISSACVTL

SEQ ID NO: 26312 - protein, 1346 aa, Autographa gamma
MVQTRSKTKRPQVPGGSSSSTGDDGSQPAARPRGAKNPREAISLRQATQASNMETDLLSEKAINSSPILTSSSSSLFESPSSSPQLYQVSSRSSTVSPQPGDVVQEANATDPAPATGVNRARKRWTEEMNRFIWRTYLIATKLNTTKVYLDHLHYEFSLKYPQMQVTRQRLGDQCRAIVRNRLLPQEVLEDIKNEVAAFLQRTQTDPTSTLPNNCSQQGQRRKWTTEFNESIIRNYYRITELENNRSAYRRPLHQAVIAEHPELSEVSEQRISDQLRVILNNKMISDQRLQEIRDQVTIDLNLNSSSTIENYSHTESLRITHTPLQDGGIQEPNIQSSTLTGHSFESRLHTPTIELESNFNHLEPEIIKDHFRTAVEKFRNADPTSRPYIPKQKTSRKQAQIVQFINIEILPQYITTDQDFNTTHTMIYCAAYTAAIFNGTKIKENDNSHDKNIKRSPPWQRRLEKKILDIRRDIARMNEYIRDTLKQKLNAAASRLKRYINCTLRKTQNSQFSSNEKQFYRNLLSDTQRARTTEHTTPNTPLAEELHSFWSDIWSVPVNHNPDAEWLQADRSFTDSITPMEFEQIPIDIFMRVLNKTHNWKAPGSDRIHNFWYKKFTTTHRLLYRHINNFIQVPEAVPKFITEGLTYMIPKDTDHHNPAKYRPITCLQTIYKLLTGCVAELIHQHTSENNIVSEEQKGCRKNSQGCKEQLVIDSVAMKQAIAMKTDINTMYIDYRKAFDSVPHSWLVYILQHYKIHPLIINFLKTSMQNWTTRLKTVGKTCLETPEISIRRGIFQGDALSPLWFCLALNPLSHMLNKSSAGYGITAPNKQIKLTHLMYMDDIKLYSDTSQSLHHLADITQTFSNHIHMEFGIDKCKTFSVEQGKITQNSYALESGVNIEPLEPNTFYKYLGFLQARQINQKDTKEQLKKKFKHRLNILFRSQLNSRNLCKAINSYAIPVLTYSFGIINWTQNDLHNLQRIINTTLTAHRKHHPRSCVQRMTLPRDEGGRAIIDITNLHNKQITTLRQYFYNTSEHSLIHEIVILADKHHTPLKLVDRNPQRNERINDKKDKIALWQQKSLHGRHRHDLQQPHVDKVMSNAWLRRGELFPETEAFMMAIQDQVIDTRNYQKYIIRSPNLPTDTCRHCHACPETIQHITSACRSLAQNDYKHRHDQVASIIHQHLAHKHNFIAKKSPYYKYKPDTILEDQSCKIYWDRTIITDKTIHYNRPDITVHDKTSKTVFLIDIAVPNTHNIQSTISEKLTKYQDLAIELKRQWRAETIHVVPIVISATGIIPRSLQRCLDILDIPKHTFNTLQKAVILNTCRLTRKFFTTSSISSSYTTTLA

SEQ ID NO: 26313 - protein, 1383 aa, Autographa pulchrina
MVQTRSKTKRPQVPGGSSSSTGDDGSQPAARPRGAKNPREAISPRQTTQASNMETDLLSEKAINSSPSLTSSSSSLFESPSSSPQLYQVSSRSSTVSPQPGDVVQEANATDPAPTTGVIRARKRWTEEMNRFIWRTYLIATKLNTTKLYLDHLHYEFSLKYPQMQATRQRLGDQCRAIVRNRLLPQEVLEDIKNEVAAFLQRTQTDPETPTPTLPHNCSQQGQRRKWTTEFNESIVRNYYKITELENNRSAYRRPLHQAMIAEHPELSEVSEQRISDQLRVILNNKMISDQRLQEIRDQVTTDLNLNSSSIENDSHTVSLSITHTPLQDGGIQEPNIHSSTLTAHLFESGLHTPTTEFQPNFNHLEPEKIKDHFRTAVEKFRNADPTNRPYIPKQKTSRKQAQIVQFINIEILPQYITTEQDFNTTHTIIYCAAYTAAIFNGTKIKENENSHDKTVRRSPPWQRRLQKKILDIRRDIARMNEYIRGNRSSRIIALVAEIKNKHRIHSQHEEPNTNDEHFVDTLKQKLNAAASRLRRYINCTLRKTQNTQFSSNEKQFYRNLLSDTQRARSTEYTTPNTPLAEELHSFWSNIWSVPVSHNPDAEWLQADRNFADSITPMEFEQIPFDIFMRVLNKTHNWKAPGSDRIHNFWYKKFTTIHPLLYRHINNFIQLPETVPKFITQGLTYMIPKDTDHHNPAKYRPITCLQTIYKLLTGCVAELIQQHTSENNIVSEEQKGCRKNSQGCKEQLIIDSVAMKQAIAMKKDINTMYIDYRKAFDSVPHSWLVYILQHYKIHPLIINFLKTSMQYWTTRLKTVGKTCLETPEISIRRGIFQGDALSPLWFCLALNPLSHMLNKSSAGYGIIAPNKQIKLTHLMYMDDIKLYSDTSQSLHYLADITQNFSNHIHMEFGIDKCKTFSVEQGKITQNSYALESGVNIEPLEPNTFYKYLGFLQARQINQKDTKEQLKKKFKHRLNILFRSQLNSRNLCKAINSYAIPVLTYSFGIINWTQNDLHNLQRIINTTLTAHRKHHPRSCVQRMTLPRDEGGRAIIDITNLHNKQITTLRQYFYNASEHSLIHEIVTLVDKHHTPLNLVDRNPQRNERINDKKDKIILWQQKSLHGRHRHDLQQPHVDKVMSNAWLRRGELFPETEAFMMAIQDQVIDTRNYQKYIIRSPNLPTDTCRHCHACPETIQHITSACRSLAQNDYKHRHDQVASIIHQHLAHKHNFIAKKSPYYKYKPDTILEDQSCKIYWDRTIITDKTIHYNRPDITVHDKNSKTVFLIDIAVPNTHNIQSTISGKLTKYQDLAIELKRQWRAETIHVVPIVISATGIIPRSLQRCLDILDIPKHTFNTLQKAVILNTCRLTRKFFTTSSISTSYTTTLA

SEQ ID NO: 26314 - protein, 1372 aa, Autographa gamma
MKTRSSSKRPQVPGGSSSSTGNDGSQPAARPRGAKNPREAISLRQTTTATNMEPEMQNDMDRFTETPSPFSLFESPSSSPIFYQASSRSSTVSPVPEDVVQEASATISAPATGTKRARKRWTEDMNKFIWRTYLTATKLNTSKQYLDHLHREFTVTFPQMEASRQRLGDQCRAIIRNKLLPQNILDDIKNEVAILLEQTQLDEIAPSLMSLPVTSQPGQRRKWTTEYNESIITNYYRLTELGENRSAYRQPLYQAVIAEHPELSEVSEQRISDQLRVVLNNKMISEQRLTELRDQVANSLRLSRNDVENNLHFTSPHLTGDTQEPNLQSPSVTSQLLESQLQTPLELQNTIITSNLDVEKIKDQFKISLDKFRDTDPTRRPYIPKQKTSRKQAQIVQLINMHVLPDYIKSDQSFETTHTVIYCAAYTAAICNGTKIREGDNTPNQNKRRVPAWQRRLQKKILNIRSNIGKMTEYIKGNRSYRLITLVEVIKNKYRIHSQHEEPNSNNEHFLDTLKQKLNAATSRLKRYINCTLRKTQNSQFANNQKQFYRNLSASTQHLRTSDSTAPGPSADDLHDFWSSIWAVPVQHNSEADWLQAGCNATDNITQMEFDHIPLDVFMYVLKKTHNWKAPGSDGIQNYWYKKFTSVHPVLYNHINNFIQTPNIIPRFVTQGLTYMIPKDTEHQDPAKYRPITCLQTVYKILTACIAELIHKHSSKNNILSEEQKGCRKSSQGCKEQLIIDSVAMKQAISMKKDINTMYVDYRKAFDSVPHSWLLHILRHYKIHHLLIQFLENSMQHWTTRLKTLGCMHTETSEIPIRRGIFQGDALSPLWFCLALNPLSHALNSCDAGFDITAPHKRVSLTHLMYMDDIKLYSNTPESLHRLADMTQAFSNDIHMKFGIDKCKTLSVRRGQVVPNFYTLDSGETVEPLEANTTYKYLGFQQARQIHQKETKQELKRKFKHRLNTLFRSQLNSRNLSQAINSYAIPVLTYSFGLINWTQSDLVNLQRTINTSLTTHRKHHPRSCVQRMTLPRDEGGRGVIDIVNLHNKQISTLRSYFYEYSDRSSLHEIVILADKHLTPLNLIDRNIQRNERITDMKDKIALWQQKSLHGRHRHDLQQPHVDKVMSNAWLRRGELFPETEAFMMAIQDQVIDTRNYQKHIIRSRNFPTDLCRHCHACSETIQHITSACRSLAQSDYKHRHDQVAAIIHQHLAHTHKFILKKDPYYKYKPDAILENRNCKIYWDRTIITDKTIHFNRPDITLHNRINKTVYLIDIAVPNTHNLQSTISEKLSKYQDLAIELKRQWHAETIHVIPIVVSATGIIPKSLQRCLDVLDIPKHTLNTIQKAVLLNTCRLTRKFLTTSSVSSGYTTNT

SEQ ID NO: 26315 - protein, 1362 aa, Trichoplusia ni
MVQTRSSTKRPQVPGGSSSSTGIDGSQPAARPRGAKNPRGAISTRQTTTATNMEPEMQSDTDRNLLTPSPFSLFESPSSSPLFNQASSRSSTVSPLPEDVVQVANATVSAPASGANRARKRWTLDMNKFIWRTYLIATKLNTSKLYLDHLHREFTIKYPQMEASRQRLGDQCRAIIRNKLLPQDILDDIKNDVTLFLLQSQPEPASQSLVQGQRRKWTTEYNESIIRNYYRITELGESRSAYRRPLYQAIVEEYPELSEVSEQRISDQLRVILNSRMISQQRLDEIRDQVAIDLRSSRNSNAESRLTTQHTQNSLQRHEQAPSTPQLLESQLHSTIELQDPIISGNYEGGQIENQFKSSFEKFRDTDPTMRPYIPKQKTSRKQAQLVQYINTHILPHYIKADQNFETTHTIIYCAAYTAAICNGTKIREGDNPPTQSKRRVPAWQKRLQKKILDIRKDIARMTEYIRGNRSHRLIRLVEAIKNKYQIHSQHELPNSSNEHFLDTLKQKLNAAASRLQRYVNCTLRKTQNSQFSRNQKQFYRNLSINTQHLRTSENTVPAVPADLLHDFWSSIWSEPVQHNSDADWLRASCNSTHEVIPMEYDHIPLDIFMYVLKKAHNWKAPGSDRIHNYWYKKLTSVHPVLYNHINSFIQTPELVPRFVTQGLTFMIPKDADYRNPSKYRPITCLQTVNKILTACIAELIYKHSTKNNILAEEQKGCRKSSQGCKEQLIIDSVAMKHAIVMKKDINTMYVDYRKAFDSVPYSWLLHVLRHYKVNHVLIQFLTNAMQHWTTKLKILGCEQIETSEISIRRGIFQGDALSPLWFCLALNPLSHILNSYAAGFDIVTTSKNVNLTHLLYMDDIKLYSSTTQSLHRLADITQSFSNDTHMKFGIDKCKTLSVKAGQIIPSSYILDSGEIIEPLEPHTSYKYLGFQQAKQIHQKETKQELKQKFKHRLNTLFRSQLNSRNLSHAINSYAIPVLTYSFGIINWTQSDLLNLQRVINTSLTTHRKHHPRSCVQRMTLSRDEGGRGIVDIRNLHNKQITTLRNYFYARSEHTALHETVVWADKHFTPLNLIDRNPQRSERITDVREKIAAWQQKSLHGRHRHDLQQPHVDKERSNAWLRRGELFPETEAFMMAIQDQVIDTRNYQKYIIRSPNCPNDLCRHCHASPETIQHITSACRSLAQSDYKHRHDQVAAIIHQHLAHKYSFIPKKDPYYKYKPDSVLENSNYKLYWDRTIITDKTIHFNRPDITFHNKISKTVFLIDIAVPNTHNLQSTISEKLSKYQDLSIELKRQWRAETIHIIPIVVSATGIIPKSLQRCLDVLDVPSYTLNTLQKAVILNTCRLTRKFLTTSSVSAGYTTN

SEQ ID NO: 26316 - protein, 1403 aa, Acronicta aceris
MVLTRSSSKRPLVLGAPSSSTGSDGSQPETGRRGAKNPRAATEPRQTTQATQLDSDSLSERNSSTPSPFHSFESPRSSPYSYQVSSRSGTISPMSEDVVQEALATEPAPTPGTNRARKRWSEEMNKFIWRTYLIATKLNTSKIYLDHLHREFSIKYPQMQATRQRLGDQCRAIARNRLLPQEILDHIKDEVILYLQQTQNNQVHSNSPIQSHTQPHDSNPQQTGQRRRWTNEQNESILRNYFIITELETNKSAYRRPLQEAVTTDHPELLGVSEQRISDQLRVILKNKMISDQRIQEIRNTISRNFKVHPSNVDNNLTHMPQSQPTTPTPDLESTEEPVAQSHTAENIITPDTFSLAFAHTQIDESLTHTQSPSEPQHTQVTANIDELKIKEQFRAILDKFRDTDLSTRPYIPKQKTSRKLAHIVDFINTKILPNEITPEQNFETTHTVIYCAAYTAAMCNGTKIRDTTSTTDHQNQKRVPAWQVRLQNKIENIRRDIGRLTEYIRGNRSNRMILLVEKIKDKYRIHSQHEEPNLNDDHFLDTLKQKLNAASSRLKRYINCTLRKTQNTQFVNNEKQFYRNLSSNTQHNTNRTTQDTQSPQADELHNFWSGIWAEPVQHNAEAGWLNTDTEFIDKITPMTFEFIPVEVFIRVLHKAHNWKAPGTDRIHNYWYKKFTTLHPILHNHINNFILTPDTMPRYVTQGLTYMIPKDIHDYQNPAKYRPITCLQTIYKIITACIAELIHEHITKNNILSEEQKGCRKSSQGCKEQLIIDSVAMKHAITRKKNINTMYIDYKKAFDSVPHSWLLYVLQHYKIHPQIINFLKSSMHHWTTTLKTVGQTPVITSEIPICRGIFQGDALSPLWFCLALNPLSHLLNESNHGYTITAAHKHTKLTHLMYMDDIKLYSDTTQSLHHLADITQSFSNDIHMEFGIDKCKTFSVINGKIASNSYTLQTGSTVEPLEPHSSYKYLGFQQARQIKQKETKQTLIKKFKHRLNILFRSQLNSRNMCKAINSYAIPVLTYSFGIINWAQGDLLNLQRNINTTLTVFRKHHPRSCVQRMTLPRHEGGRGIIDIVNLHNKQITSLRHYFHQHAEYSTLHDVITYADRRITPLNLLDRNSQRNERITETKEKIATWQQKSLHGRHRHDLQQPHVDKTASNAWLRRGELFPETEAFMIAIQDQVIDTRNYQKHIIHAPNLPSDTCRHCHASPETIQHITSACRSLAQTDYKHRHDQVASIIHQHLAHAHKFIEKKTPYYKYTPNTILENNSHRIYWDRTIITDKTIHFNRPDITLYDKSNKTAYLIDIAVPNTHNIQTTIAEKLTKYQDLAIELKRQWRAETIHIVPIVISSTGVIPKTLQRSLDILQVPKYTLHLLQKAVILNTCRITRKFLTTSSVSSAYTIT

SEQ ID NO: 26317 - protein, 1002 aa, Mellicta athalia
MNKFQNINPINRPYIPKQKTSRKLAHIVNFIDKNVIPHHISIEQDFETTHMIIYCAAYTAAISNGSRIKDVIKPHTPKNNRLPAWQKRLEKKIKDLRRDIARLTEYIRGNRSNRLTLLVEDIKNRHRIHSQHEEPNNSNEQFLDTLKQKLNAASSRLRRYLNCTLRKTQNSQFKNNEKQFYRNLTNNTQRLTTQDTISGPTAEELHSFWSNIWATPLYHNPNALCLESDYDSTNSITPMIFNDIPIEIFQFVLKKTHNWKAPGSDQIHNYWYKKFTTIHPLLHKHINDFIQSPEKLPKFITKGITYMIPKDTDYQNPAKYRPITCLQTFYKILTACIAELTQQHITNNNILTEEQKGCRKSSQGCKEQLIIDSITMKHAISSKNDINTMYIDYKKAFDSVPHSWLLHVLHHYKIHPQIINFLENSMQNWSTTLKTTGLGEIAIPEIPIRRGIFQGDAFSPLWFCLALNPLSKMLNGSNLGYTITTPQKNTTLSHLMYMDDIKLYSNSVQSLHNLADITQTFSNDIHMEFGIEKCKTLSIQNGKITPNQYILNSGQIIEPLDMYTSYKYLGFHQTRKIHQTETKKELKQKFKYRLNILFRSQLNSLNLSKAINTYSIPILTYSFGIIKWSQTDLKNLQRLINTTLTASRKRHPRSSIQRMTLPRVEGGRGIIDIVNLHNKQITTLRQYFHQRAEHSTLHNIITLADKQLTPLNLADRITQRNECTTDLKEKIALWQQKSLHGRHCHDLQQPFVDKEASNAWLQRGELFPETEAFMIAIQDQIIDTRNYQKHIIHAPNLITDMCRHCHANSETIQHITSACRTLAQTDYKHRHDQIASIIHQQLAHKYKFIQKKDPYYKYKPNQTLENSNCKLYWDRTIITDKTIHYNRPDITLHDKTSNTIYLIDIAVPNTHNIQSTISEKLTKYQDLAIELKRSWKADTVHIVPIVISATGIIPKSLKLSLDILQLPKYTLDSLQKATILNTCRITRKFLTTSSISSACVTL

SEQ ID NO: 26318 - protein, 1255 aa, Autographa pulchrina
MNRFIWRTYLIATKLNTTKLYLDHLHYEFSLKYPQMQATRQRLGDQYRAIVRNRLLPQEVLEDIKNEVAAFLQRTQTDPETPTPTLPHNCSQQGQRRKWTTEFNESIIRNYYKITELENNKSAYRRPLHQAMIAEHPELSEVSEQRISDQLRVILNNKMISDQRLQEIRDQVTTDLNLNSSSIENYSHTLSLSITHTPLQDGGIQEPNIHSFTLTAHSFESGLHTPTTEFQSNFNHLEPEKIKDYFRTAVEKFKNADPTNRPYIPKQKTSRKQAQIVQFINIEVLPQYITTEQDFNTTHTIIYCAAYTAAIFNGTKIKENENSHDKTIRRSPPWQRRLQKKILDIRRDIARMNEYIRGNRSSRIIALVAEIKNNHRIHSQHEEPNTNDEHFVDTLKQKLNAAASRLRRYINCTLRKTQNTQFTSNEKQFYRNLLSDTQRARSTEYTTPNTPLAEELHSFWSNIWSVPVSHNPDAEWLQADRNFTDSITPMEFEQIPFDIFIRVLNKTHNWKAPGSDRIHNFWYKKFTTIHPLLYRHINNFIQLPEAVPKFITQGLTYMIPKDTDHHNPAKYRPITCLQTIYKLLTGCVAELIHQHTSENNIVSEEQKGCRKNSQGCKEQLVIDSVAMKQAIAIKMDINTMYIDYRKAFDSVPHSWLVYILQHYKIHPLIINFLKTSMQYWTTRLKTVGKTCLETPEISIRRGIFQGDALSPLWFCLALNPLSHMLNKSSAGYGIIAPNKQIKLTHLMYMDDIKLYSDTSQSLHYLADITQNFSNHIHMEFGIDKCKIFSVEQGKITQNSYALESGVNIEPLEPNTFYKYLGFLQARQINQKDTKEQLKKKFKHRLNILFRSQLNSRNLCKAINSYAIPVLTYSFGIINWTQNDLHNLQRIINTTLTAHRKHHPRSCVQRMTLPRDEGGRAIIDITNLHNKQITTLRQYFYNTSEHSLIHEIVTLVDKHHTPLNLVDRNPQRNERINDKKDKITLWQQKSLHGRHRHDLQQPHVDKVMSNAWLRRGELFPETEAFMMAIQDQVIDTRNYQKYIIRSPNLPTDTCRHCHACPETIQHITSACRSLAQNDYKHRHDQVASIIHQHLAHKHNFIAKKSPYYKYKPDTILEDQSCKIYWDRTIITDKTIHYNRPDITVHDKNSKTVFLIDIAVPNTHNIQSTISGKLTKYQDLAIELKRQWRAETIHVVPIVISATGIIPRSLQRCLDILDIPKHTFNTLQKAVILNTCRLTRKFFTTSSISTSYTTTLA

SEQ ID NO: 26319 - protein, 1372 aa, Autographa gamma
MKTRSSSKRPQVPGGSSSSTGNDGSQPAARPRGAKNPREAISLRQTTTATNMEPEMQNDMDRFTETPSPFSLFESPSSSPLFYQASSRSSTVSPVPEDVVQEASATISAPATGTKRARKRWTEDMNKFIWRTYLTATKLNTSKQYLDHLHREFTVTFPQMEASRQRLGDQCRAIIRNKLLPQNILDDIKNEVAILLGQTQLDEIAPFLMSLPVTSQPGQRRKWTTEYNESIITNYYRLTELGENRSAYRQPLYQAVIAEHPELSEVSEQRISDQLRVVLNNKMISEQRLTELRDQVANSLRLSRNDVENNLHFTSPHLTDDTQEPNLQSPSVTSQLLESQLQTPLELQNTIITSNLDVEKIKDQFKISLDKFRDTDPTRRPYIPKQKTSRKQAQIVHLINMHVLPDYIKSDQSFENTHTVIYCAAYTAAICNGTKIREGDNTPNQNKRRVPAWQRRLQKKILNIRRDIGRMTEYIKGNRSNRLITLVEVIKNKYRIHSQHEEPNSSNEHFLDTLKQKLNAATSRLKRYINCTLRKTQNSQFANNQKQFYRNLSASTQHLRTSDSTAPGPSADDLHDFWSNIWAVPVQHNSEADWLQAGCNATDNITQMEFDHIPLDVFMYVLKKTHNWKAPGSDGIHNYWYKKFTSVHPVLYNHINNFIQTPNIIPRFVTQGLTYMIPKDTDHQDPAKYRPITCLQTVYKILTACIAELIHKHSSKNNILSEEQKGCRKSSQGCKEQLIIDSVAMKQAISMKKDINTMYVDYRKAFDSVPHSWLLHILRHYKIHHLLIQFLENSMQHWTTRLKTLGCMHTETSEIPIRRGIFQGDALSPLWFCLALNPLSHALNSCDAGFDITAPHKRVSLTHLMYMDDIKLYSNTPQSLHRLADMTQAFSNDIHMKFGIDKCKTLSVRRGQVVPNFYTLDSGETVEPLEANTTYKYLGFQQARQIHQKETKQELKRKFKHRLNTLFRSQLNSRNLSQAINSYAIPVLTYSFGLINWTQSDLVNLQRTINTSLTTHRKHHPRSCVQRMTLPRDEGGRGVIDIVNLHNKQISTLRSYFYEYSDRSSLHEIVILADKHLTPLNLIDRNIQRNERITDMKDKIALWQQKSLHGRHRHDLQQPHVDKVMSNAWLRRGELFPETEAFMIAIQDQVIDTRNYQKHIIRSRNFPTDLCRHCHACSETIQHITSACRSLAQSDYKHRHDQVAAIIHQHLAHTYKFIPKKDPYYKYKPDAILENRNCKIYWDRTIITDKTIHFNRPDITLHNRINKTVYLIDIAVPNTHNLQSTISEKLSKYQDLAIELKRQWHAETIHVIPIVVSATGIIPKSLQRCLDVLDIPKHTLNTIQKAVLLNTCRLTRKFLTTSSVSSGYTTNT

SEQ ID NO: 26320 - protein, 1424 aa, Nymphalis urticae
MEMNKRRYNLRPLPGVRRGASGADAGCYSMRTIGGEELSRRALTSKNVTAGRCELNRRTHNVEVTADPLGDDTNLLILSTPTTCSHNVTLAEDKKDSDLLSEIISSTSSPLNSYESPISSPLSCHISPNTISPTSVDVVQEALAIEPAPATDTSRARKRWSKEMNEFIWRTYLIATKLSTSKIYLDHLHHEFSRKFPQMQASRQRLGDQCRAIVRNKLLSQETLDQIKKEVTVYLLQTNNQDTVQNIQTYPNIQTHKHCNQGVRQRRRWTPEYNETIVRNYYKITELEENRSAYRQPLYQAVIAEHPELSEVSEQRISDQLRVILNNKMISDEKLKRIREEISNDLRVRRNRLELTSQHAMLSQNTTPVQASNHDGENNNHTHLFTPSTETHALSNIAGNNELNQTTYYPDVEKIKEQYNITVQKFQNTNPVARPYIPKQNTSRKLARIVNIINTEIMPQQISAEQDFQTTHAIIYCAAYTAAVCNGTKIKDTTPQLNKQLKKEPAWQKRLQKKIQDLRRDIGRLTEYNNGNRSNRLILLVEKIKNKHRIHSQHEEPNTNNEHFLDTLKQKLNASSSRLKRYLNCTLRKSQNTHFSNNEKHFYRTLSSASQHNTRTDNQDLPSPPTNTIHSYWSSVWADPVNHNKDAAWLDPEEIISIKPMNFNHIPFDIFLRVLNKTHNWKAPGSDCIHNYWYKKFTSVHTLLHNHINDFIQTPNIMPHFVTQGLTYMIPKDTDHQNPAKYRPITCLQTIYKILTGCIAEILHEHVATNNILAEEQKGCRKSRQGCKEQLVIDTIAMKHATSRKKKINTMYIDYRKAFDSVPHSWLLYVLQYYKVHPQLIYFLESSMQNWKTKLKIAGQVKSETAEIPIRRGIFQGDALSPLWFCLALNPLSHMLNKSNHGYSITTPNTETTLTHLMYMDDIKLYSSTIASLHHLADITQTFSNDIHMEFGIDKCKTFSVKNGKIIPNSYILESGEIIEPLEPYTTYKYLGFEQARQIDQKGAKDSLKTKFRHRLNILFRSQLNSRNLFKAINSYAIPVLTYSFGIIKWSQCELLNIQRIINTSLTAHRKHHPRSCVQRMTLPRGEGGRGLIDVVNLHNKQIISLRHYFYQRSEHSTLHKTVTLADKHFTPLNLKDQNPQRNERITDINEKTASWQQKSLHGRHRHDLQQSYVDKAASNAWLRRGELFPETEAFMLAIQDQVIDTRNYQKLIIRTLNIQSDSCRHCHSNPETIQHITSACRALAQTDYKHRHDQVSAIIHQHLAHKHNFIKKKTPYYKYKPNTILENNSYRIYWDRTIITDKTIHFNRPDITFHDKINKTIYLIDIAIPNTHNIQSTISEKLSKYQDLAIELKRQWRANTIHIIPIVISSTGVVPKSLQRSLDMLQVPQHTHNLLQKAIILNTCRLTRKFLTTSSISSSYTIT

SEQ ID NO: 26321 - protein, 1263 aa, Trichoplusia ni
MVQTRSSTKRPQVPGGSSSSTGIDGSQPAARPRGAKNPREAISTRQTTTATNMEPEMQSDTDRNLLTPSPFRLFESPSSSPLFNQASSRSSTVSPLPEDVVQVANATVSAPASGANRARKRWTLDMNKFIWRTYLIATKLNTSKLYLDHLHREFTIKYPQMEASRQRLGDQCRAIIRNKLLPQDILDDIKNDVTLFLLQSQPEPAAQSLVQGQRRKWTTEYNESIIRNYYRITELGESRSAYRRPLYQAIVEEYPELSEVSEQRISDQLRVILNSRMISQQRLDEIRGQVAIDLRSSRNSNAESRLTTQHTQNSLQRHEQAPSTPQLLESQLHSTIELQDPILSGNYEGGQIENQFKSSFEKFRDTDPTMRPYIPKQKTSRKQAQLVQYINTHILPHYIKADQNFETTHTIIYCAAYTAAICNGTKIREGDNPPTQSKRRVPAWQKRLQKKILDIRKDIARMTEYIRGNRSHRLIRLVEAIKNKYQIHSQHELPNSSNEHFLDTLKQKLNAAASRLQRYVNCTLRKTQNSQFSRNQKQFYRNLSINTQHLRTSENTVPAVPADLLHDFWSSIWSEPVQHNSDADWLRASCNSTHEVIPMEYDHIPLDIFMYVLKKAHNWKAPGSDRIHNYWYKKLTSVHPVLYNHINSFIQTPELVPRFVTQGLTFMIPKDADYRNPSKYRPITCLQTVYKILTACIAELIYKHSTKNNILAEEQKGCRKSSQGCKEQLIIDSVAMKHAIVMKKDINTMYVDYRKAFDSVPHSWLLHVLRHYKVNHVLIQFLTNAMQHWTTKLKILGCEQIETSEIPIRRGIFQGDALSPLWFCLALNPLSHILNSYAAGFDIVTTSKNVNLTHLLYMDDIKLYSSTTQSLHRLADITQSFSNDIHMKFGIDKCKTLSVKAGQIIPSSYLLDSGEIIEPLEPHTSYKYLGFQQAKQIHQKETKQELKQKFKHRLNTLFRSQLNSRNLSHAINSYAIPVLTYSFGIINWTQSDLLNLQRVINTSLTTHRKHHPRSCVQRMTLSRDEGGRGIVDIRNLHNKQITTLRNHFYARSEHTALHETVVWADKHFTPLNLIDRNPQRSERITDVREKIAAWQQKSLHGRHRHDLQQPHVDKERSNAWLRRGELFPETEAFMMAIQDQVIDTRNYQKYIIRSPNCPNDLCRHCHASPETIQHITSACRSLTQSDYKHRHDQVAAIIHQHLAHKYSFIPKKDPYYKYKPDSVLENSNYKLYWDRTIITDKTIHFNRPDITFHNKISKTVFLI

SEQ ID NO: 26322 - protein, 1370 aa, Autographa gamma
MKTRSSSKRPQVPGGSSSSTGNDGSQPAARPRGAKNPREAISLRQTTTATNMEPEMQNDMDRLTETPSPFSLFESPSSSPIFYQASSRSSTVSPVPEDVVQEASATISAPATGTKRARKRWTEDMNKFIWRTYLTATKLNTRKQYLDHLHREFTVTFPQMEASRQRLGDQCRAIIRNKLLPQNILDDIKNEVAILLEQTQLDEIAPSLMSLPVTSQPGQRRKWTTEYNESIITNYYRLTELGKNRSAYRQLLYQAVIAEHPELSEVSEQRISDQLRVVLNNKMISEQRLTELRDQVANSLRLSRSDVENNLHFTSPHLTDDTQEPNLPSVTSQLLESQLQTPLELQNTIINSNLDVEKIKDQFKISLDKFRDTHPTRRPYIPKQKTSRKQAQIVQLINMHVLPDYIKSDQSFETTHTVIYCAAYTAAICNGTKIREGDNTPNQNKRRVPAWQRRLQKKILNIRKDIGRMTEYIKGNRSNRLITLVEVIKNKYRIHSQHEEPNSNNEHFLDTLKQKLNAATSRLKRYINCTLRKTQNSQFANNQKQFYRNLSASTQHLRTSDSTAPGPSADDLHDFWSSIWAVPVQHNSEADWLQAGCNATDNITQMEFDHIPLDVFMYVLKKTHNWKAPGSDGIHNYWYKKFTSVHPVLYNHINNFIQTPNIIPRFVTQGLTYMIPKDTDHQDPAKYRPITCLQTVYKILTACIAELIHKHSSKNNILSEEQKGCRKSSQGCKEQLIIDSVAMKQAISMKKDINTMYVDYRKAFDSVPHSWLLHILRHYKIHHLLIQFLENSMQHWTTRLKTLGCTHTETSEIPIRRGIFQGDALSPLWFCLALNPLSHALNSCDAGFDITAPHKRVSLSHLMYMDDIKLYSNTPQSLHRLADMTQAFSNDIHMKFGIDKCKTLSVRRGQVVPNFYTLDSGETVEPLEANTTYKYLGFQQARQIHQKETKQELKRKFKHRLNTLFRSQLNSRNLSQAINSYAIPVLTYSFGLINWTQSDLVNLQRTINTSLTTHRKHHPRSCVQRMTLPRDEGGRGVIDIVNLHNKQISTLRSYFYEYSDRSSLHEIVILADKHLTPLNLIDRNIQRNERITDMKDKIALWQQKSLHGRHRHDLQQPHVDKVMSNAWLRRGELFPETEAFMMAIQDQVIDTRNYQKHIIRSRNFPTDLCRHCHACSETIQHITSACRSLAQSDYKHRHDQVAAIIHQHLAHTYKFIPKKDPYYKYKPDAILENRNCKIYWDRTIITDKTIHFNRPDITLHNRINKTVYLIDIAVPNTHNLQSTISEKLSKYQDLAIELKRQWHAETIHVIPIVVSATGIIPKSLQRCLDVLDIPKHTLNTIQKAVLLNTCRLTRKFLTTSSVSSGYTTNT

SEQ ID NO: 26323 - protein, 1389 aa, Nymphalis polychloros
MEMNKRIYNLRPLPGVRRGASGADAGCYSMRSIGGEELSRRALASKSVTAGRCELNRRTHNVEVTADPLGDDTNLLILSTPSTLPHYMTLAEDKKDSDMLNEVIPSTSSPFNSYESPISSPLLHHISSNTISPTPVDVVQEALAIEPAPATGTNRARKRWSVDMNEFIWRTYLIATKLCTSKIYLDHLHHEFSTKFPHMQASRQRLGDQCRAILRNKLLPQNTLDRIKKEVTDYLQQSNNQNTAQIIQTDSNIYTHKNCHQGLRQRRRWTAEYNETIIRNYYKITELEENRSAYRQPLHQAVIAEHPELTEVSEQRISDQLRAILNNKMVSDQKLTEIREEISNDLRLRRNRLEHTSQHAIISQNITPIQAPNNDEENNNNTHLFTSSTQTHALLDVTGNTELNQITYYPNVEKIKEQYNITVQKFQNSNPITRPYIPKQNTSRKLAQIVNIINTEILPQHISSEQDFQTTHTIIYCAAYTAAVCNGTKIKDTTTQLNKHQKKEPAWQKRLQKKIQDLRRDIGRLTEFNNGNRSNRLILLVEKVKNKHKIHLQYEEPNTNNEHFLDTLKQKLNAASSRLKRYLNCTLRKSQNTHFSNNEKQFYRTLSSASQRNTRIDNQDLPSPPTDTIHSFWSSVWADPVHHNKDASWLDSKVIDSIKPMNFNHIPLEIFVRVLNKTHNWKAPGSDCIQNYWYKKFTSVHSLLHNHINDFIQTPNIMPHFVTQGLTYMIPKDTDHQNPAKYRPITCLQTIYKILTGCIAEILHEHIATNNILAEEQKGCRKSRQGCKEQLVIDTITMKHATSRKNNINTMYIDYRKAFDSVPHSWLLYVLQHYKVHPQLIYFLESSMQNWKTKLRIAGQVNTETAEIPIRRGIFQGDALSPLWFCLALNPLSHMLNKSNHGYSITTPNKKTILTHLMYMDDIKLYSSTIASLHHLADITQTFSSDIHMEFGIDKCKTFSVKNGKILPNSYILESGEIIEPLEPYTTYKYLGFEQAKQINQKGAKDSLKTKFRHRLNILFRSQLNSRNLFKAINSYAIPVLTYSFGIIKWSQCELLNLQRIINTSLTAHRKHHPRSCVQRMTLPRGEGGRGLIDVVNLHNKQITSLRHYFHQRSEHSPLHETVTLADKHFTPLNLKDENLQRNERITNINEKTASWQQKSLHGRHRHDLQQSYVDKAASNAWLRRGELFPETEAFMLAIQDQVIDTRNYQKHITRTLNFQSDKCRHCHSNPETIQHITSACRALAQTDYKHRHDQVSAIIHQHLAHKHNFIKKKIPYYKYKPNTILENNSYRIYWDRTIITDKTIHFNRPDITFHDKINKTIYIIDIAIPNTHNIQSTISEKLSKYQDLAIELKRQWRANTIHIVPIVISSTGVVPKSLVRSLDMLQLP

SEQ ID NO: 26324 - protein, 1354 aa, Boloria selene
MEMERRIYNLRPLPGGRRGAPGADAGCLSMRTIGDEELNRRTPVEEYTTAELSSHALSPTSLFQSPSSSHSFLNSSSSSSSLTSSFHSTEDVVQIANLADIPAPATVNSRTRKKWSIEMNIFIVRTYFILTSLESETNTYLTPLHAKFIEQFPDMQVSKQRIGDQRRAIMQKNLLSAHKIQEIRKEVAQLLQNHHSQILTQPTLSVTQSQRKKWTNEINETIMRCYYRITNIEKDLSSYRTQLHKEVTEKCPDVADVSVQRIADQRRVIVNNKLITSEKLTKIKKEIEQLINSSRTNKQITTEPTISFSNTAESIEPLVNIVPQPQNENLNNETQEPDNIKYRISEENKKSIEDTFCNTYSDFINTCPTQRPFIPKQKDTRKFNAIVNFINTTMLPKYIDLNDDFHKFHTTLYCAAFTAAVHNGSKISIKYGQIEPQKTPKWQKRLEDKIKDLRVKIGRLTNYINGNRNNKMQFYINIIKTNYKIHSQHESENTELSEFLDTLKQKLSAIASRLRRYKLATQRKSQNKQFICNERRFYKDLSHPNHNHNFISNSTNKDKLPTASELHKFWSSVWATPAEHKQSHWIEEQKVLNEQIPQMQFSPIDIGLLKSVIAKTHSWKATGTDKIHNYWYKKFTSIHTHLLTHINNFIQSPTMLPSFITQGITYMIPKDETAKEDPAKYRPITCLQTIYKIITSCITELIYRHIDTNNILTEQQKGCRRYSQGCKEQLIIDSVISKQALKKKRNIYSMYIDYKKAFDSVPHTWLLYTLHLYKIHPTIIEFLKTNMLNWTTQLKLKYNNSSSIETQQIPIRKGIFQGDSLSPLWFCLSLNTLSNMLNNSGKGYKITYGQTHYTLSHLMYMDDIKLYASNLTDINKLADITQMFSTDIRMEFGIDKCKMQSVRRGQKEHNFYELDSGEQIQPIDDVNGYKYLGYQQSRQIHQKQTKIEIIKKFKQRLHKILNTTLNARNTIKAINTYAVPIITYSFGIITWSQSDLLKLQRTINTLMTKYRKHHPRSCTQRLTIPRHEGGRGLIDIKNLHNKQITSLRKFFHNRSQNSGLHKAVTKADCKFTPLNLQDLQKQQNEHITQLQDKFDSWLAKSLHGRHRSDLLNPNVDKVASNAWLKKGELFPETEGFMLAIQDQIIETRNYRKYIIHDTQIDLCRNCHSASETIQHITGACKSIAQTDYKHRHDQVASIIHQYLAKKHNLINEHVSYYKYKPQSVIESSDHKLYWDRTIITDRTVHHNRPDITLYDKKHQIVYLIDIAIPNTHNLSSTYSDKITKYTDLSIELKTQWQAHTVRTIPIILSSTGVIPTTLHASLKQLDIHPLLYILLQKAVILNTCRIVRKFLSIQ

SEQ ID NO: 26325 - protein, 961 aa, Boloria selene
MLPKYIDLNDDFHKFHTTLYCAAFTTAVHNGSKISIKYGQIEPQKTPKWQKRLEDKIKDLRVKIGRLTNYINGNRNNKMQFYINIIKTNYKIHSQHESENTELSEFLDTLKQKLSAIASRLRRYKLATQRKSQNKQFICNERRFYKDLSHPNHNHNLISNSTNKDKLPTASELHKFWSSVWATPVEHKQSHWIEEQKVLNEQIPQMQFSPIDIGLLKSVIAKTHSWKATGTDKIHNYWYKKFTSIHTHLLTHINNFIQSPTMLPSFITQGITYMIPKDETAKEDPAKYRPITCLQTIYKIITSCITELIYRHIDTNNILTEQQKGCRRYSQGCKEQLIIDSVISKQALKKKRNIYSMYIDYKKAFDSVPHTWLLYTLHLYKIHPTIIEFLKTNMLNWTTQLKLKYNNSSSIETQQIPIRKGIFQGDSLSPLWFCLSLNTLSNMLNNSGKGYKITYGQTHYTLSHLMYMDDIKLYASNLTDINKLADITQMFSTDIRMEFGIDKCKMQSVRRVQKEHNFYELDSGEQIQPIDDVNGYKYLGYQQSRQIHQKQTKIEIIKKIKQRLHKILNTTLNARNTIKAINTYAVPIITYSFGIITWSQSDLLKLQRTINTLMTKYRKHHPRSCTQRLTIPRHEGGRGLIDIKNLHNKQITSLRKFFHNRSQNSGLHKAVTEADCKFTPLNLQDLQKQQNEHITQLQDKFDSWIAKSLHGRHRSDLLNPNVDKVASNAWLKKGELFPETEGFMLAIQDQIIETRNYRKYIIHDTQIDLCRNCHSASETIQHITGACKSIAQTDYKHRHDQVASIIHQYLAKKHKLINEHVSYYKYKPQSVIESSDHKLYWDRTIITDRTVHHNRPDITLYDKKHKIVYLIDIAISNTHNLSSTYSDKITKYTDLSIELKTQWQAHTVRTIPIILSSTGVIPTTLHACLKQLDIHPLLYILLQKAVILNTCRIVRKFLSIQ

SEQ ID NO: 26326 - protein, 1387 aa, Dryas iulia
MPIPTRLTLPNQQFPTLLYEMEKRVYSLRPLPGGRRGAPGADAGCLSMRTIGDEELIRRTPVEEYITAERSPHSSSSISPFNASPSSSLFQPSPSSSSMSSFHPIKDVVQIVDKTTMSAPVAVGPRTRKKWSLEMNIFIVRTYFTLTSLETVNLRTYLTPLHAKFIEQFPHMIVSKQRVGDQRRAIMKKNLLSPDKLQEIKEEVRVTLQNSNHSEILQTDNPQIATERRKWDDDINEAIMRCYYKITKLERNITGYRTQLYKEVVHQFPILADVSVQRIADQRRAIVYNKLVKPERLTELKTEVAQSINEECLTAEPQNVPEVTPAFLSNKNNPQSTAINPIIESTNETEQISSLGDIINTNNLEENEKRQHLIKKYQLTEEDKIRINSTFSNTYTDFSHTCPPKRPYIPKQKTNKKLTATINYIDLVVLPKYLSSECDFLTLHTLIYCAAMTAALLNGSKISHNQNRNIATQSIPKWQKRLENRIEELRIKIGRLTDYIQGNRSETLQNHINKIKNNYKIHTQHETENSTLTEFLDTLKQKLSALANRLRRYKQTSLRKSQNKIFNANEKLFYRNLSSTSSNNNIKNNSVDLPTTEELYTFWSSIWSSPAEYNQAEWIEEQKQYLDTQTTDMQFEVVNIELLKSVISKTHNWKATGTDKIHNFWYKKFTCVHIHLLFHINNFIKSPNSVPSFVTQGITYMLPKDLGDKRNPAKYRPITCLQTIYKIISSCITELVYKHIDANNILTEQQKGCRRLSQGCKEQLIIDSVISKHAQKKKTDIYTMYIDFQKAFDAIPHTWLVYVLQMHKIHPNIINFLENIMKNWTTQLKMVNLANVIETEPIHIRRGIFQGDSFSPLWFCLALNPLSLMLNNSKKGYTITQNNTQHVISHLMYMDDIKLYASNLSNLNELADMTQMFSTDIQMRFGIEKCKLQSVRRGKIEKNKYQLYSGDYIDPIDDENGYKYLGYQQTRHIHQKQIKIEINKKFKGRVQKVLNTNLNAYNTIKALNTYAIPMLTYSFGVINWSQTDLQRLQRIINTLMTKHRKHHPRSCIQRLTLPRYEGGRGIIDIKNLHNKQIHLLRSFFHTRAQQSSLHGLITGLDNKLTPLNLSSHLTQSNETITQSQQKLEAWLAKSLHGRHRRDLLSPTVDKIASNAWLSQGELFPETEGFMLAIQDQIMETRNYKKHIIHDTQLDLCRHCHCASETIQHITGACKSITQTDYKHRHDQVASIIHQYLAKKLNLISETIPYYKYKPQAVIDSKDFKLYWDRTIITDKTIHHNRPDITLHDKKHSIVYLIDVGIPNTHNLSSTFSDKITKYTDLSIELKAQWQVNTVKTIPVILSTTGVIPVTLHSSLKQLNIHPLLYRQLQKAVILNTCRIVRKFLTIQ

SEQ ID NO: 26327 - protein, 1381 aa, Dryas iulia
MPIPTRLTLPNQQFPTLLYEMEKRVYSLRPLPGGRRGAPGADAGCLSMRTIGDEELIRRTPVEEYITAERSPHSSSSISPFNASPSSSLFQPSPSSSSMSSFHPIKDVVQIVDKTTMSAPVAVGPRTRKKWSLEMNIFIVRTYFTLTSLETVNLRTYLTPLHAKFIEQFPHMIVSKQRVGDQRRAIMKKNLLSADKLQEIKEEVRVTLQNSNHSEILKTDNPQIATERRKWDNDINEAIMRCYYKITKLERNVTGYRTQLYKEVVHQFPILADVSVQLIADQRRAIVYNKLVKPERLTELKTEECLTAEPQNVPEVTPAFLSNKNNPQSTAINPIIESTNETEQISSLGDIINTYNNLEENEKRQHLIKKYQLTEEDKIRINSTFSNTYTDFSHTCPPKRPYIPKQKTNKKLTATINYIDLVVLPKYLSSECDFLTLHTLIYCAAMTAALLNGSKISHNQNRNIATQSIPKWQKRLENRIEELRIKIGRLTDYIQGNRSETLQNHINKIKNNYKIHTQHETENSTLTEFLDTLKQKLSALANRLRRYKQTSLRKSQNKIFNANEKLFYRNLSSTSSNNNIKNNSVDLPTTEELYTFWSSIWSSPAEYNQAEWIEEQKQYLDTQTTDMQFEVVNIELLKSVISKTHNWKATGTDKIHNFWYKKFTCVHIHLLFHINNFIKSPNSVPSFVTQGITYMLPKDLGDKRNPSKYRPITCLQTIYKIISSCITELVYKHIDANNILTEQQKGCRRLSQGCKEQLIIDSVISKHAQKKKTDIYTMYIDFQKAFDAIPHTWLVYVLQMHKIHPNIINFLENIMKNWTTQLKIVNLANVIETEPIHIRRGIFQGDSFSPLWFCLALNPLSLMLNNSKKGYTITQNNTQHVISHLMYMDDIKLYASNLSNLNELADMTQMFSTDIQMRFGIEKCKLQSVRRGKIEKNKYQLYSGDYIDPIDDENGYKYLGYQQTRHIHQKQIKIEINKKFKGRVQKILNTNLNAYNTIKALNTYAIPMLTYSFGVINWSQTDLQKLQRIINTLMTKHRKHHPRSCIQRLTLPRYEGGRGIIDIKNLHNKQIHLLRSFFHTRAQQSSLHGLITGLDNKLTPLNLSSHLTQSNETITQSQQKLEAWLAKSLHGRHRRDLLSPTVDKIASNAWLSQGELFPETEGLMYVIQDQIMETRNYKKHIIHDTQLDLCRHCHCASETIQHITGACKSITQTDYKHRHDQVASIIHQYLAKKLNLISETIPYYKYKPQAVIDSKDFKLYWDRTIITDKTIHHNRPDITLHDKKHSIVYLIDVGIPNTHNLSSTFSDKITKYTDLSIELKAQWQVNTVKTIPVILSTTGVIPVTLHSSLKQLNIHPLLYRQLQKAVILNTCRIVRKFLTIQ

SEQ ID NO: 26328 - protein, 936 aa, Dryas iulia
MTAALLNGSKISHNQNRNIATHRIPKWQKRLENRIEELRIKIGRLTDYIQGNRSETLQNHINKIKNNYKIHTQHETENSTLTEFLDTLKQKLSALANRLRRYKQTSLRKSQNKIFNANEKLFYRNLSSTSSNNNIKNNSVDLPTTEELYTFWSSIWSSPAEYNQAEWIEEQKQYLDTQTTDMQFEVVNIELLKSVISKTHNWKATGTDKIHNFWYKKFTCVHIHLLFHINNFIKSPNSVPSFVTQGITYMLPKDLGDKRNPEKYRPITCLQTIYKIISSCITELVYKHIDANNILTEQQKGCRRLSQGCKEQLIIDSVISKHAQKKKTDIYTMYIDFQKAFDAIPHTWLVNVLQMHKIHPNIINFLENIMKNWTTQLKIVNLANVIETEPIHIRRGIFQGDSFSPLWFCLALNPLSLMLNNSKKGYTITQNNTQHVISHLMYMDDIKLYASNLSNLNELADMTQMFSTDIQMRFGIEKCKLQSVRRGKIEKNKYQLYSGDYIDPIDDENGYKYLGYQQTRHIHQKQIKIEINKKFKGRVQKILNTNLNAYNTIKALNTYAIPMLTYSFGVINWSQTDLQKLQRIINILMTKHRKHHPRSCIQRLTLPRYEGGRGIIDIKNLHNKQIHLLRSFFHTRAQQSSLHGLITGLDNKLTPLNLSSHLTQSNETITQSQQKLEAWLAKSLHGRHRRDLLSPTVDKIASNAWLSQGELFPETEGFMLAIQDQIMETRNYKKHIIHDTQLDLCRHCHCASETIQHITGACKSITQTDYKHRHDQVASIIHQYLAKKLNLISETIPYYKYKPQAVIDSKDFKLYWDRTIITDKTIHHNRPDITLHDKKHSIVYLIDVGIPNTHNLSSTFSDKITKYTDLSIELKAQWQVNTVKTIPVILSTTGVIPVTLHSSLKQLNIHPLLYRQLQKAVILNTCRIVRKFLTIQ

SEQ ID NO: 26329 - protein, 1360 aa, Heliconius hermathena
MEKRVYNLRPLPGGRRGAPGADAGCLSMRTIGDEELIRRTPVEEYTTAEHSPHTPSSNSPYPSSPSSPFYQPSPSSSSSASSFHPVDNVVQMVEKADIPAPVTTGPRTRKKWSIEMNIFIVRTYFILTSLETVNLRTYLTPLHAKFIEQFPHMKVSKQRVGDQRRAIMRKELLSVHKIKEIKDEVKLMLQNHNNLQAVDSQEAAIERRKWSDDINESIMRNYYRITKLEKNITGYRTQLHKQVTQQFPSLANVSVQRIADQRRVIIHNKLIKPERLAELRSEVMESISDENLMDNISKSISPLLMNDDSNSQLTFNPTVENTNETERISSLITGTQNMVTNDMAQQRYIKYQLTEEEKTNISSTFSKIYIDFSNTCPIQRPYIPKQKSNKKFIATIDYINLVVLPKYLTSECEFQILHTLIYCAAMTAAILNGSKISHNQNRNIAPQRIPKWQKRLQDRIEELRIKIGRLTDYIQGNRSQTLQNHINKIKQNHKIHAQHEAENSTLIEFLDTLKQKLMALANRLRRYKQTTLRKSQNKMFNGNEKLFYRNLTRTPNNNIENNTVDLPSNEELHVFWSSIWSTPVEHNQAEWIEEQKQYLDKQTTEMQFEAVSIELLQSVILKTHNWKATGTDKIHNFWYKKLTCVHKHLLFHINNFIKSPTTLPSFVTQGITYMLPKDLTDKKDPAKYRPITCLQTIYKIISSCITDLVYKHIDSNKVLTEQQKGCRRLSQGCKEQLVIDSVISQYALKNKTDIYTMYIDYQKAFDSIPHTWLIYVLQIHKVHPYIIDFLRITMESWATQLKITNFGQTVETEPIQIRRGIFQGDSFSPLWFCLALNPLSLILNNSEKGYKIALNNVQHTISHLMYMDDIKLYASSLSNLNKLADMTQMFSTDIQMKFGIDKCKLQSIRRGHMEKNNYQLNSGEYIDPIDDINGYKYLGYQQSKRIHHKQIKIDINNKFKGRLQKVLNTNLNAYNTTKAINTFVIPILTYSFGIIKWSQTDLQKQQRVINTSMTKYRKHHPRSCVQRLTLPKYEGGRGIIDIKNLHNKQIHLLRSFFHTRAQQVSLHRLITELDNKLTPLNLRNHSTQPNETIIQPQQKLETWLAKSLHGRHRRDLLSPIVDKTASNAWLSIGELFPETEGFMLAIQDQIIETRNYKKHIIHDTQIDLCRHCHCASETIQHITGACKSITQTDYKHRHDQVACIIHQYLAKKLNLITETLPYYKYKPQAVIDSKDFKLYWDRTIITDRTIHHNRPDITLHDKKHKTVYLIDVGIPNTHNLSATHSDKITKYTDLSIELKAQWQVNIVKTIPIILSTTGVIPITLHSSLQQLNIHPFLYRQLQKAVILNTCRIVRKFLTKQ

SEQ ID NO: 26330 - protein, 1360 aa, Boloria selene
MEKRVYNLRPLPGGRRGAPGAGAGCLSMRTIGDEELNRRTPVEEYVTAGQSSHSSPSSSHFQSSSSSIFQLSPSSSSSRSSHPTENVVQIANTADVTAPVKVVPRTRKKWSIEMNIFIVRTYFILTLLETELNTYLTPLYERFTEQFPHMQASKQRVGDQRRAIMRKNLLSSTKIQEIRDEVQKLLKNQNHLDIPIQKYSSQAQNTRRRWTDNINETIMKCYYRITKLEKYMTGYRTQLYQEVIDKFPDLADVSVQRIVDQRNAIVKNKFISLERLEEIKSEIALIINENDTTIIETQNTTESIIHPAPKETTITTNTAEQTQSLIVNDTNNIINETTSIDASPNNVRYKLSEEDHTLLHTIFSNAYTEFINSPTTDRPYIPIQKCTKKFSAIVQYINSVILPKHLTHDNDFHTLHTLIYCAALTASLFSGSKILYSNDRKSPIQNIPKWQQRLENRIKDLRLKIGRLTDYVQGNRRETLKAHINKIKYNYKIHTQYETENSTLTKFLDTLKQKLSALASRLRRYKQTTLRKSQNKKFKTNEKSFYRNLSQTSPNNQTSDNATNLPTKEELHKFWSSLWSNPVEHVKSQWVDEQTQYLQEHVTEMKFEEVSLDLLKYVITKSHNWKATGTDRIHNYWFKKLTCTHTFLLFHINNFIKSPNTMPLFVTQGITYMLPKDPTDKRNPGKYRPITCLQTIYKIITSCITEQIYKHIDSNNILVEQQKGCRRKSQGCKEQLIIDSVVSKQAIKKKRNIYTMYIDYQKAFDSVPHTWLIQTLKIHKIHPIIIEFLRNNMQNRTTKLKLTTLLNAIETEPIHIRRGIFQGDSLSPLWFCLSLNPLSLMLNNSAKGYKITHKDTQYTLSHLMYMDDIKLYASSHSNLKILTDITEMFSTDIQMKFGIDKCRIQSVKGGVIEHNNYQLQTGELIDPVDDENGYKYLGYQQTQQIHQKQAKLQISEKFKLRLRKILNTHLNSLNIIKAIKTYAVPMLTYSFGIIKWSKTDLHKHQRTINTLMTKYRKHHPRSCIQRLTLPKCEGGRGIIDIKNLHNKQIHSLRSSFHARSQHSPLHKIITLSDLKLTPLNLNNSLTQPNEHITPLQEKIQVWLAKSLHGRHRRDLINPIVDKIASNAWLSKGELFPETEGFMLAIQDQVIETRNYRKHIIHDTQSDICRHCYSTSETIQHITGACKSITQTDYKHRHDQVAYIIHQYLARNYKLIKDSVPYYKYKPLAVIDSVDYKLYWDRTIITDRTVHHNRPDITLFDKKNKIVYLIDVGIPNTHNLQATFTDKITKYRDLSIELKSQWHVNTVKTIPIILSTTGVIPVTLHTSLKQLNLHPLIYIQLQKAVILNTCRIVRKFLAMES

SEQ ID NO: 26331 - protein, 1363 aa, Boloria selene
MDKRVYNLRPLPGGRRGAPGAGAGCLSMRTIGDEELNRRTPVEEYVTAGNSSHSSPSSSLFQSSSSSIFQLSPSSSLSSTSLHSTEDVVQMANMADVPAPAKVVLRTRKKWTIEMNIFIVRTYFILTSLETELNTYLTPLHEKFTEQFPHMQASKQRVCDQRRAIMRNNLLSPTKIQQIKDEVQKLLQSENNLAQIYTSQTQNQRRRWTDNINETIMKCYYRITQLEQNMTGYRTQLHQQVVEKFPDLANVSVQRIADQRNSIVRNKLISLERLQEIKNEIALIINNSDSAIIDTQNSTERIQLTIGGNSNTTELSLHSTAEEITPTLNTTELINPDEITNNKTEPKILKYSLLEEDKTLLLSIFSSTYAEFINTPATGRPYIPKQNCTKKFVAVVQFINSELLPKYLNYDKDFQTLHTLIYCAAVTASLFNGSKISYSKERNILKQTIPKWQQRLENRINDLRVKIGRLTDYIHGNRSEILKKHINKIKSNYKIHTQYETENSTLAEFLDTLKQKLSALASRLRRYKQTSLRKSQNKHFKTNEKSFYRNLTQKRPNNNPEQNFNTSDSPTTEELHKFWSSLWSNPVEHRNSEWVNEQTQYLQERVTEMNFEEINMNLLKCVISKTHNWKATGTDRIHNYWYKKFTCIHTYLLLHINKFIKSPNTLPLFVTQGITYMLPKDHTDKRNPAKYRPITCLQTIYKIITSCITEQIYKHIDSNNILVEQQKGCRRKSQGCKEQLVIDSVISKQAIKKKRNIYTMYIDYQKAFDSIPHTWLLETLKIHKIHPMIIEFLKNNMQNWTTQLKISNLFNAVETEPIHIRRGIFQGDSLSPLWFCLCLNPLSIMLNNSGKGYKIKHKDIQYTLSHLMYMDDIKLYAPSPVNLKILTDITEMFSTDIQMRFGIDKCRIQSVRRGHIENNSYQLQTGEFIDPVDDENGYKYLGYQQTQEIHQKEAKQIINEKFKKRLNKILNTHLNSFNIIKAINTYAISILTYSFGIIKWSKTDLHKHQRIISTLMTKYRKHHPRSCIQRLTLPKCEGGRGIIDIKNLHNKQIHSLRSFFYTRSQHSLLHKIITETDYKLTPLNLSIHSTQPNELITKPEDKFEVWLAKSLHGRHRRDLLNPIVDKTASNAWLTKGELFPETEGFMLAIQDQVIETRNYKKYIIRDTQSDICRHCYSASETIQHITGACKSITQTDYKHRHDQVAYIIHQYLARKHKLIQENVPYYKYKPQAVIDTADHKLYWDRTIITDRTIHHNRPDITLLDKKNKIVYLIDVSIPNTHNLATTYTDKITKYKDLSIELKTQWHVNTVKTIPIILSTTGVIPVTLHTSLKHLNLHPLIYIQLQKAVILNTCRIVRKFLAMQ

SEQ ID NO: 26332 - protein, 1360 aa, Boloria selene
MEKRVYNLRPLPGGRRGAPGAGAGCLSMRTIGDEELNRRTPVEEYVTAGQSSHSSPSSSLFQSSSSSIFQLSPSSSSSRSSHPTENVVQIANTADVTALAKVVPRTRKKWSIEMNIFIVRTYVILTLLETELNTYLTPLYERFTEQFPHMQASKQRVGDQRRAIMRNNLLSITKIQEIRDEVQKLLKNQNHLDIPIQKYSSQAQNTRRRWTDNINETIMKCYYRITKLEKYMTGYRTQLYQEVIDKFPDLADVSVQRIADQRNAIVKNKFISLERLEEIKSEIALIINENDTTIIETQNTTESIVHPAPKETNITTNTAEQTQSLIVNDTNNIINETTSIDASLNNVRYKLSEEDHTLLHSIFSNAYTEFINTPTTDRPYIPIQKCTKKFSAIVQYINSVILPKHLTHDNDFHTLHTLIYCAALTASLFSGSKILYSNDRKSPIQNIPKWQQRLENRIKDLRLKIGRLTDYVQGNRRETLKAHINKIKYNYKIHTQYETENSTLTEFLDTLKQKLSALASRLRRYKQTTLRKSQNKKFKTNEKSFYRNLSQTSPNNQTSDNATNLPTKEELHRLWSSLWSNPVEHVKSQWVDEQTQYLHEHVTEMTFEEVSLDLLKYVITKSHNWKATGTDRIHNYWYKKLTCTHTFLLYHINNFIKSPNTMPLFVTQGITYMLPKDPTDKRNPGKYRPITCLQTIYKIITSCITEQIYKHIDSNNILVEQQKGCRRKSQGCKEQLIIDSVVSKQAIKKKRNIYTMYIDYQKAFDSVPHTWLIQTLKIHKIHPIIIEFLRNNMQNWTTKLKLTTLLNAIETEPIHIRRGIFQGDSLSPLWFCLSLNPLSLMLNNSAKGYKITHKDTQYTLSHLMYMDDIKLYASSHSNLKILTDITEMFSTDIQMKFGIDKCRIQSVKGGVIEHNNYQLQTGELIDPVDDENGYKYLGYQQTQQIHQKQAKLQISEKFKLRLRKILNTHLNSLNIIKAINTYAVPILTYSFGIIKWSKTDLHKHQRTINTLMTKYRKHHPRSCIQRLTLPKCEGGRGIIDIKNLHNKQIHSLRSFFHARSQHSPLHKIITLSDLKLTPLNLNNSLTQPNEHITPLQEKIQVWLAKSLHGRHRRDLINPIVDKIASNAWLSKGELFPETVGFMLAIQDQVIETRNYRKHIIHDTQSDICRHCYSTSETIQHITGACKSITQTDYKHRHDQVAYIIHQYLARNYKLIKDSVPYYKYKPLAVIDSVDYKLYWDRTIITDRTVHHNRPDITLFDKKNKIVYLIDVGIPNTHNLQATFTDKITKYRDLSIELKSQWHVNTVKTIPIILSTTGVIPVTLHTSLKQLNLHPLIYIQLQKAVILNTCRIVRKFLAMES

SEQ ID NO: 26333 - protein, 1360 aa, Boloria selene
MEKRVYNLRPLPGGRRGAPGAGAGCLSMRTIGDEELNRRTPVEEYVTAGQSSHSSPSSSHFQSSSSSIFQLSPSSSSSRSSHPTENVVQIANTADVTAPVKVVPRTRKKWSIEMNIFIVRTYFILTLLETELNTYLTPLYERFTEQFPHMQASKQRVGDQRRAIMRKNLLSSTKIQEIRDEVQKLLKNQNHSDIPIQKYSSQAQNTRRRWTDNINETIMKCYYRITKLEKYMTGYRTQLYQEVIDKFPDLADVSVQRIADQRNAIVKNKFISLERLEEIKSEIALIINENDTTIIETQNTTESIIHPAPKETTITTNTAEQTQSLIVNDTNNIINETTSIDASPNNVRYKLSEEDHTLLHTIFSNAYTEFINSPTTDRPYIPIQKCTKKFSAIVQYINSVILPKHLTHDNDFHTLHTLIYCAALTASLFSGSKILYSNDRKSPIQNIPKWQQRLENRIKDLRLKIGRVTDYVQGNRRETLKAHINKIKYNYKIHTQYETENSTLTEFLDTLKQKLSALASRLRRYKQTTLRKSQNKKFKTNEKSFYRNLSQTSPNNQTSDNATNLPTKEELHKFWSSLWSNPVEHVKSQWVDEQTQYLQEHVTEMKFEEVSLDLLKYVITKSHNWKATGTDRIHNYWYKKLTCTHTFLLFHINNFIKSPNTMPLFVTQGITYMLPKDPTDKRNPGKYRPITCLQTIYKIITSCITEQIYKHIDSNNILVEQQKGCRRKSQGCKEQLIIDSVVSKQAIKKKRNIYTMYIDYQKAFDSVPHTWLIQTLKIHKIHPIIIEFLRNNMQNWTTKLKLTTLLNAIETEPIHIRRGIFQGDSLSPLWFCLSLNPLSLMLNNSAKGYKITHKDTQYTLSHLMYMDDIKLYASSHSNLKILTDITEMFSTDIQMKFGIDKCRIQSVKGGVIEHNNYQLQTGELIDPVDDENGYKYLGYQQTQQIHQKQAKLQISEKFKLRLRKILNTHLNSLNIIKAINTYAVPMLTYSFGIIKWSKTDLHKHQRTINTLMTKYRKHHPRSCIQRLTLPKCEGGRGIIDIKNLHNKQIHSLRSFFHARSQHSPLHKIITLSDLKLTPLNLNNSLTQPNEHITPLQEKIQVWLAKSLHGRHRRDLINPIVDKIASNAWLSKGELFPETEGFMLAIQDQVIETRNYRKHIIHDTQSDICRHCYSTSETIQHITGACKSITQTDYKHRHDQVAYIIHQYLARNYKLIKDSVPYYKYKPLAVIDSVDYKLYWDRTIITDRTVHHNRPDITLFDKKNKIVYLIDVGIPNTHNLQATFTDKITKYRDLSIELKSQWHVNTVKTIPIILSTTGVIPVTLHTSLKQLNLHPLIYIQLQKAVILNTCRIVRKFLAMES

SEQ ID NO: 26334 - protein, 1360 aa, Boloria selene
MEKRVYNLRPLPGGRRGAPGAGAGCLSMRTIGDDELNRRTPVEEYVTAGQSSHSSPSSSHFQSSSSSIFQLSPSSSSSRSSHPTENVVQIANTADVTAPVKVVPRTRKKWSIEMNIFIVRTYFILTLLETELNTYLTPLYERFTEQFPHMQASKQRVGDQRRAIMRKNLLSSTKIQEIRDEVQKLLKNQNHLDIPIQKYSSQAQNTRRRWTDNINETIMKCYYRITKLEKYMTGYRTQLYQEVIDKFPDLADVSVQRIADQRNAIVKNKFISLERLEEIKSEIALIINENDTTIIETQNTTESIIHPAPKETTITTNTAEQTQSLIVNDTNNIINETTSIDASPNNVRYKLSEEDHTLLHTIFSNAYTEFINSPTTDRPYIPIQKCTKKFSAIVQYINSVILPKHLTHDNDFHTLHTLIYCAALTASLFSGSKILYSNDRKSPIQNIPKWQQRLENRIKDLRLKIGRLTDYVQGNRRETLKAHINKIKYNYKIHTQYETENSTLTEFLDTLKQKLSALASRLRRYKQTTLRKSQNKKFKTNEKSFYRNLSQTSPNNQTSDNATNLPTKEVLHKFWSSLWSNPVEHVKSQWVDEQTQYLQEHVTEMKFEEVSLDLLKYVITKSHNWKATGTDRIHNYWYKKLTCTHTFLLFHINNFIKSPNTMPLFVTQGITYMLPKDPTDKRNPGKYRPITCLQTIYKIITSCITEQIYKHIDSNNILVEQQKGCRRKSQGCKEQLIIDSVVSKQAIKKKRNIYTMYIDYQKAFDSVPHTWLIQTIKIHKIHPIIIEFLRNNMQNWTTKLKLTTLLNAIETEPIHIRRGIFQGDSLSPLWFCLSLNPLSLMLNNSAKGYKITHKDTQYTLSHLMYMDDIKLYASSHSNLKILTDITEMFSTDIQMKFGIDKCRIQSVKGGVIEHNNYQLQTGELIDPVDDENGYKYLGYQQTQQIHQKQAKLQISEKFKLRLRKILNTHLNSLNIIKAINTYAVPMLTYSFGIIKWSKTDLHKHQRTINTLMTKYRKHHPRSCIQRLTLPKCEGGRGIIDIKNLHNKQIHSLRSFFHARSQHSPLHKIITLSDLKLTPLNLNNSLTQPNEHITPLQEKIQVWLAKSLHGRHRRDLINPILDKIASNAWLSKGELFPETEGFMLAIQDQVIETRNYRKHIIHDTQSDICRHCYSTSETIQHITGACKSITQTDYKHRHDQVAYIIHQYLARNYKLIKDSVPYYKYKPLAVIDSVDYKLYWDRTIITDRTVHHNRPDITLFDKKNKIVYLIDVGIPNTHNLQATFTDKITKYRDLSIELKSQWHVNTVKTIPIILSTTGVIPVTLHTSLQQLNLHPLIYIQLQKAVILNTCRIVRKFLAMES

SEQ ID NO: 26335 - protein, 1319 aa, Hedya salicella
MLQPQSQKASSSPSSSGSLFPSLPSTPASYLTFPDSSISSACTTPSNTFNTAENVVQEASTANQPVPVTVDKNVRKKWSREMNIFILRTYFRITALETETGRYLSQLHTEFGHAFPTVEVSKQRLGDQRRAIVRNKLLSDSDIAEIRKLAKNDLITSTSSPQQPQTATQSNSQRMSWTNEINESIMREYYRITHVETNITAYRKPLHQLVIAKHPELSHVSEQRIADQRRVIVNNKYLSEQRLQELKHEILRELTVESDTTWDINSLSLPNNIPETSMTDSLNNLCAEETNSVNNLETFENLINIESQSELHYPPIITQKQIEEAFLAAKERFHKSDPTTRPPIPKQKPSKKLASIVHFINSIVLPKHLDPDSNFQNTQTALYCAAFTASIQNGSKIRDSNPTQNYNENIPNWQKRLQNRLTDLRPKIGRLTEFINGNTSPRLTRHINEIKRQHKRHSRHECENTQLNHFLDTLKQKLSALTNRLRRYKLTTLRKTQNRQFLNNEKVFYRTLHDPHSNSDSELPTAEDMHHFWSDIWSNPVEHKNADWIKSDKESLTSIPDMPFEEISLDLLQSVIAKTHNWKATGSDKIHNYWLKKLTYLHPIFLKHINEFIQAPETLPPYITQGTTYMLPKDNTDTKNPAKYRPITCLQNIYKIITSCISKLIYRHLDTHNILFEQQKGCRPNSQGCKEQLIIDAVISKQAIKNKRNIYTMYIDYKKAFDSVPHTWLIYILNHYKIHHTIIQFLQNTMPHWSTVLKIFTKTTNIETDPINIRRFIFQGDSLSPLWFCLALNPLSNLLNSSKSGFSLNFENTTYTLSHLMYMDDIKLYSHNLVQIHKLADITQSFSSDINMEFGIDKCKIQSIRRGKVEHNTYTLDNGEQIEPVDDVTGYKYLGYQQTQQIHQKTTKNTLKQKFAARIHKVLNTHLNARNTIKAINTYAVPILTYSFGIIQWSQTDLCNLQRIVNTLMTKYRKHHPRSCSQRITLPKTEGGRGLIDIKNLHNKQVTSLRKFFHDLSSHSTIHLAIVKSDKRYTPLNLKDHKKQKSETITQPHQKLQAWIQKSLHGRHRLDLINPNVDKLASNAWLKKGELFPETEGFMLAIQDQVIDTRNYRKYIIRDQNSSTDSCRHCHAASESIQHITGACRSIAQTDYKHRHDQVAAIIHQYLAHKYHLIKDKTSYYKYTPQVILESSEHKLYWDRTIITDKTIHYNRPDITLLDKTTKTVYLIDIAIPNTHNLVSTHTEKITKYKDLSIEIKSQWRVNTVKMVPIIVSTTGVIPRTLHDSLKVINVHPLTFITLQKAVILNTCRIVRKFLAIDQ

SEQ ID NO: 26336 - protein, 1356 aa, Laothoe populi
MTMSNRRYNLRSLPGGRRGASGADAGCSSMRSIGDVGLNRRAPVEEYGTADDNHSSLSSSPKSLFPSTPSSPPSYLTHSPLSSSSSAEDVVQEALHAEQPVPAEACHTRKKWSDEMNISILRSYFIHTLLETDTISYLGKLHNSFLKQYPNIQVSRQRIGDQRRAIIRNKLLSVEKINEIKEEARSYLNTVNIPENNTLHNTVVLSQHNTDNKKPRMRWTQTLNQSILRNYYRITQLETNRTGYRQLLHQAFIREHPQLAHLSEQRISDQLRIIKNNRLLSENQRDVIRNEVVLELSTQSTNQYMSQDESPCTVSHDQISDTVICDPFTNTNTQTHSASHTNISDIFSLSLEKKTEIEETYIQATIEYENTCPTKRPYIPKQKTSKTLASVVHLLNQSILPKHLTLDVDFQTLQTGLYCAALTAAKYNGSKIKLTHERSTRPKSLPPWQFRLQQRINNLRSQIGKVTEYINGNNSDSLKRQIEEIKIRHTIHSKHEQENTELTHFLDTLKQKLNAFASRLRRYKTTTLRKTQNKQFINNEKAFYRSLNEQADTAENTSPTNPEPEHLHTYWSNIWSKPIEHTNADWIKSDTQTLTETTSMDFEEVNLDLLRTIIGKTHNWKATGSDKLHNYWYKKFTYLHPILLSHINTFIRLPNTLPKYITQGTTYMLPKDRQDSINPAKYRPITCLQNIYKIITSCISELIYKHAENNNILAEQQKGCRKRSQGCKEQLIIDTVVSKQAIRNKSDIYTMYIDYQKAFDSVPHTWLIYILEHYKIHPTVIQFLKIAMSNWFTVLKSRTQTGMVESTPIQISRGIFQGDSLSPLWFCLALNPLSNLLNRNNSGYRIEYNNTEYTLSHLMYMDDIKLYGNSLQALHQLADITQQFSEDICMTFGIDKCKIQSVRAGKIEINSYQLNDVERIEPVDNITGYKYLGYQQTQQIHQKETKATLTQKFKSRLNKILKLHLNARNTTKAINTYAIPILTYSFGIIQWSQTDLKKHQRTINTHMTKYRKHHPKSCVERLTLPKNEGGRAIIDIANLHNKQIYTLRTFFHNQAQRSELHLSIVKADHKLTPLNLQDIMPQKNEIITTIHKKLDRWKQKSLHGRHYLDLSNPIVDKIASNTWLRRGELFPETEGFMLAIQDQVIDTKNYRKFILKDSRFTSDLCRHCHRSPETIQHITGACHSITQTDYKHRHDQVAAIIHQKLAFKYGLIKDVTAYYKYQPQVVIDTADYKLYWDRTIITDKTIHYNRPDITFYNKKKSLVYLIDISIPNTHNLAATFTEKLTKYTDLAIEIKNQWQVQTVKTIPIIISSTGVIPHSLHNSLKTLDMHHLTYTQLQKAAILNTCRIVRKFLTTQ

SEQ ID NO: 26337 - protein, 1052 aa, Laothoe populi
MSQDESPYTVSHDQISDTVICDPYTNTNTQTHSASHTNISDIFSLSLEKKTEIEETYIQATIEYENTCPTKRPYIPKQKTSKTLASVVHLLNQSILPKYLTLDVDFQTLQTGLYCAALTAAKYNGSKIKLTHERSTRPKSLPPWQFRLQQRINNLRSQIGKVTEYINGNNSDSLKRQIEEIKIRHTIHSKHEQENTELTHFLDTLKQKLNALASRLRRYKTTTLRKTQNKQFINNEKAFYRSLNEQADTAENTSPTYPEPEHLHKYWSNIWSKPIEHTNADWIKSDTQTLTETTSMDFEEVNLDLLRTIIGKTHNWKATGSDNLHNYWYKKFTYLHPILLSHINTFIRLPNTLPKYITQGTTYMLPKDRQDSTNPAKYRPITCLQNIYKIITSCISELIYKHAENNNILAEQQKGCRKRSQGCKEQLIIDTVVSKQAIRNKSDIYTMYIDYQKAFDSVPHTWLIYILEHYKIHPTVIQFLKIAMSNWFTVLKSRTQTGMVESTPIQISRGIFQGDSLSPLWFCLALNPLSNLLNRNNSGYRIEYNNTEYTLSHLMYMDDIKLYGNSLQALHQLADITQQFSEDICMTFGIDKCKIQSVRAGKIEINSYQLNDVEGIEPVDNITGYKYLGYQQTQQIHQKETKATLTQKFKLRLNKILKLHLNARNTTKAINTYAIPILTYSFGIIQWSQTDLKKHQRTINTHMTKYRKHHPKSCVERLTLPKNEGGRAIIDIANLHNKQIYTLRTFFHNQTQRSELHLSIVKADHKLTPLNLQDIMPQKNEIITTIHKKLDRWKQKSLHGRHYLDLSNPIVDKIASNTWLRRGELFPETEGFMLAIQDQVIDTKNYRKFILKDSRFTSDLCRHCHHSPETIQHITGACHSITQTDYKHRHDQVAAIIHQKLAFKYGLIKDVTAYYKYQPQVVIDTADYKLYWDRTIITDKTIHYNRPDITFYNKKKSLVYLIDISIPNTHNLAATFTEKLTKYTDLAIEIKNQWQVQTVKTIPIIISSTGVIPHSLHNSLKTLDMHHLTYTQLQKAAILNTCRIVRKFLTTQ

SEQ ID NO: 26338 - protein, 1356 aa, Laothoe populi
MTMSNRRYNLRSLPGGRRGASGADAGCSSMRSIGDVGLNRRAPVEEYGTADDNHSSLSSSPKSLFPSTPSSPPSYLTHSPLSSSSSAEDVVQEALHAEQPVPVEACHTRKKWSDEMNISILRSYFIHTLLETDTTSYLGKLHDSFLKQYPNIQVSRQRIGDQRRAIIRNKLLSVEKINEIKEEARSYLNTVNTPENNTLHNTVVLSQHNTDNNKPRMRWSQTLNQSILRNYYRITQLETNRTGYRQLLHQAFIREHPQLAHLSEQRISDQLRIIKNNRLLSENQRDVIRNEVVLELSTQSTNQDMSQDESPYTVSHDQISDTVICDPYTNTNTQTHSASHTNISDIFSLSLEKKTEIEETYIQATIEYENTCPTKRPYIPKQKTSKTLASVVHLLNQSILPKYLTLDVDFQTLQTGLYCAALTAAKYNGSKIKLTHERSTRPKSLPPWQFRLQQRINILRSQIGKVTEYINGNNSDSLKRQIEEIKIRHTIHSKHEQENTELTHFLDTLKQKLNALASRLRRYKTTTLRKTQNKQFINNEKAFYRSLNEQADTAENTSPTYPEPEHLHTYWSNIWSKPIEHTNADWIKSDTQTLTETTSMDFEEVNLDLLRTIIGKTHNWKATGSDNLHNYWYKKFTYLHPILLSHINTFIRLPNTLPKYITQGTTYMLPKDRQDSTNPAKYRPITCLQNIYKIITSCISELIYKHAENNNILAEQQKGCRKRSQGCKEQLIIDTVVSKQAIRNKSDIYTMYIDYQKAFDSVPHTWLIYILEHYKIHPTVIQFLKIAMSNWFTVLKSRTQTGMVESTPIQISRGIFQGDSLSPLWFCLALNPLSNLLNRNNSGYRIEYNNTEYTLSHLMYMDDIKLYGNSLQALHQLADITQQFSEDICMTFGIDKCKIQSVRAGKIEINSYQLNDVERIEPVDNITGYKYLGYQQTQQIHQKETKATLTQKFKLRLNKILKLHLNARNTTKAINTYAIPILTYSFGIIQWSQTDLKKHQRTINTHMTKYRKHHPKSCVERLTLPKNEGGRAIIDIANLHNKQIYTLRTFFHNQTQRSELHLSIVKADHKLTPLNLQDIMPQKNEIITTIHKKLDRWKQKSLHGRHYLDLSNPIVDKIASNTWLRRGELFPETEGFMLAIQDQVIDTKNYRKFILKDSRFTSDLCRHCHHSPETIQHITGACHSITQTDYKHRHDQVAAIIHQKLAFKYGLIKDVTAYYKYQPQVVIDTADYKLYWDRTIITDKTIHYNRPDITFYNKKKSLVYLIDISIPNTHNLAATFTEKLTKYTDLAIEIKNQWQVQTVKTIPIIISSTGVIPHSLHNSLKTLDMHHLTYTQLQKAAILNTCRIVRKFLTTQ

SEQ ID NO: 26339 - protein, 1418 aa, Hedya salicella
MQLRSRSLRPGSLPEDNRRGVSGAVAGCHSMRTNGDAELSRRAPIEQSATAEVGPLPEDDHLGASGAVAGCYSMRTNGDVELSRRAPIVQYATAAIPENRASSPTSLASSSPSSSGSLFPSLPSTPASYLTFPDSSISSACTTPSNTFNTAENVVQEASTANQPVPVTVDKNVRKKWSREMNIFILRTYFRITALETETGRYLSQLHTEFGHAFPTVEVSKQRLGDQRRAIVRNKLLSDSDIAEIRKLAKNDLITSTSSPQQPQTATQSNSQRMSWTNEINESIMREYYRITHVETNITAYRKPLHQLVIAKHPELSHVSEQRIADQRRVIVNNKYLSEQRLQELKHEILRELTVESDTTWDINSLSLPNNIPETSMTDSLNNLCADETNSVNNLETFENLINIESQSELHYPPIITQKQIEEAFLAAKERFHKSDPTTRPPIPKQKPSKKLASIVHFINSIVLPKHLDPDSNFQNTQTALYCAAFTASIQNGSKIRDSNPTQYYNENIPNWQKRLQNRLTDLRAKIGRLTEFINGNTSPRLTRHINEIKRQHKRHSRHEFENTQLNHFLDTLKQKLSALTNRLRRYKLTTLRKTQNRQFLNNEKVFYRTLHDPHSNSDSELPTAEDMHHFWSDIWSNPVEHKNADWIKSDKESLTSIPDMPFEEISLDLLQSVIAKTHNWKATGSDKIHNYWLKKLTYLHPIFLKHINEFIQAPETLPPYITQGTTYMLPKDNTDTKNPAKYRPITCLQNIYKIITSCISKLIYRHLDTHNILIEQQKGCRPNSQGCKEQLIIDAVISKQAIKNKRNIYTMYIDYKKAFDSVPHTWLIYILNHYKIHHTIIQFLQNTMPHWSTVLKIFTKTTNIETDPINIRRGIFQGDSLSPLWFCLALNPLSNLLNSSKSGFSLNFENTTYTLSHLMYMDDIKLYSHNLVQIHKLADITQSFSSDINMEFGIDKCKIQSIRRGKVEHNTYTLDNGEQIEPVDDVTGYKYLGYQQTQQIHQKTTKNTLKQKFAARIHKVLNTHLNARNTIKAINTYAVPILTYSFGIIQWSQTDLCNLQRIVNTLMTKYRKHHPRSCSQRITLPKTEGGRGLIDIKNLHNKQVSSLRKFFHDLSSHSTIHLAIVKSDKRYTPLNLTDHKKQKSETITQPHQKLQAWIQKSLHGRHRLDLINPNVDKLASNAWLKKGELFPETEGFMLAIQDQVIDTRNYRKYIIRDQNSSTDSCRHCHAASESIQHITGACRSIAQTDYKHRHDQVAAIIHQYLAHKYHLIKDKTSYYKYTPQVILESSEHKLYWDRTIITDKTIHYNRPDITLLDKTTKTVYLIDIAIPNTHNLVSTHTEKITKYKDLSIEIKSQWRVNTVKMVPIIVSTTGVIPRTLHDSLKVINVHPLTFITLQKAVILNTCRIVRKFLAIDQ

SEQ ID NO: 26340 - protein, 1418 aa, Hedya salicella
MQLRSRSLRPGSLPEDNRRGVSGAVAGCHSMRTNGDAELSRRAPIEQSATAEVGPLPEDDHLGASGAVAGCYSMRTNGDVELSRRAPIVQYATAAIPENRASSPTSLASSSPSSSGSLFPSLPSTPASYLTFPDSSISSACTTPSNTFNTAENVVQEASTANQPVPVTVDKNVRKKWSREMNIFILRTYFRITALETETGRYLSQLHTEFGHAFPTVEVSKQRLGDQRRAIVRNKLLSDSDIAEIRKLAKNDLITSTSSPQQPQTATQSNSQRMSWTNEINESIMREYYRITHVETNITAYRKPLHQLVIAKHPELSHVSEQRIADQRRVIVNNKYLSEQRLQELKHEILRELTVESDTTWDINSLSLPNNIPETSMTDSLNNLCADETNSVNNLETFENLINIESQSELHYPPIITQKQIEEAFLAAKERFHKSDPTTRPPIPKQKPSKKLASIVHFINSIVLPKHLDPDSNFQNTQTALYCAAFTASIQNGSKIRDSNPTQNYNENIPNWQKRLQNRLTDLRAKIGRLTEFINGNTSPRLTRHINEIKRQHKRHSRHEFENTQLNHFLDTLKQKLSALTNRLRRYKLTTLRKTQNRQFLNNEKIFYRTLHDPHSNSDSELPTAEDMHHFWSDIWSNPVEHKNADWIKSDKESLTSIPDMPFEEISLDLLQSVIAKTHNWKATGSDKIHNYWLKKLTYLHPIFLKHINEFIQAPETLPPYITQGTTYMLPKDNTDTKNPAKYRPITCLQNIYKIITSCISKLIYRHLDTHNILIEQQKGCRPNSQGCKEQLIIDAVISKQAIKNKRNIYTMYIDYKKAFDSVPHTWLIYILNHYKIHHTIIQFLQNTMPHWSTVLKIFTKTTNIETDPINIRRGIFQGDSLSPLWFCLALNPLSNLLNSSKSGFSLNFENTTYTLSHLMYMDDIKLYSHNLVQIHKLADITQSFSSDINMEFGIDKCKIQSIRRGKVEHNTYTLDNGEQIEPVDDVTGYKYLGYQQTQQIHQKTTKNTLKQKFAARIHKVLNTHLNARNTIKAINTYAVPILTYSFGIIQWSQTDLCNLQRIVNTLMTKYRKHHPRSCSQRITLPKTEGGRGLIDIKNLHNKQVSSLRKFFHDLSSHSTIHLAIVKSDKRYTPLNLTDHKKQKSETITQPHQKLQAWIQKSLHGRHRLDLINPNVDKLASNAWLKKGELFPETEGFMLAIQDQVIDTRNYRKYIIRDQNSSTDSCRHCHAASESIQHITGACRSIAQTDYKHRHDQVAAIIHQYLAHKYHLIKDKTSYYKYTPQVILESSEHKLYWDRTIITDKTIHYNRPDITLLDKTTKTVYLIDIAIPNTHNLVSTHTEKITKYKDLSIEIKSQWRVNTVKMVPIIVSTTGVIPRTLHDSLKVINVHPLTFITLQKAVILNTCRIVRKFLAIDQ

SEQ ID NO: 26341 - protein, 1362 aa, Heliconius numata
MDNKRVYNLRPLPGGRRGAPGADAGCLSMRTIGDEELNRRAPVEEYVTAESSPCSSSPTAFLPSPSSSLFIPSSSLSPVSSNHSTVDVVQSPYMDNLSASAAVSSRTRKKWSVEMNIFIVRTYFIVTSLETINTNSYLTPLHAEFIKKFPNMQVSKQRIGDQRRAIMHRNLLTTHKIQEIRDEVRLLLEKELPSGIPYQAIQNSTQSQRRIWTNDINETIIRSYYIITNLEKNMTAYRTQLHKEVITNCPSISDVSVQRIADQRRVIVNNKLIKPHRLLEIRKEVELLIADNNMSTKQNETETQNTAERTNTLEPILHSMDIECTDTMINNDLSEQQTINYNETNRSKVYQLTDEDKNVIDATFSNFYSDFSNTPPTQRPFIPKQKCSKKFYAIVDFINLTVLPKYLQTNIDFDTVHTLLYCSALTAAVHNGSKIKPHQEPIQGKRDVPRWQMRLEERIKDLRVKIGRITEYINGNRNHSLQIHIDKIKLNYKIHTQHETENVQLVEFLDTLKQKLSALANRLRRYTQARQRKVQNKQFTANEKQFYKKLSEGNNNNQNTNSKPNQAESPTASELYNFWSSIWSVPVKYKESSWIDEQNHFCEDLPLMEFEAVDENLLKYVINRTHNWKATGTDRIHNYWYKKLTSIHKPLLTHINSFIKSPNTLPQFLTQGITYLLAKDQTDIRNPAKYRPITCLQTLYKIITSCITELIYKHIDTNSILAEQQKGCRRYSQGCKEQLIIDLVTSKQALTKRKNIYTMYIDYKKAFDSVPHSWLLYILKLYKINPIIIEFLKCNMQKWTTKLKVNNNGHTVETEPIPIRRGIFQGDSLSPLWFCLSINPLSDMLNKSSKGYNIKQTNTQYTLSHLIYMDNIKLYASNLKDIKKLADITEMFSIDIKMELGIDKCKMQSIRRGKKENNTYELKTGEEIEDIDNDNGYRYLGYQQTRQIHQKETKIEINQKFKQRLTAILKTNLNSRNTIKAVNTFVVPILTYSFGIIRWSQSELQKLQRTINTQMTKFRKHHPRSCIQRLTAPKHEGGRGLIDIKNLHNKQITSLRKFFHDRAQISAFHKAVVQSDCNYTPLNLQNEQKQQNEKITTLEQKLNVWQAKSLHGRHRNDLLNPNVDKIASNAWLKKSELFPETEGFMLAIQDQIIETRNYKKHIIHDTQMDLCRHCHSASETIQHITGACKSIAQTDYKHRHDQVACIVHQYLAKNLLLISETVPYYKYKPQSVIDTAEYKLYWDRTIITDRTVHHNRPDITLHIKKLKTIYLIDIAIPNTHNLSSTFTEKITKYTDLSIELKSQWQVNTVKTVPIILSSTGVIPITLHSCLKQLNLHPLLYIQLQKAVILNTCRIVRKFLSYQ

SEQ ID NO: 26342 - protein, 1362 aa, Heliconius numata
MDNKRVYNLRPLPGGRRGAPGADAGCLSMRTIGDEELNRRAPVEEYVTAESSSCSSSPTAFLPSPSSSLYIPSSSLSPSSNHSIVDVVQSPYMDNLSAPAAVSSRTRKKWSVEMNIFIVRTYFIVTSLETINTNSYLTPLHAEFIKKFPKMQVSKQRIGDQRRAIMHRNLLTTHKVQEIRDEVRLLLEKELPSGIPHQAIQNSSQSQRRIWTNDINETIIRSYYTITNLEKNMTAYRTQLHKEVITNCPSISDVSVQRIADQRRVIVNNKLIKPQRLLEIRKEVELLIADNNMSTKQNETETQNTAERTNTIEPILHSIDIECTDTMINNDLSEQQTINYNETNRSKVYQLTDEDKDIIDAAFSNFYSDFSNTPPTQRPFIPKQKCSKKFYAIVDFINLTVLPKYLQTNIDFDTVHTLLYCSALTAAVHNGSKIKSHQEQIQGKRNVPRWQMRLEERIKDLRVKIGRITEYINGNRNHSLQIHIDKIKLNYKIHTQHETENVQLVEFLDTLKQKLSALANRLRRYTQARQRKMQNKQFIANEKQFYKRIGEGNNNNNQNTNSKPNQAESPSASELYHFWSSIWSIPVKHKENSWIDEQNHLCEDLPLMEFEAVDENLLKYVINRTHNWKATGTDRIHNYWYKKITSIHKPLLTHINSFIKSPNTLPQFLTQGITYMLAKDKTDIRNPAKYRPITCLQTLYKIITSCITELIYKHIETNSILAEQQKGCRRYSQGCKEQLIIDLVTSKQALTKRKNIYTMYIDYKKAFDSVPHSWLLYILKLYKISPTIIEFLKCNMQKWTTKLKINNNGHTVETEPIPIRRGIFQGDSLSPLWFCLSINPLSDMLNKSGKGYNIKQTNTQYTLSHLIYMDDIKLYASNLKDINKLADITEMFSIDIKMELGIDKCKMQSIRRGKKENNTYELRTGEEIEEIDNDNGYRYLGYQQTRQIHQKETKTEINQKFKQRLTAILNTNLNSRNTIKAINTFVVPILTYSFGIIRWSQSELQKLQRTINTQMTKFRKHHPRSCIQRLTAPKHEGGRGLIDIKNLHNKQITSLRKFFHNRAQISVFHKAVVKSDCNYTPLNLQNEQNQQNEKITTLEQKLNVWQAKSLHGRHRNDLLSPNVDKIASNAWLKKGELFPETEGFMLAIQDQIIETRNYKKHIIHDTQMDLCRHCHSASETIQHITGACKSIAQTDYKHRHDQVACIVHQYLAKNLHLINETVPYYKYKPQSVIDTAEYKLYWDRTIITDRTVHHNRPDITLHIKKLKTVYLIDIAVPNTHNLSSTFTEKITKYTDLSIELKSQWQVNTVKTLPIILSSTGVIPITLHSCLKQLNLHPLLYIQLQKAVILNTCRIVRKFLAYQ

SEQ ID NO: 26343 - protein, 910 aa, Heliconius numata
MRLEERIKDLRVKIGRITEYINGNRNHSLQIHIDKIKLNYKIHTQHETENVQLVEFLDTLKQKLSALANRLRRYTQARQRKVQNKQFTANEKQFYKKLSEGNNNNQNTNSKPNQAESPTASELYNFWSSIWSVPVKHKESSWIDEQNHFCEDLPLMEFEVVDENLLKYVINRTHNWKATGTDRIHNYWYKKLTSIHKPLLTHINSFIKSPNTLPQFLTQGITYMLAKDQTDIRNPAKYRPITCLQTLYKIITSCITELIYKHIDTNSILAEQQKGCRRYSQGCKEQLIIDLVTSKQALTKRKNIYTMYIDYKKAFDSVPHSWLLYILKLYKINPIIIEFLKCNMQKWTTKLKVNNNGHTVETEPIPIRRGIFQGDSLSPLWFCLSINPLSDMLNKSSKGYNIKQTNTQYTLSHLIYMDDIKLYASNLKDIKKLADITEMFSIDIKMELGIDKCQMQSIRRGKKENNTYELKTGEEIEDIDNDNGYRYLGYQQTRQIHQKETKIEINQKFKQRLTAILKTNLNSRNTIKAVNSFVVPILTYSFGIIRWSQSELQKLQRTINTQMTKFRKHHPRSCIQRLTAPKHEGGRGLIDIKNLHNKQITSLRKFFHDRAQISAFHKAVVQSDCNYTPLNLQNEQKQQNEKITTLEQKLNVWQAKSLHGRHRNDLLNPNVDKIASNAWLKKGELFPETEGFMLAIQDQIIETRNYKKHIIHDTQMDLCRHCHSASETIQHITGACKSIAQTDYKHRHDQVACIVHQYLAKNLHLISETVPYYKYKPQSVIDTAEYKLYWDRTIITDRTVHHNRPDITLHIKKLKTIYLIDIAIPNTHNLSSTFTEKITKYTDLSIELKSQWQVNTVKTVPIILSSTGVIPITLHSCLKQLNLHPLLYIQLQKAVILNTCRIVRKFLSYQ

SEQ ID NO: 26344 - protein, 1187 aa, Apotomis turbidana
MEIKTLTENDIQNSPLISQQSQVNTLYNNQRLSWTNEINESIMREYYRITQLETNTTAYRKPLHQIIIAKYPQLSHVSEQRVADQRRVIINNKFLSEQRLQELKHEIAWIVTDNDSANSAISPSPPNSSSETLMTERTNEQLTVDVIPVNNSDILPSSTPQSENEPQLDYPPITNQEEIEQIFLVAMNRFDNSDPTTRPTIPKQKPSKKLVSIVHFINSVILPKYLATDSNFENTQTALYCAAFAAATQNGSKIGNTHDTQHNNNNQLPNWQKRLQDRITDIRAKIGRLTEFINGNTSPRLTRLVNAIKRHHKLHSRHENENTQLTHFLDTLKQKLSALSSRPRRYKLTTLRKTQNKQFVNNEKIFYRTLHNSPCNLQEPEQNSNRDSESPTAEDMHHFWSEIWSNPVEHRCAEWIEADKDSLDSVSEMPFEDIRLDLFQTVIAKTHNWKATGSDKIHNYWLKKFTYLHLILLKHINEFICTPASLPQYITQGTTYMLPKDNNDRRNPAKYRPITCLQNIYKIITSCISKLIYKHIDTHNILAEQQKGCRPNSQGCKEQLTIDAVISKQALNNKRNIYTMYIDYKKAFDSVPHTWLVYILKHYKIHHTLIQFLHNTMLHWSTVLKVFSNSTHIETEPIEIRRGIFQGDSLSPLWFCLALNPLSNLLNNSEAGFKLNFDNTSHIVSHLMYMDDIKLYGNNLTHINKLADITQSFSSDINMEFGIDKCKIQSIRRGKIERNSYLLDNGDQIDPVDAETGYKYLGYQQSQQIHQKYTKTTLKQKISTRLHKILNTHLNARNTIKAINTYAVPILTYSFGIIQWSQTDLSNLQRVINTLMTKYRKHHPRSCSQRLTLPKKEGGRGIIDIRNLHNKQVSTLRKYFHAQTSRSQIHQAVVKSDKKYTPLNLKDPTKQKSETITEPQQKLQTWIQKSLHGRHRLDLINPNVDKVASNMWLKKGELFPETEGFMLAIQDQIIDTRNYRKHILIRDQNLPTDLCRHCHAASETIQHITGACRSIAQTDYKHRHDQVAAIIHQYLAYKFQLIKDTTSYYKYTPQVVLESPEYKLYWDRTIITDKTIHYNRPDITFHDKLNKTVYLIDIAIPNTHNLASTHTEKITKYIDLSIEIKSQWRVNTVKTIPIVLSTTGVITHNLHDSLKSIKVHPLTFNTLQKAVILNTCRIVRKFLALDQ

SEQ ID NO: 26345 - protein, 791 aa, Apotomis turbidana
MHHFWSEIWSNPVEHRCAEWIEADKDSLDSVSEMPFEDISLDLFQTVIAKTHNWKATGSDKIHNYWLKKFTYLHLILLKHINEFICTPASLPQYITQGTTYMLPKDNNDRRNPAKYRPITCLQNIYKIITSCISKLIYKHIDTHNILAEQQKGCRPNSQGCKEQLTIDAVISKQALNNKRNIYTMYIDYKKAFDSVPHTWLVYILKHYKIHHTLIQFLHNTMLHWSTVLKVFSNSTHIETEPIEIRRGIFQGDSLSPLWFCLALNPLSNLLNNSEAGFKLNFDNTSHIVSHLMYMDDIKLYGNNLTHINKLADITQSFSSDINMEFGIDKCKIQSIRRGKIERNSYLLDNGDQIDPVDAETGYKYLGYQQSQQIHQKYTKTTLKQKFSTRLHKILNTHLNARNTIKAINTYAVPILTYSFGIIQWSQTDLSNLQRVINTLMTKYRKHHPRSCSQRLTLPKKEGGRGIIDIRNLHNKQVSTLRKYFHAQTSRSQIHQAVVKSDKKYTPLNLKDPTKQKSETITEPQQKLQAWIQKSLHGRHRLDLINPNVDKVASNMWLKKGELFPETEGFMLAIQDQIIDTRNYRKHIIRDQNLPTDLCRHCHAASETIQHITGACRSIAQTDYKHRHDQVAAIIHQYLAYKFQLIKDTTSYYKYTPQVVLESPEYKLYWDRTIITDKTIHYNRPDITFHDKLNKTVYLIDIAIPNTHNLASTHTEKITKYIDLSIEIKSQWRVNTVKTIPIVLSTTGVIPHNLHDSLKSIKVHPLTFNTLQKAVILNTCRIVRKFLALDQ

SEQ ID NO: 26346 - protein, 1464 aa, Notocelia uddmanniana
MQLRSRTLRPGPLPEGNRRGASGAVAGCHSMRTSGDAELSRRAPIEQSVTAADGPLPEGNRRGAPGAAAGCHSMRTSGDAELSRRAPIEQSVTAADGPLPEGNRRGAPGAAAGCHSMRSSGDAELSRRAPVEVYTTAENLSIRLPSPTSLCSSIPSSPASLFPSILSSPASYLNYADSESASACTSPTNSISTAEDVVQEASTANQPAPTTAGRKVRKKWSRDMNIFILRTYFRVTSLETETRKYLPQLYDEFRQKFPMFKVSKQRLGDQRRAIIRNNLLSDEDITEIRKLAENDLKDLNSRSHQSQTAAQNTTQRMIWSNEFNESIIREYYIITRLETNTTAYRKPLYQTIISKYPQLSHVSEQRIADQRRAIINNQYISEQRLQEIKLEILRELALVDTTQNTESLSHNDTVTRTPQTDSLDELPEPQNNPLSNYETQPESESLQSYLPLTIQLEIEQTFLIAKERFNNSDPTNRPSIPKQKPSKKLASIVHFINNSVLPKYLPLHSNFESTQTTLYCAAFAASIQNGSKISDSHNTHQFKDQPPHWQKRLQDRITDLRAKIGRLTEFINGNSNPRLTRHITQIKRQYKLHSRHEHENTELTHFLDTLKQKLSALTNRLRRYKLTTLRKTQNTQFVNNEKIFYRTLQNSHNNTREIRQDSNSNSESPTAESLHHFWSEIWSRPVEHRSAEWIEADKQLVSSIPEMTFEQISLDLLQSVIRNTHNWKATGSDNIHNYWLKKFTFLHPILLKYINDFIQSPETLPPYITQGTTYMLLKDKTDKKNPSKYRPITCLQNIYKIITSCIRKLIYGHIETHNILAEQQKGCRQNSQGCKEQLIIDAVISKKALINKNNIYTMYIDYKKAFDSVPHTWLIHILKHYKIHHTIIQFLQNTMLKWSTVLKIFSTGNNIVTEPINIRRGIFQGDALSPLWFCLALNPLSNLLNNSRSGFKLKYDNMSHTISHLMYMDDIKLYGNSLTEIHNLADITQSFSSDIHMEFGIDKCKIQSIRKGKVECNSYTLNNGQQIDPVDEVAGYKYLGYQQTQQIHHKVTKTTLRQKFADRLHKILNTHLNARNTIKAINTFAVPILTYSFGIIQWSQTDLCNLQRMINTLMTKYRKHHPRSCTQRLTLPKAEGGRGFIDIRNLHNKQVSSLRKFFHNQSLRSQIHEAIVRADRKFTPLNLHDHTKQKNEAITEPQQKEQAWLHKSLHGRHRLDLTNPNVDKLASNMWLKRGELFPETEGFMIAIQDQIIDTRNYRKFIIRDRNLPTDLCRRCHGVSETIQHITGACQSIAQTDYKHRHDQVAAIIHQYLAFKYRLIENRTPYYKYTPQIVLESADHKLYWDRTIITDKTVHYNRPDITLHDKAAKTVYLIDVAIPNTHNLASTHTEKISKYTDLSVETKTQWRVNTVKTIPVVISSTGVIPRTLHTSLKTLDVHPLTYILLQKAVIMNTCRIVRKFLALEQ

SEQ ID NO: 26347 - protein, 1460 aa, Cydia pomonella
MSTRLTLPKLRSQLSYLFFFFLSFLWSSSSYRIMKLRSRTLRPGPLPEGNRRGASGAVAGCHSMRSNGDAELSRRAPIEQFVTAADGPLPEGDRRGAPGAAAGCYSMRSSGDAKLSRRASIEEYTTAENVPSREPSSTSLCSFIPPSPSSLFSSVPSSPASYLINTGSESTSASTSPFALPNTTEDVVQEASSANQPAPATARQNVRKKWSREMNIFILRTYFRITALGTETRKYLPQLHEEFSRTFPTFKVSRQRLGDQRRAIVGNKLLSDADIAEVRKLAENDLKDSPSPCHETQQTVTQNSSQRMSWTNEINESIMREYYRITNLETNTTAYRKPLYQAVIAKHPQLSHVSEQRISDQRRVIVNNKYLSEQRLQELRHEISNELTLDNNMIQNTVSHSANILADTLQTDTLEETLPSENHCVGHHETRLDNSNTIENERLYCIPETIQDDIDQAFLAAKERFSSSNPTERPSIPKQKPSKKLASIVHFINSVLLPRYLPDISDFDTTQTTLYCAAFVAATQNGSKIRDSQDAHQYNHQLPTWQKRLQDRIDDLRAKIGRLTEFMNGNSSPRLTRHINIIKRQYQLHSRHENENTQLSDFLDTLKQKLSALTSRLRRYKMTTLRKIQNNQFTNNEKVFYRTLQGPQNSNREPEQNPNINSKSPTAEQLHHFWSEIWSKPVEHRRSNWIEAEYESLSSLPEMPFEQISLDLLQSVIGKTHNWKATGSDKIHNYWIKKFTYLHPILLKHINQFIHDPKSLPQYITQGTTYMLLKDKTDSENPAKYRPITCLQNIYKIITSCISRLIYRHTDLHNIVAEQQKGCRQSSQGCKEQLTIDAVISKQALCNRRNIYTMYIDYKKAFDSVPHTWLIYILKHYKIHDTIIQFLQNTMLHWSTVIKISDKTTNIETEPITIRRGIFQGDALSPLWFCLALNPLSNLLNNNLSGFKLKYGNTSHTVSHLMYMDDIKLYSSSLTDIHKLADITQTFSSDICMEFGIDKCKVQSIRNGRVEHNSYTLNSGEQIDPIDDEDGYKYLGYQQTRQIHHKTTKTTLKHKFTARLHKILNTHLNARNTIKAINTYAIPILTYSFGIIQWSQTDLSNLQRNINTLMTKYRKHHPRSCTQRMTLSRADGGRGLIDIKNLHNKQVRLLRKFFYDQSSRSSMHQAIVMSDRKFTPLNLNDRTTQKSEVITEPQQKQQAWVQKALHGRHRLDLINPSVDRLASNTWLKRGELFPETEGFMIAIQDQIIDTKNYRKHIIRDRNLTIDLCRRCHAASETIQHITGACRSITQTDYKHRHDQVAAIIHQYLAFKLHLINNRTAYYKYTPQTVLESPDYKLYWDRTIITDRTIHYNRPDITLYDKTAKTVYLIDVAIPNTHNLTSTHTEKISKYTDLSIEIKTQWRVNTVKTIPIIVSSTGVIPRTLHSSLKTLDIHPLTYILLQKAAIMNTCRIVRKFLALEQ

SEQ ID NO: 26348 - protein, 1428 aa, Notocelia uddmanniana
MQLRSRRLRPGPMPEGNRRGASGAVAGCHSMRTNGDAELSRRAPIEQYVTAADGPLPEGHRRGAPGAVAGCHSMRTSGDVELSRRASIEEYTTAENPSTRATSSPTSLCPSIPSSSCSLFSSVPSSPASYLNYSDSEITSACTSPSRSISTAEDVVQEASTANKPAPAAADQKVRKKWSRDMNIFILRAYLKITALETETRKYLPQLHDEFSQKFPTFKVSRQRVGDQRRAIVRNKLLSDADIAEIRKLAESDLKDSPCPSHQQQITTQNSSTRMIWTNEINESIMREFFRITQLETNTTAYRKPLYLTIIAKHPQLAHISEQRIADQRRAIINNKYITEQRLQEIKHEISRELSLVVGTQTDVSLPCIDTPYEISQTDSFFYEVPATLNHIESSHGTQTNNLSTEANQTQYQLPSGVQEEIEQAFLAAKETFYNTAPTNRPSIPKKRSSKKLASIVHFMNNAILPKYLSQEENFEFFQTTLYCAAYVAATQTGSKIRDFHHNPQFNDRPPYWQKRLQDRIVDLRAKIGRLTEFINGNTSPRLTRHINAIKRQYKLHSRHENENTQLTHFLDTLKQKLSALTSRLRRYKLTTLRKTQNKQFLNNEKVFYRALQNSNNSTPEPEPNSNTNSESPSAEDLHYFWSDIWSKPVEHRSAEWIEADKESLNSVPSMTFDHVSLDLLQSVIRKTHNWKTTGSDKIHNYWLKKFTYLHPILLTHINEFIHAPETLPLYITQGITYMLPKDKSDRKNPAKYRPITCLQNTYKIITSCISKLIYRHIDTHNILAEHQKGCRQNSQGCKEQLTIDAVISRQALKNKKDIYTMYIDYKKAFDSVPHSWLIHILKHYKIHHTIVRFLENAMLHWSTVLTISSNTTQVVTDPINIRRGIFQGDALSPLWFCLALNPLSNLLNNSKSGIKLKYDSDSHIISHLMYMDDIKLYSSNLTGIHKLADITQAFSSDINMEFGIDKCKIQSIREGKIEHSTYTLANGERIDPVDDEVGYKYLGYQQSQQIHHKITKITLKQKFTSRLHKILNTHLNAGNIIKAINSYAIPILTYSFGIIQWSQTDLLYLQRIINTLMTKYRKHHPRSCIQRLILPKAEGGRGLIDIKNLHNKQVSSLRKFFHDRSSNSQIHQAIVKADQKLTPLNLNSYDKQKNEEITEPQQKLQAWLQKSLHGRHRLDLINPNVDKLASNMWLKRGELFPETEGFMIAIQDQIIDTRNYRKHIIHDRNLPTDLCRRCHAASETIQHITGACRSITQTDYKHRHDQVAAIIHQYLAYKYQLIEKRTPYYKYSPQTVLESTEHKLYWDRTIITDKTVHYNRPDITLHDKAAKTVYLIDVAVPNTHNLASTHTEKISKYTDLSIEIKTQWKVNTVKTVPIVISSTGVIPRTLHTNLKTLDIHPLTYILLQKAVIMNTCRVVRKFLAIEP

SEQ ID NO: 26349 - protein, 1574 aa, Notocelia uddmanniana
MICYFNFILEYIIFVAVALKSLLTPLSNLLSPFITQLSPQNLLTPFYGTLCLSPKISRLQCALIIIKHLDHTPVWEILKTCQYQLGYPSQTKIPSPFLSYPPFFFLFRVIMQLRSRTLRPGPLPEGNRRGASGTVAGCHSMRTSGDAELSRRAPIEQSVTAADGPLPEGNRRGAPGAAAGCHSMRTSGDAELSRRAPIEQSVTAADGPLPEGNRRGAPGAAAGCHSMRNSGDAELSRRAPVEVYTTAENLSIRLPSPTSLCSSIPSSPASLFPSILSSPASYLNYADSESASACTSPTNSISTAEDVVQEASTANQPAPTTAGRKVRKKWSRDMNIFILRTYFRVTSLETETRKYLPQLYDEFRQKFPMFKVSKQRLGDQRRAIIRNNLLSDEDITEIRKLAENDLKDLNSRSHQSQTAAQNTTQRMIWSNEFNESIIREYYIITGLETNTTAYRKPLYQTIISKYPQLSHVSEQRIADQRRAIINNQYISEQRLQEIKLEISRELALVDTTQNTESLSHNDTVTRTPQTDSLDELPEPQNNPLSNYETQPESESLQSYLSLTIQLEIEQTFLTAKERFNNSDPTNRPSIPKQKPSKKLASIVHFINNSVLPKYLPLDSNFESTQTTLYCAAFAASIQNGSKISDSHNTHQFKDQPPHWQKRLQDRITDLRAKIGRLTEFINGNSNPRLTRHITQIKRQYKLHSRHEHENTELTHFLDTLKQKLSALTNRLRRYKLTTLRKTQNTQFVNNEKIFYRTLQNSHNNTREIRQDSNSNSESPTAESLHHFWSEIWSRPVEHRSAEWIEADKQLVSSIPEMTFEQISLDLLQSVIRKTHNWKATGSDNIHNYWLKKFTFLHPILLKYINDFIQSPETLPPYITQGTTYMLLKDKTDKKNPSKYRPITCLQNIYKIITSCIRKLIYGHIETHNILAEQQKGCRQNSQGCKEQLIIDAVISKKALMNKNNIYTMYIDYKKAFDSVPHTWLIHILKHYKIHHTIIQFLQNTMLKWSTVLKIFSTGNNIVTEPINIRRGIFQGDALSPLWFCLALNPLSNLLNNSRSGFKLKYDNMSHTISHLMYMDDIKLYGNSLTEIHNLADITQSFSSDIHMEFGIDKCKIQSIRKGKVECNSYTLNNGQQIDPVDEVAGYKYLGYQQTQQIHHKVTKTTLRQKFADRLHKILNTHLNARNTIKAINTFAVPILTYSFGIIQWSQTDLCNLQRMINTLMTKYRKHHPRSCTQRLTLPKAEGGRGFIDIRNLHNKQVSSLRKFFHNQSSRSQIHEAIVRADRKFTPLNLHDHTKQKNEAITELQQKEQAWLHKSLHGRHRLDLTNPNVDKLASNMWLKRGELFPETEGFMIAIQDQIIDTRNYRKFIIRDRNLPTDLCRRCHGVSETIQHITGACQSIAQTDYKHRHDQVAAIIHQYLAFKYRLIENRTPYYKYTPQIVLESADHKLYWDRTIITDKTVHYNRPDITLHDKAAKTVYLIDVAIPNTHNLASTHTEKISKYTDLSVEIKTQWRVNTVKTIPVVISSTGVIPRTLHTSLKTLDVHPLTYILLQKAVIMNTCRIVRKFLALEQ

SEQ ID NO: 26350 - protein, 1342 aa, Pammene fasciana
MKLRSRTIRPGPLPEGNRRGASGAVAGCHSMRTNGDAELSRRAPIEESVTAAIGPLPEGDRRGAPGAAAGCHSMRTSGDAELSRRAPVEEYTTAENPSSRESPLPSLCPSIPSSSGSLFSSVPSSPASYMKNQDSEHTSTCTSPSTSICTTEDVVQEASTANQPAPATVRQNVRKKWSRDMNIFILRTYFRITILETETRKYLPQLHEEFTKQFPTFQVSKQRLGDQRRAIVQNKLLSDTDIAEIRKLAENDIKETPSPTQIVTQSSNQRMSWSNEINESIIKEYYRITRLETITTAYRKPLHQIIIAKYPQLSHISEQRIADQRRAIINNRYLTDQRLQEIKHEVSCEINLDDNTFHARDMSETQQTALYNEVPVTCYNTLESNSDSQSNILNTCENENQTMRNYLPVTTQIEIENNFLAAKEEFLNSEPTKRPSIPKQKPSKRLAAIVHFINDVILPKHLPQDSSFEITETTLYCAAVTAAIQNGSKIRDSQFSHQYNSQPPKWQQRLQYRITDLRAKIGRLTEFINGNTSPRLTRHINLIKHQYKLHSRHEDENTQLTHFLDTLKQKLSALTSRLRRYKLTTLRKTQNKQFVNNEKVFYRTLQNSHSSTSNPGQDSNDNSESPTAEQLHQFWSDIWSKPMEHQNAEWIDADRELLSSVPDMTFEHISLDLMQSVINKTHNWKATGSDNIHNYWIKKFTYLHPTFLKHINQFIHSPEKLPQYITRGTTYMLVKDRSDRKNPAKYRPITCLQNIYKIITSCISKLIYKHINTHNILAEQQKGCRPNSQGCKEQLTIDAVVSKNAHSKKTDIYTMYIDYKKAFDSVPHTWLIYILKHYKVHNTIISFLKNTMSQWSTVLKISNNNNNIITEPINIRKGIFQGDALSPLWFCLALNPLSNLLNKSNAGFKLKYGNASHTISHLMYMDDIKLYSNNLTDIHRLADITQTFSSSIRMEFGIDKCKILSIRNGKIEQNSFTLNNGERIDPVDEEFGYKYLGYQQSQQIHHKIIKPTLRQKFSDRLHKIFNTNLNSRNIVKAINAYAIPILTYSFGIIQWSQTDLGNLQRIINTLLTKYRKHHPRSCIQRLILPKAEGGRGLIDIKNLHNKQVRSLRKFFHSQASHSQLHQAIVKADQKHTPLNLSDSTKQKNEEITEPQQKLQAWAQKSLHGRHRLDLINPNVDKLASNMWLKKGELFPDTEGFMIAIQDQIIDTRNYRKYIIRDRTLTTDLCRRCHAASETIQHITGACRSITQTDYKHRHDQVAAVIHQYIAFKYHLIKDRTSYYKYSPQTLLESTEYKLYWDRTIITDKTVHYNRPDITLHDKAAKTVYLIDIAVPNTPQLAK

SEQ ID NO: 26351 - protein, 1022 aa, Ectropis grisescens
MERNEIREEHQTTSIEISLELKDNIENKFREVFSKFKNTEPTLRPAIPKQKQSKKLSMITQYVNRHLLTKHTNVDTDFTMLQTIIYCAAYTSVEVNGKNIKDSSNTQKSQLQKPRWQMRLENRISELRIKIGRLSEYMNGNTSSRLRKHIDKIKQNHKIHSQHEAENTELIHFLDTLKQKLNALSSRLRRYKATTKEKNQNKLFNTNEKLFYRNLTDEQTDNNLRSDFPLPETLHKFWYEIWSIPKEHNKNIEWINQDAQAIQIVPSMLFEDIKIELFREIIKKTHNWKATGSDRIHNYWYKYFTSIHSYLLKHINTFIQSPETMPKYLTLGTTYLIPKDKTDLKNPSKYRPITCLQTIYKIITSCISHLVYQHTHTNGLLAEQQKGCRKYSQGCKEQLIIDSIASKQAFKKKRSIYTMYIDYKKAFDSVPHTWLIYILKHYKVHPTLVNFLETAMTHWKTILKLNIDKTSIETEPIPIRRGIFQGETFSPVWFCLALNPLSNLLNKSNIGYRVTNGNSSYTLSHLLYMDDIKLYGSSFEEINNLADITQSFSKDIHMEFGIDKCKILSVHKGQIEQNIYELTDGQQIDPIDPISGYKYLGYFQAQQIHQKQAKDSIEQKFKGRLHKILNTQLNAKNTIKAINSFAIPILTYSFGIITWSQSYLKNLQRIINVLMTKYRKHHPRSCIERLTMPNREGGRGLIDIRNLHNTQITRLRTFFHDKANTSPMHSAVIDSDYKYTPLNLHNKTKQNNETIISLTEKQESWLQKSLHGRHRRDLLNPNIDKISSNMWLKQGDLFPETEGFMLAIQDQVIETRNYRKYIIKDNTPDLCRHCHSASETIQHITGACRSITQSDYKHRHDQVAAIIHQYIAYKHKFITEKIAYYKYSPAVILESSDYKMYWDRTIITDKTIHHNRPDITVHDKNNKIVFLIDIAIPNTHNLSTTYTDKLTKYTDLTIELKTQWKVQTVKTIPIILSSTGVIPHTLHNSLQNLSIHPLTFILLQKAVILNTCRIVRKFLSLD

SEQ ID NO: 26352 - protein, 1424 aa, Amyelois transitella
MITSSLKASLTNGPKPMLKMNMENNRRYNLRPLPGGRRGALGAGAECHSMRTIGDEELSRRAPVEESATAENHSSQSPSQNHLILASSPSSLFSSPPSSPASYINRSPSTTSSVKSTSPLQPSRDVVQEASIAKETAPATAGPRVRKKWSNDMNTFIMRTYFIITSLETTNLRNYLTPLYEKFMDRFPEVDASKQRIGDQRRAIVRNKLLTEEEINKIRQEVEIYLQNTQTIQFTHQPSTTERMRWSDEVNETIMTAYYKITALETNSTAYRQILHQTVIRKHPEISHVSEQRIADQRRVIVNNKLLSAEKLQDIKDKVARDLLTTTSTLSELDIYPSSHDNIQITLTGSNIQSENEDTQNQISTQQQVRQSTHSSDMLHSEIDTQIEVEFNALLDKFMNTDPTKRPRIPKQRPSKKFMAIVSNLNRYVLPKYISTETDFLTLQTIIYVGAQTAVKLNGAKIKEITDNRRIIFRKPRWETRLEDKIKNLRAKAGRLTEYINGNRGQGLERQIELIKQQHQLHSQHENHNTELSHFLDTIKQKINTYANRLRRYKETTNRKQQNKLFTNNEKIFYRSFTQSQNNTDKPLPPPEKLHEFWANIWSKPVTHKENEWIEQDKEYIRDVQNMDFDKIQLDTLESVIAKTHNWKATGTDNIHNYWYKKFTCTHPLLLSHINNFLQYPEVVPPYVTEGITYMISKDNTDTTNPSKYRPITCLQTIYKIITSCINEEIYSHITKYNILAEEQKGCRRNSRGCKEQLIIDAVSSRQAYLKKRNIYTMYVDYKKAYDSVPHTWLIYILEHYKIHPTLVNFLKNLMLTWNTKLILNTQNENIETDPIHIRRGIFQGDALSPLWFCLALNPLSNLLKNSEKGFKIQTDSDHHILSHLMYMDDIKLFGQSLEELNTLTDITEKFSCDICMEFGIDKCSIQSVNKGKIENNSYTLQNNELIEPLDQIVGYKYLGYQQSRQIHQKETKQKLMNEFRTRLHKILNTHLNARNTIKAINTFAVPILTYSFGIINWSQSDLKNLQRTINTLMTKYRKHHPRSCIQRLTLPKHEGGRGLIDIQNLHNKQITSLRSFFFHHSQQSSLHMSIIQADKKYTPLNLTDPTKQKNESITTTQQKIECWSQKSLHGRHRLDLIHPNVDKAASNAWLKRGELFPETEGFMLAIQDQVIDTKNYRKYIIKDLQNDFCRHCHSSPETIQHITSACRSISQTDYKHRHDQVAAIIHQYLAAKHKLITQKTAYYKYKPQVILDSPECKLYWDRTILTDKTVHHNRPDITLYDKTKKIVYLIDVAIPNTHNLSSTHTEKITKYTDLAIELKSQWRVDTVKTVPIVISSTGVIPQSLHTSLKTLDIHPLTFILMQKAVILNTCRTVRKFLSSETKKKKKKKKSLLFSSELKLFAFGHKPALTVKSLKLSLGEKHIK

SEQ ID NO: 26353 - protein, 768 aa, Ephestia elutella
MEFKNISIDTLKLVISKTHNWKATGTDKVHNYWYKKLTFIHPFLLTHINKFIHSPDTIPLYLTQGITYMLPKDTTDPTNPAKYRPITCLQTLYKIVTSCINENIYAHIQENNILAEEQKGCSRGSRGCKEQLIIDAVASKQALTKKRNIYSMYIDYKKAYDSVPHTWLVYILEHYKIHPTLVNFLKTIMQHWNTKLILTNNNTNIETEPINIRRGIFQGDALSPLWFCLALNPLSNLLKDSNRGFEIKSNNANHTLTHLMYMDDIKLFASSLEDIQAMAHITETFSSDIRMEFGIDKCKIQSVQKGKVENNTYTLQNEEHIDPVDQTIGYKYLGYQQTQQIHQKETKAKLTDDFRTRLHKIFNIYLNARNTVKAINTFAIPILTYSFGIINWSQSDLKNLQRNINTLLTKYRKHHPRSCIQRLTLPKHEGGRGIVDIQNLHNKQITALRSFFYHSAPASPLITSIIQADKKLTPLNLNDSSQQKKEELTTLQQKIDSWTQKSLHGRHRLDLMNPNVDKVASNAWLKRGELFPETEGFMLAIQDQIIDTKNYRKYIIKDIQNDNCRHCHSSPETIQHITGACRSITQTDYKHRHDQVASIVHQYLASKYNLIKEKTAYYKYSPEIVLDSPEYKLYWDRTIITDKTIHHNRPDITLYDKRNKTVYLIDIAVPNTHNLSSTYTEKLTKYTDLAIEIKTQWRAEIVKTIPIVISSTGVIPRSLHTSLNLLQIHPFTFILMQKAVILNTCRIVRKFMSSDRTLLRRACTPHSK

SEQ ID NO: 26354 - protein, 1375 aa, Ephestia elutella
MKMEENKRYNLRPLPGGRRGVLGADAEYHRMRTIGDGGLSRRAPLEQRTTADDHSQSSPITSAIVQNHPSPSSSPSSLFPSIASSPASYMSRLSSPPPSVINVSPLQPSRDVVQEASTATLPAPAMTGSRVRKKWTKEMNTFIMRTYLTITSLETTNLRNYLSSLYEKFIEKYPEAEVSKQRIGDQRRAIVRNKFLSDEEIAIIRQEVEIELRNIQPTQSIHPPNNTERMRWPDEVNETIMITYYTITALETNKTGYRQMLYQTVIKKHPEISHVSEQRIADQRRVIINNRLLSLEKLQEIRDKVALDLITLTPSEPSQQCSNTLSPSDLRSTHNSQDEHNYDHYQVTLTSIQQEDRQNTPQEEQNIQDYPLPSETENQVEIEFKTLLDKYMQTEPTKRPRIPKQRPSKKLMAIVSSLNKNILPKYISTETDFLTLQTIIYVGALTAVRLNGTRISETTNNIRQRPDKPRWEKRLEDKIKDLRAKAGRLTEYMNGNRGQALERQVELIKQQYQLHSQHEHQNTELSHFLDTIKQKINTAANRLRRYKETTERKRQNRQFCSNEKIFYRSLTQSNNNDNTTPPPPETLHEFWSNIWSKPVSHKENEWIEQDKYYIQDVQNMQFETIDIEVLQSVIAKTHNWKSTGSDNIHNYWYKKFTCTHSLLLSHINNFLEFPETMPSYLTQGLTYLLPKDYTDTTNPSKYRPITCLQTLYKIITSCINEAIYSHITKYNILAEEQKGCRRNSRGCKEQLIIDAVASKQAYIKKRSIYTMYVDYKKAYDSVPHTWLIYVLEHYKIHPTIVNFLKKLMLNWNTKLILKTKNTNIETDPIQIRRGIFQGDALSPLWFCLALNPLSNLLKHTKKGFQINADDEHHTISHLMYMDDIKLYGQSLQELHHLAGITEQFSADIHMEFGIDKCKIQSVHKGKIQNNSYTLQNDEQIEPLDLILGYKYLGYQQSQQIHQKETKQKLTDEFRTRLHKILNTHLNARNTVKAINTFAIPILTYSFGVINWSQSDLKNLQRIINTLMTKYRKHHPRSCIQRLTLPKSEGGRGLIDIQNLHNKQITTLRSFFHHHSQQSPLHTITTQADKKYTPLNLQDHSKQKNETITTAKQKLEAWAVKSLHGRHFLDLANPNVDKSASNAWLKRGELFPETEGFMLAIQDQVIDTKNYRKYIIKDLQNDSCRHCHSSPETIQHITGACRAITQTDYKHRHDQVASIIHQYLAAKYKLITEKTAYYKYSPQVILDSPEYKLYWDRTILTDKTVHHNRPDLTLHDKNNRTVYLIDIAVPNTHNLSSTYTEKITKYTDLAIELKAQWRVDTVKTVPIIISSTGVIPKSLYTSLNLLDIHPLTYILMQKAVILNTCRTVRKFLSSDS

SEQ ID NO: 26355 - protein, 997 aa, Fabriciana adippe
MSLSNSYTDFINTCPTQRPYIPKQKCTRKFNAIVNFINSTILPKYINLNDDFQKLHTILYCAAFTAAVHNGLKISNNQGRSIEPHKTPKWQSRLEDKVKDLRVKIGRLTEYINGNRSNKIRFYINIIKANHKIHSQHESENTELAEFLDTLKQKLSAIVSRLRRYKLAAQRKSQNKQFISNEKQFYKNLSQLNLNNKSTNKNELPTESELHNFWSSVWSTPAEHKQNHWIEEQNYLNEQIPQMKFSPIDIDLLKSVIAKTHSWKATGTDRIHNYWYKKFTSPHTFLLTHINNFIQSPTILPSFITQGITYMIPKDQTDRRDPAKYRPITCLQTIYKIITSCITELIYRHIDSNNILTEQQKGCRRYSQGCKEQLIIDSVTSKQALKKKRNIYNIYIDYKKAFDSVPHTWLIYVLHLYKIHPTIIEFLKTNMLKWTTQLKLNNVSSSIETQPIPIRRGIFQGDSLSPLWFCLSLNPLSDMLNNSGKGYKITYEHTHYKLSHLMYMDDIKLYASNLTDIHKLADITQMFSTDIQMEFGIDKCKMQSVRRGQKEHNFYELDSGEQIQPIDDENGYTYLGYQQSRQIHQKQTKIEIIKKFKLRLHKILNTALNARNTIKAINTYAVPIITYSFGIITWSQSDLLKLQRTINTLMTKYRKHLPRSCIQRLTIPKHEGGRGLIDIKNLHNKQITSLRKFFQNRSQYSELHKAVTKSDCKFTPLNLHDQQLQPKEHITQVQHKLDTWLAKSLHGRHRSDLLNPIVDKVASNAWLKKGELFPETEGFMIAIQDQIIETRNYKKHIIHDTQIDLCRHCHSASETIQHITGACKSIAQTDYKHRHDQVASIIHQYLAKKHNLIKEHVAYYKYKPQSVLESSDHKLYWDRTIITDRTVHHNRPDITLYDKKHKTVYLIDIAIPNTHNLSSTHSDKITKYIDLSIELKTQWQVHTVRTIPIILSTTGVIPLTLHASLKQLDIHPLLYIQLQKAVILNTCRIVRKFLSMQ

SEQ ID NO: 26356 - protein, 1362 aa, Ephestia elutella
MKMEENKRYNLRPLPGGRRGVLGADAEYHRMRTIGDGGLSRRAPLEQRTTADDHSQSSPITSAIVQNHPSPSSSPSSLFPSIASSPASYMSRLSSPPPSVINVSPLQPSQDVVQEASTATLPAPAMTGSRVRKKWTKEMNTFIMRTYLTITSLETTNLRNYLSSLYEKFIEKYPEAEVSKQRIGDQRRAIVRNKFLSDEEITIIRQEVEIELRNIQPTQSIHPPNNTERMRWPDEVNETIMITYYTITALETNKTGYRQMLYQTVIKKHPEISHVSEQRIADQRRAIINNRLLSLEKLQEIRDKVALDLITLTPSEPSQSHNSQDEHNYDHYQVTPTSIQQEDRQNTPQEEQNIQDYPLPSETENQVEIEFKTLLDKYMQTEPTKRPRIPKQRPSKKLMAIVSSLNKNILPKYISTETDFLTLQTIIYVGALTAVRLNGTRISETTNNIRQRPDKPRWEKRLEDKIKDLRAKAGRLTEYMNGNRGQALERQVELIKQQYQLHSQHEHQNTELSHFLDTIKQKINTAANRLRRYKETTERKRQNRQFCSNEKIFYRSLTQSNNNDNTTPPPPETLHEFWSNIWSKPVSHKENEWIEQDKDYIQDVQNMQFETIDMEVLQSVIAKTHNWKSTGSDNIHNYWYKKFTCTHSLLLSHINNFLESPETMPSYLTQGLTYLLPKDYTDTTNPSKYRPITCLQTLYKIITSCINEAIYSHITKYNILAEEQKGCRRNSRGCKEQLIIDAVASKQAYIKKRSIYTMYVDYKKAYDSVPHTWLIYVLEHYKIHPTIVNFLKKFMLNWNTKLILKTKNTNIETDPIQIRRGIFQGDALSPLWFCLALNPLSNLLKHTKKGFQINADDAHHTISHLMYMDDIKLYGQSLQELHHLAGITEQFSADIHMEFGIDKCKIQSVHKGKIQNNSYTLQNDEQIEPLDLILGYKYLGYQQSQQIHQKETKQKLTDEFRTRLHKILNTHLNARNTVKAINTFAIPILTYSFGVINWSQSDLKNLQRIINTLMTKYRKHHPRSCIQRLTLPKSEGGRGLIDIQNLHNKQITTLRSFFHHHSQQSPLHTITTQADKKYTPLNLQDHSKQKNETITTAKQKLEAWAVKSLHGRHFLDLANPNVDKSASNAWLKRGELFPETEGFMLAIQDQVIDTKNYRKYIIKDLQNDSCRHCHSSPETIQHITGACRAITQTDYKHRHDQVASIIHQYLAAKYKLITEKTAYYKYSPQVILDSPEYKLYWDRTILTDKTVHHNRPDLTLHDKNNRTVYLIDIAVPNTHNLSSTYTEKITKYTDLAIELKAQWRVDTVKTVPIIISSTGVIPKSLYTSLNLLDIHPLTYILMQKAVILNTCRTVRKFLSSDS

SEQ ID NO: 26357 - protein, 1376 aa, Hemaris fuciformis
MPRKGRTLAAFSYTLTNDQRSNSTKFIIHAMRLRSRIIPQAGTEANCDGESRPGPQNPGCPTYSGEGTVSHQTAQFQAVAVQHDRSQSCSSPASSLFSSIPSSPPSYLDKNLDSLSSSPSSLHSTQDVVQEAISAEVTAPAREGRRTRKTWTKEMNIFIMRHYFILTNLESNTKQYLTPLHTRFITEFPNMQVGKQRVGDQRRAIVQRKLLHQTEINNIKEAVRSFLQNQPDGSSQTEHTQSQRMRWTDELNIAIMRSYYKLTKLESDLTSYRPLLHKDIITKYPSLSHLTPQRISDQRRSIVNNHLLSSEKLNNILEEVRKELNTNTTCSTIETELIPLVNKNSSPNNPDPTQITNSLQNLPQSNTTNETQKLPTELQKQLEDIFLQTFNRFRDTSPTSRPSLPKLKPCKKLANIVNHLNSDIIPRFLSTDTDFNTTQTFIYCGAYTAAKFIGSRILEGNKSRIVTQVKPRWQRRLEDRISGLRVDIGRLTEYARGIRSKKLEKYIQKIMQQYKNHSKHESENTDITHYMDTLKQKLNTLASRLRRYKQTTLRKTQNKLFCSNEKLFYRKLTQHNPQIQNTRLPTTEALHEFWSNIWSRPVEHNKNQWIEKDKQRYKNIPQMEFDHISIDHLTSVIHKTHNWKAAGSDHIHNFWYKKFTCTHPLLLKHINAFIISPDTMPHYITQGITYMIPKDPTDTTNPAKFRPITCLQNIYKIITSCLTQSIYHHIQKYKILAEEQKGCCRNSKGCKEQLTIDAVASSQALIQKRNIHSMYIDYKKAFDSVPHSWLLYILKHYNIHPKITFFLENTIVNWSTKLKICNSFCNTETELIPIKRGIFQGDSLSPLWFCLALNPLSNMLNEQSIGYNITYLSQHITLSHLMYMDDIKLFGSSLSDLHTLADVTQIFSNDIHMEFGIDKCKIQSIDRGKFVPTSYELVSHKIIEPIDLIEGYKYLGFHQSRQIHHKEIKATLQQNFKTRLHRILHTQLNAYNTTKAINTYAIPVLTYSFGIIRWTQTDLKVLQRTVNTTMTKHRKHHPRACTERLTLPKHEGGRGLIDIINLHNKQIESLRTFFYSQSQQSTLHKAICQADTYTPLNLADKNKQFTINTDHQKIDSWTKKSLHGRHRLDLTSPNVDKIASNAWLRRGELFPETEGFMLAIQDQVIDTKNYRKYIIRKSSLNSDHCRHCHKHPETIQHITGACSFITQTDYKHRHDQVAAIIHQILAHKHNLIKEKIAYYKYKPPIVLDSPNYKLYWDRTILTDKTIHHNRPDITLHDKLNRIVYLIDIAIPNTHNLTSTHTNKLTKYTDLSIELKTQWKAETVKTVPIIISGTGVIPKTLHASLNTLHIHPLTYIVLQKAAILNTCRIVRKFLSLE

SEQ ID NO: 26358 - protein, 1346 aa, Hemaris fuciformis
MRLRSRIIPQAGTEANCDGESRPGPQNPGCPTYSGEGTVSHQTAQFQAVAVQHDRSQSCSSPASSLFSSIPSSPPSYLDKNLDSLSSSPSSLHSAQDVVQEAISAEVTAPAREGRRTRKTWTKEMNIFIMRHYFILTNLESNTKQYLTPLHTRFITEFPNMQVGKQRVGDQRRAIVQRKLLHQTEINNIKEAVRSFLQNQPDGSSQTEHTQSQRMRWTDELNIAIMRSYYKLTKLESDLTSYRPLLHKDIITKYPSLSHLTAQRISDQRRSIVNNHLLSSEKLNNILEEVRKELNTNTTCSTIETELIPLVNKNSSPNNPDPTQITNSLQNLPQSNTTNETQKLPTELQKQLEDIFSQTFNRFRDTSPTSRPSLPKLKPCKKLANIVNHLNSDIIPRFLSTDTDFNTTQTFIYCGAYTAAKFNGSRILEGNKFRIVTQVKPRWQRRLEDRISGLRVDIGRLTEYARGIRSNKLEKYIQKIMLQYKNHSKHESENTDITHYMDTLKQKLNTLASRLRRYKQTTLRKTQNKLFCNNEKLFYRKLTQHNPQIQNTRLPTTEALHEFWSNIWSRPVEHNKNQWIEKDKQRYKNIPQMEFDHISIDHLTSVIHKTHNWKAAGSDHIHNFWYKKFTCTHPLLLKHINAFIISPDTMPHYITQGITYMIPKDPTDTTNPAKFRPITCLQNIYKIITSCLTQSIYHHIQKYKILAEEQKGCCRNSKGCKEQLTIDAVASSQALIQKRNIHSMYIDYKKAFDSVPHSWLLYILKHYNIHPKITFFLENTIVNWSTKLKICNSFCNTETELIPIKRGIFQGDSLSPLWFCLALNPLSNMLNEQSIGYNITYLSQHITLSHLMYMDDIKLFGSSLSDLHTLADVTQIFSNDIHMEFGIDKCKIQSIDRGKFVPTSYELVSHKIIEPIDLIEGYKYLGFHQSRQIHHKEMKATLQQNFKTRLHRILHTQLNAYNTTKAINTYAIPVLTYSFGIIRWTQTDLKVLQRTVNTTMTKHRKHHPRACTERLTLPKHEGGRGLIDIINLHNKQIESLRTFFYSQSQQSTLHKAICQADTYTPLNLADKNKQFTINTDHQKIDSWTKKSLHGRHRLDLTSPNVDKIASNAWLRRGELFPETEGFMLAIQDQVIDTKNYRKYIIRKSSLNSDHCRHCHKHPETIQHITGACSFITQTDYKHRHDQVAAIIHQILAHKHNLIKEKIAYYKYKPPIVLDSPNYKLYWDRTILTDKTIHHNRPDITLHDKLNRIVYLIDIAIPNTHNLTSTHTNKLTKYTDLSIELKTQWKAETVKTVPIIISSTGVIPKTLHASLNTLHIHPLTYIVLQKAAILNTCRIVRKFLSLE

SEQ ID NO: 26359 - protein, 1346 aa, Hemaris fuciformis
MRLRSRIIPQAGTEANCDGESRPGPQNPGCPTYSGEGTVSHQTAQFQAVAVQHDRSQSCSSPASSLFSSIPSSPPSYLDKNFDSLSSSPSSLHSAQDVVQEAISAEVTAPAREGRRTRKTWTKEMNIFIMRHYFILTNLESNTKQYLTPLHTRFITEFPNMQVGKQRVGDQRRAIVQRKLLHQTEINNIKEAVRSFLQNQPDGSSQTEHTQSQRMRWTDELNIAIMRSYYKLTKLESDLTSYRPLLHKDIITKYPSLSHLTAQRISDQRRSIVNNHLLSSEKLNNILEEVRKELNTNITCSTIETDLIPLVNKNSSPTNPDPTQITNSLQNLPQSNTTNETQKLPTELQKQLEDIFSQTFNRFRDTSPTSRPSLPKLKPCKKLANIVNHLNSDIIPRFLSTDTDFNTTQTFIYCGAYTAAKFNGSRILDGNKSRIVTQVKPRWQRRLEDRISGLRVDIGRLTEYARGIRSKKLEKYIQKIMQQYKNHSKHESENTDITHYMDTLKQKLNTLASRLRRYKQTTLRKTQNKLFCNNEKLFYRKLTQHNPQIQNTRLPTTEALHEFWSNIWSRPVEHNKNQWIEKDKQRYKNIPQMEFDHISIDHLTSVIHKTHNWKAAGSDHIHNFWYKKFTCTHPLLLKHINAFIISPDTMPHYITQGITYMIPKDPTDTTNPAKFRPITCLQNIYKIITSCLTQSIYHHIQKYKILAEEQKGCCRNSKGCKEQLTIDAVASSQALIQKRNIHSMYIDYKKAFDSVPHSWLLYILKHYNIHPKITFFLENTIVNWSTKLKICNSFCNTETELIPIKRGIFQGDSLSPLWFCLALNPLSNMLNEQSIGYNITYLSQHITLSHLMYMDDIKLFGSSLSDLHTLADVTQIFSNDIHMEFGIDKCKIQSIDRGKFVPTSYELVSHKIIEPIDLIEGYKYLGFHQSRQIHHKEMKATLQQNFKTRLHRILHTQLNAYNTTKAINTYAIPVLTYSFGIIRWTQTDLKVLQRTVNTTMTKHRKHHPRACTERLTLPKHEGGRRLIDIINLHNKQIESLRTFFYSQSQQSTLHKAICQADTYTPLNLADKNKQFTINTDHQKIDSWTKKSLHGRHRLDLTNPNVDKIASNAWLRRGELFPETEGFMLAIQDQVIDTKNYRKYIIRKSSLNSDHCRHCHKHPETIQHITGACSFITQTDYKHRHDQVAAIIHQILAHKHNLIKEKIAYYKYKPPIVLDSPNYKLYWDRTILTDKTIHHNRPDITLHDKLNRIVYLIDIAIPNTHNLTSTHTNKLTKYTDLSIELKTQWKAETVKTVPIIISSTGVIPKTLHASLNTLHIHPLTYIVLQKAAILNTCRIVRKFLSLE

SEQ ID NO: 26360 - protein, 1347 aa, Hemaris fuciformis
MRLRSRIIPQAGTEANCDGESRPGPHSSGCPTYSGEGTVSHQTAQFQTAAVQHDQSESCSSPTSSLFSSIPSSPPSYIDKNLESLSSDTSSPSSLHSAQDVVQEAISAEVTAPAREGRRTRKTWTQDMNIFIMRHYFILTNLESNTKQYLTPLHTRFITQFPNMQVGKQRIGDQRRAIVQRKLLSESEINNIKDDVKCFLQNQPDGSSQAEHTQSGRMRWTDELNVAIMSSYYRLTKLESDLTSYRPLLHKDFITKYPSLSHLTAQRISDQRRSIVNNHLLSSEKLNNIRDEVRNELNSNTVCSTIEIPPLVNGNSLPLNSDPPPISNSYQNLSSRNITNEMQKLPTELQKQLEDMFSQTINRFRDTSPTSRPSLPKLKPCKKLANIVNHLNTAIIPKFLSTDTDFNTTQTVIYCGAYTAAKFNGRRILEGDKCRTVTQVKPRWQRRLENRISSLRVNIGRLTEYLRGIRTEKLENHIRKIMQQYKNHSKHESENTDITHYMDTLKQKLNTLASRLRRYKQTTLRKTQNKLFSNNEKLFYRKLTQHNPLIQTTRLPTTEALHEFWSNIWSRPVEHNKNQWIEEDKQRYQNISQMEFDQISIDLLTSVIHKTHNWKTAGSDHIHNFWYKKFTCTHPFILKHINEFITSPHTMPHYITQGITYMIPKDPTDTTNPAKFRPITCLQNIYKIITSCLTQSIYHHIQKYQILAEEQKGCRRNSKGCKEQLTIDAVASNQALIQKRNIHSMYIDYKKAFDSVPHSWLLYILKHYNIHPKITFFLENTIVNWSTKLKICNSVCNNETELIPIKRGIFQGDSLSPLWFCLALNPLSNMLNKQNIGYNITYHSQHITLSHLMYMDDIKLFGSSLSDIHTLADVTQIFSNDIHMEFGIDKCKIQSIDRGKFVPTSYELVNHEIIESIDLIEGYKYLGFHQTRQIHHKEMKATLQQNFKTRLHRILHTQLNAYNTTKAINTYAIPVLTYSFGIIRWTQTDLKVLQRTINTTMTKHRKHHPRACTERLTLPKHEGGRGLIDIINLHNKQIETLRTFFFSQSQQSTLHKAVCQADTYTPLNLADKTKQFTIKTNHQKIDSWTKKSLHGRHRLDLTSPNVDKIASNAWLRRGELFPETEGFMLAIQDQVIDTKNYRKYIIRKSSLNSDHCRHCHRHPETIQHITGACSFITQTDYKHRHDQVAGIIHQILAHKYNLIKEKIAYYKYKPPIVLDSPNYKLYWDRTILTDKTIHHNRPDITLHDKLNRIVYLIDIAIPNTHNLTSTHTNKLAKYTDLSIELKTQWKAETVKTVPIIISSTGVIPKTLHASLNTLHIHPLTYIVLQKAAILNTCRIVRKFLSLE

SEQ ID NO: 26361 - protein, 866 aa, Hemaris fuciformis
MQQYKNHSKHESENTDITHYMDTLKQKLNTLASRLRRYKQTTLRKTQNKLFCNNEKLFYRKLTQHNPQIQNTRLPTTEALHEFWSNIWSRPVEHNKNQWIEKDKQRYKNIPQMEFDHISIDHLTSVIHKTHNWKAAGSDHIHNFWYKKFTCTHPLLLKHINAFIISPDTMPHYITQGITYMIPKDPTDTTNPAKFRPITCLQNIYKIITSCLTQSIYHHIQKYKILAEEQKGCCRNSKGCKEQLTIDAVASSQALIQKRNIHSMYIDYKKAFDSVPHSWLLYILKHYNIHPKITFFLENTIVNWSTKLKICNSFCNTETELIPIKRGIFQGDSLSPLWFCLALNPLSNMLNEQSIGYNITYLSQHITLSHLMYMDDIKLFGSSLSDLHTLADVTQIFSNDIHMEFGIDKCKIQSIDRGKFVPTSYELVSHKIIEPIDLIEGYKYLGFHQSRQIHHKEMKATLQQNFKTRLHRILHTQLNAYNTTKAINTYAIPVLTYSFGIIRWTQTDLKVLQRTVNTTMTKHRKHHPRACTERLTLPKHEGGRGLIDIINLHNKQIESLRTFFYSQSQQSTLHKAICQADTYTPLNLADKNKQFTINTDHQKIDSWTKKSLHGRHRLDLTNPNVDKIASNAWLRRGELFPETEGFMLAIQDQVIDTKNYRKYIIRKSSLNSDHCRHCHKHPETIQHITGACSFITQTDYKHRHDQVAAIIHQILAHKHNLIKEKIAYYKYKPPIVLDSPNYKLYWDRTILTDKTIHHNRPDITLHDKLNRIVYLIDIAIPNTHNLTSTHTNKLTKYTDLSIELKTQWKAETVKTVPIIISSTGVIPKTLHASLNTLHIHPLTYIVLQKAAILNTCRIVRKFLSLE

SEQ ID NO: 26362 - protein, 1399 aa, Spodoptera frugiperda
MFSPVISSTYVILLDFDTFHVFCHDFYSCSFLIKKKTTSHIYAMRLRSRVIPQAGTVVNNDGESRPGPSSPGCPSYSGEGTVSHAAQPQAVAAQLDQVSTCSSPTSSLFSSIPSSPASYLNNHQSSSANSSPLSFHSARDVVQEAIPAEVTAPARGGRRTRKTWTKQMNIFIMRHYYILTDLELNTKTYLTPLHSRFIAEFPDMNASKQRIGDQRRAIVQRNFLSEQELLNIKEEVRLLLQHQPSAAQHNTDYTHSRRMRWTDQLNETIMRSYYRLTNLETDLTTYRPLLHQDIISKCPSIAHLSAQRISDQRRSIVNNQLLSTDRLNQIREEVRYELASINTDSSNYTISHETTHETVTQLTSIITNGNNIEVSTLTNANEQNTHQMTQNPPNLPAEIIKQLDEMFIDHYNKFKDSDPINRPYIPKLKSSRKLAAIISHLNTHLLPKTLTSDTNFYNLQTTIYCAAYTAAKFNGARIKENTGPTNQLEHVPWWQKRLERRISEHRANIGRLAEYAKGTRSQNLEHHICNIKRIYKVHTQHETENTDITHFQDTLKQKLNTLVNRLRRYRETTIRKKQNKQFCTNEKLFYRKLTQPNNSSQGSNIPLPSPESLQTFWSNIWSNPTVHQQNSWIEEDRERWTNTPEMKFDQIPLHLLQTVIARTHNWKAAGSDNIHNFWYKKLTCTHTLLLKHINAFIQSPDTMPQYITQGTTYMLPKDLSDTTNPAKYRPITCLQNVYKIITSCLSESIYKHIQEHNILSEEQKGCRKNSKGCKEQLTIDAVACKQALKQKRDIHTMYIDYKKAFDSVPHSWLIYILKHYKIHPAIIKFLENIMPFWKTKLKICNSNETTETDNISIKRGIFQGDALSPLWFCLALNPLSNILNKHNIGFKIKSNSEHTTLTHLMYMDDIKLFASSFDEIHTLADITQKFSSDICMEFGIDKCKIHSIVNGIVEPTSYELGNRELIEAVDPNEGYKYLGYYQSKEIHHKNTKTLLQQNFRNRLHKILHTHLNARNTVKAINTFAIPILTYSFGIIRWTQADLIMLQRIINTTMTKHRKHHPRACIQRLTLPKIEGGRGITDITNLHNNQITLLRTFFYNRSQHSPLHKTICQADTFTPLSLADHTKVVNTITKEQKIHTWTQKSLHGRHRLDLTNPIVDKIASNAWLKRGELFPETEGFMVAIQDQVIDTKNYRKYIIRDSTLGSDHCRHCHRQPETIQHITGACSSITQTDYKHRHDQVAAIIHQALAFKHKLIAEKTPYYKYTPQIILDSPDFKMYWDRTILTDKTIHHNRPDITLYDKKNKIVHLIDIAIPNTHNLSSTHTNKLSKYADLSIELKTQWQVHTVKTVPIIISSTGVIPKTLHTSLKTLDLHPLTFTLLQKAVILNTCRIVRKFLSID

SEQ ID NO: 26363 - protein, 1362 aa, Autographa pulchrina
MNRENKRYSLRPLPGGRRGTSGASAGCSSMRTIGGGGLNRRVLPKQLTTADNHSSPSFPPSSPSSLFPSIPSSPAAYANSLHQSSSHSPPSSPSTSIQLSEDVVQEAIAARDPAPASGLIGKRKMWSEEMNIFILRTYLIITSLETNTKHYLTPLYESFIEKYPEMQVSKQRVGDQRRAIVRNKLVSDEKAKQIRLEIQTHLKDNPQASFTPNSNSERLSWTNDINETIMRSYYKITNLETNVTGYRQQLHQQVIALCPSIAHVSVQRVSDQRRVIVNNKYISSDRLNTIREEVASELNMNPNLSNSPERINLTPPIVESHSQRSLTPTFTQQLEQLESLTQVVEADSERLIPSLEIQSQIDETFLDIFKKYEATDPTIRPTIPKQKTSKRFGCIVHYLNSCLIPKVISNETDFETVQLVIYSAAYTAAKHNGAKFYETSTARKPKDRIPKWQENMQKRIENLRAYIARLHEFMNGNQSQYLRKKIEEIKDRFKVHSQHETPNTDLTHFLDTLKQKLSVLVSRLRRYKQTTLRKTQNQLFINNEKVFYRNLAQNSINNLPSDRRFTQTPTKDSLEAFWSNIWSNTVVHKDNLWLEQDKERVKDLPEMEFQDISLDLLKCIINRTHNWKATGSDKIHNYWYKQFTNIHTLLLTHINQFIKSPETLPKYFTEGITYMLPKDQSDTGNPAKYRPITCLQSIYKIITSCICEVIYRHVDENNILAEEQKGCRRSSQGCKEQLTIDAIACKQAHSKSRNIYSMYIDYKKAFDSVPHSWLIHILKHYHIHPSLVFFLENTMTSWKTVLKLYNKEETIETEFINIKRGIFQGDALSPLWFCLALNPLSTLLNNTNKGFKIKYDNTNYNLSHLLYMDDIKLFGTTLGDIHTLADITQTFSSDICMEFGIDKCKIHSVRKGRVEPNSYQLHDDRQIEPVDEGEGYKYLGYAQSRQIHQSQTKLTLKEKFKTRLHKIFNTHLNARNTIKAVNSYAIPILTYSFGVIKWSKSQLQNMQRMVNTTMTKYRKHHPRACVQRQTLPRVEGGRGIIDIQNLHSKQIQTLRAFFHSKSNNSHLHLAIVRADNKYTPLQLANPFIQLEQINNPQKLDTWAQKSLHGRHRLDLTNPTVDKVASNMWLKRGELFPETEGFMIAIQDQTIDTKNYRKHIIRDPSAQNDFCRHCHRSPETIQHITGACTSIAQSDYKHRHDQIAAIVHQYLAYKYKLLPEKTAYYKYKPQTILESAEFKMYWDRTIMTDKTIHFNRPDITLLDKKNKTVFLIDIAVPNTHNLQTTYTEKIAKYTDLAIELKTQWRVDDVRTVPIVISSTGVIPKSLHTSLKTLQIHPLTYILIQKAAILNTCRLVRKFLSIHT

SEQ ID NO: 26364 - protein, 1362 aa, Autographa pulchrina
MNRENKRYSLRPLPGGRRGTSGASAGCSSMRTIGGGGLNRRVLPEQLTTADNHSSPSLPPSSPSSLFPSIPSSPAAYANSLHQSSSHSTPSSPSTSIQLSEVVVQEAIAARDPAPASGLIGKRKMWSEEMNIFILRTYLIITSLETNTKHYLTPLYESFIEKYPEMQVSKQRVGDQRRAIVRNKLVSDEKVKQIRLEIQTHLKDNPQASFTPNSNLERLSWTNDINETIMRSYYKITNLETNVTGYRQQLHQQVIALCPSIAHVSVQRISDQRRVIVNNKYISSDRLNTIREEVASELNINPNLPNSPELINLTPPIVESHSQRSLTPTFTQQLEQLESLTQVVEADSERLIPSLEIQSQIDETFLDIFKKYEATDPTKRPAIPKQKTSKRFGCIVHYLNSCLIPKVISNETDFETVQLVIYSAAYTAAKHNGAKFYETSTARKPKDRIPKWQENMQKRIENLRAYIARLHEFMNGNQSQYLRKKIEEIKDRFKVHSQHETPNTDLTHFLDTLKQKLTVLVSRLRRYKQTTLRKTQNQLFINNEKVFYRNLAQNSINNLPSDRRSTQTPTKDSLEAFWSNIWSNPVVHKDNLWLEQDKERVKDLPEMEFREISLDLLKCIINRTHNWKATGSDKLHNYWYKQFTNIHTLLLTHINQFIKSPETLPKYITEGITYMLPKDQSDTGNPAKYRPITCLQSIYKIITSCICEVIYRHVDENNILAEEQKGCRRSSQGCKEQLTIDAIACKQAHAKSRNIYSMYIDYKKAFDSVPHSWLIHILKHYHIHPSLVFFLENTMASWKTVLKLYNEEETIETEFLNIKRGIFQGDALSPLWFCLALNPLSTLLNNTNKGFKIKYDNTNYNLSHLLYMDDIKLFGTTLGDIHTLADITQTFSSDICMEFGIDKCKIHSVRKGRIEPNSYQLHDDRQIVPVDEGEGYKYLGYAQSRQIHQSQTKLTLKEKFKTRLHKIFNTHLNARNTVKAVNSYAIPILTYSFGVIKWSKSQLQNMQRMVNTTMTKYRKHHPRACVQRQTLPRVEGGRGIIDIQNLHSKQIQTLRAFFHSKSNNSHLHLAIVRADKKYTPLHLANPSIQLEQITHPQKLDTWAQKSLHGRHRLDLTNPTVDKVASNMWLKRGELFPETEGFMIAIQDQTIDTKNYRKHIIRDPSAQNDFCRHCHRSPETIQHITGACTSIAQSDYKHRHDQIAAIVHQYLAYKYKLLPEKTAYYKYKPETILESAEFKMYWDRTIMTDKTVHFNRPDITLLDKKNKTVFLIDIAVPNTHNLQTTYTEKIAKYTDLAIELKTQWRVDDVRTVPIVISSTGVIPKSLHTSLKTLQIHPLTYILIQKAAILNTCRLVRKFLSIHT

SEQ ID NO: 26365 - protein, 907 aa, Autographa pulchrina
MQKRIENLRAYIARLHEFMNGNQSQYLQKKIEEIKDRFKVHSQHETPNTDLTHFLDTLKQKLSVLVSRLRRYKQTTLRKTQNQLFINNEKVFYRNLAQNSINNLPSDRRSTQTPTKDSLEAFWSNIWSNTVVHKDNLWLEQDKERVKDLPEMEFQEISLDLLKCIINRTHNWKATGSDKIHNYWYKQFTNIHTLLLTHINQFIKSPETLPKYFTEGITYMLPKDQSDTGNAAKYRPITCLQSIYKIITSCICEVIYRHVDENNVLAEEQKGCRRSSQGCKEQLTIDAIACKQAHSKSRNIYSMYIDYKKAFDSVPHSWLIHILKHYHIHPSLVFFLENTMTSWKTVLKLYNKEETIETEFIDIKRGIFQGDALSPLWFCLALNPLSTLLNNTNKGFKIKYDNTNYNLSHLLYMDDIKLFGTTLSDIHTLADITQTFSSDICMEFGIDKCKIHSVRKGRVEPNSYQLHDDRQIEPVDEGEGYKYLGYAQSRQIHQSQTKLTLKEKFKTRLHKIFNTHLNARNTIKAVNSYAIPILTYSFGVIKWSKSQLQNMQRMVNTTMTKYRKHHPRACVQRQTLPRVEGGRGIIDIQNLHSKQIQTLRAFFHSKSNNSHLHLAIVRADNKYTPLHLANPSIQLEQITNPQKLDTWAQKSLHGRHRLDLTNPTVDKVASNMWLKRGELFPETEGFMIAIQDQTIDTKNYRKYIIRDPSAQNDFCRHCHRSPETIQHITGACASIAQSDYKHRHDQIAAIVHQYLAYKYKLLPEKTAYYKYKPQTILESAEFKMYWDRTIMTDKTIHFNRPDITLLDKKNKTVFLIDIAVPNTHNLQTTYTEKIAKYTDLAIELKTQWRVDDVRTVPIVISSTGVIPKSLHTSLKTLQIHPLTYILIQKAAILNTCRLVRKFLSIHT

SEQ ID NO: 26366 - protein, 1362 aa, Autographa pulchrina
MNRENKRYSLRPLPGGRRGTSGASAGCSSMRTIGGGGLNRRVLPEQLTTADNHSSPSLPPSSPSSLFPSIPSSPAAYANSLHQSSSHGTPSSPSTSIQLSEVVVQEAIAARDPAPASGLIGKRKMWSEEMNIFILRTYLIITSLETNTKHYLTPLYESFIEKYPEMQVSKQRVGDQRRAIVRNKLVSDEKVKQIRLEIQTHLKDNPQASFTPNSNLERLSWTNDINETIMRSYYKITNLETNVTGYRQQLHQQVIALCPSIAHVSVQRISDQRRVIVNNKYISSDRLNTIREEVASELNMNPNLPNSPELINLTPPIVESHSQRSLTPTFTQQLEQLESLTQVVEADSERLIPSLEIQSQIDETFLDIFKKYEATDPTKRPAIPKQKTSKRFGCIVHYLNSCLIPKVISNETDFETVQLVIYSAAYTAAKHNGAKFYETSTARKPKDRIPKWQENMQKRIENLRAYIARLHEFMNGNQSQYLRKKIEEIKDRFKVHSQHETPNTDLTHFLDTLKQKLSVLVSRLRRYKQTTLRKTQNQLFINNEKVFYRNLAQNSINNLPSDRRSTQTPTKDSLEAFWSNIWSNPVVHKDNLWLEQDKERVKDLPEMEFREISLDLLKCIINRTHNWKATGSDKLHNYWYKQFTNIHTLLLTHINQFIKSPETLPKYITEGITYMLPKDQSATGNPAKYRPITCLQSIYKIITSCICEVIYRHVDENNILAEEQKGCRRSSQGCKEQLTIDAIACKQAHAKSRNIYSMYIDYKKAFDSVPHSWLIHILKHYHIHPLLVFFLENTMASWKTVLKLYNEEETIETEFLNIKRGIFQGDALSPLWFCLALNPLSTLLNNTNKGFKIKYDNTNYNLSHLLYMDDIKLFGTTLGDIHTLADITQTFSSDICMEFGIDKCKIHSVRKGRIEPNSYQLHDDRQIEPVDEGEGYKYLGYAQSRQIHQSQTKLTLKEKFKTRLHKIFNTHLNGRNTVKAVNSYAIPILTYSFGVIKWSKSQLQNMQRMVNTTMTKYRKHHPRACVQRQTLPRVEGGRGIIDIQNLHSKQIQTLRAFFHSKSNNSHLHLAIVRADKKYTPLHLANPSIQLEQITNPQKLDTWAQKSLHGRHRLDLTNPTVDKVASNMWLKRGELFPETEGFMIAIQDQTIDTKNYRKHIIRDPSAQNDFCRHCHRSPETIQHITGACTSIAQSDYKHRHDQIAAIVHQYLAYKYKLLPEKTAYYKYKPETILESAEFKMYWDRTIMTDKTVHFNRPDITLLDKKNKTVFLIDIAVPNTHNLQTTYTEKIAKYTDLAIELKTQWRVDDVRTVPIVISSTGVIPKSLHTSLKTLQIHPLTYILIQKAAILNTCRLVRKFLSIHT

SEQ ID NO: 26367 - protein, 1362 aa, Autographa pulchrina
MNRENKRYSLRPLPGGRRGTSGASAGCSSMRTIGGGGLNRRVLPEQLTTADNHSSPSLPPSSPSSLFPSIPSSPAAYANSLHQSSSHSTPLSPSTSIQLSEVVVQEAIAARDPAPASGLIGKRKMWSEEMNIFILRTYFIITSLENNTKHYLTPLYESFTEKYPEMQVSKQRVGDQRRAIVRNKLLSDEKVKQIRLEIQTHLKDNPQASFTPNSNSERLSWTNDINETIMRSYYKITNLETNVTGYRQQLHQQVIALYPSIAHVSVQRISDQRRVIVNNKYISSDRLNTIREEVASELNMNPNLPNIPELINLTPPIVESHSQRSLTPTFTQQLEQMESLTQVVEADSERLIPSLEIQSQIDETFLDIFKKYEATDPTKRPAIPKQKTSKRFGCIVHYLNSCLIPKVISNETDFETVQLTIYSAAYTAAKHNGAKFYETSTARKPKDRIPKWQENMQKRIENLRAYIARLHEFMNGNQSQYLRKKIEEIKDRFKVHSQHETPNTDLTHFLDTLKQKLSVLVSRLRRYKQTTLRKTQNQLFINNEKVFYRNLAQNSINNLPSDRRSTQTPTKDSLEAFWSNIWSNPVVHKDNLWLEQDKERVKDLPEMEFREISLDLLKCIINRTHNWKATGSDKLHNYWYKQFTNIHTLLLTHINQFIKSPETLPKYITEGITYMLPKDQSDTGNPAKYRPITCLQSIYKIITSCICEVIYRHVDENNILAEEQKGCRRSSQGCKEQLTIDAIACKQAHAKSRNIYSMYIDYKKAFDSVPHSWLIYILKHYHIHPSLVSFLENTMSSWKTILKLYSKEETIITEFLNIRRGIFQGDALSPLWFCLALNPLSAMLNNTNKGFKIKYDNTNYNLSHLLYMDDIKLFGTTLIDIHSLADITQTFSSDICMEFGIDKCKIQSVRKGRIEPNSYQLHDERTIESVDESEGYKYLGYAQSRQIHQSQTKLTLKEKFKTRLHKILNTHLNARNTVKAINSYAIPILTYSFGVIKWSKSQLQNMQRMVNTTMTKYRKHHPRACVQRQTLPRVEGGRGIIDIQNLHSKQIQTLRAFFHSKSNHSHLHLAIVRADNKYTPLHLANLSVQLEQITHPQKLDTWAQKSLHGRHRLDLTNPIVDKVASNMWLKRGELFPETEGFMIAIQDQTIDTKNYRKHIIRDPSAQNDFCRHCHRSPETIQHITGACTSIAQSDYKHRHDQIAAIVHQYLAYKYKLIPEKTAYYKYIPQTILESAEFKMYWDRTIMTDKTVHFNRPDITLLDKINKTVFLIDIAVPNTHNLQTTFTEKIAKYTDLSIELKTQWRVDDVRTVPIVISSTGVIPKSLHNSLKTLQIHPLTYILIQKAAILNTCRIVRKFLSIHT

SEQ ID NO: 26368 - protein, 1133 aa, Autographa gamma
MRSYYKITNLETNVTGYRQQLHQQVIALCPSIAHVSVQRISDQRRVIVNNKYISSDRLNTIREEVASELNMNPNLPNSPELINLTPPIVKSHSQRSVTPTLTQQLEQLESLTPVVEADSEILIPSLEIQSQIDETFFDIFKKYEATDPTKRPTIPKQKTSRRFGCIVHYLNSCLIPKVISNETDFETVQLVIYSAAYTAAKHNGAKFYETSTARNPSDRIPKWQENLQKRIGNLRAYIARLHEFMNGNRSQYLRKKIEEIKDRFKVHSQHETPNTDLTHFLDTLKQKLSVLVSRLRRYKQTTLRKTQNQLFNNNEKVFYRNLAQNSINNLPSDRRATRIPTKDSLEAFWSNIWSNPVVHKDNLWLEQDKERVKDLPEMEFQEISLDLLKCIINRTHNWKATGSDKLHNYWYKQFTNIHTLLLTHINQFIKSPETLPKYITEGITYMLPKDQSDTGNAAKYRPITCLQSIYKIVTSCICEVIYRHVDENNILAEEQKGCRRSSQGCKEQLTIDAIACKQAHAKSRNIYSMYIDYKKAFDSVPHSWLIYILKHYHIHPSLVSFLENTMSSWKTILKLYSKEETIETEFLNIRRGIFQGDALSPLWFCLALNPLSTLLNNTNKGFKIKYDDTNFNLSHLLYMDDIKLFGTTLGDIHTLADVTQTFSSDICMEFGIDKCKIHSVRKGRVEPNSYQLHDDRQIEPVDEGEGYKYLGYAQSRQIHQSQTKLTLKEKFKTRLHKIFNTHLNARNTIKAVNSYAIPILTYSFGVIKWSKSQLQNMQRMVNTTMTKYRKHHPRACVQRQTLPRVEGGRGIIDIQNLHSKQIQTLRAFFHSKSNNSHLHLAVVRADNKYTPLHLAHPSIQLEQSTNPQKLDTWAQKSLHGRHRLDLTNSTVDKVASNMWLKRGELFPETEGFMIAIQDQTIDTKNYRKHIIRDPSAQNDFCRHCHRSPETIQHITGACTSIAQSDYKHRHDQIAAIVHQYLAYKYKLLPEKTAYYKYKPETILESAEFKMYWDRTIMTDKTVHFNRPDITLLDKNNKTVFLIDIAVPNTHNLQTTYTEKIAKYTDLAIELKTQWRVDDVRTVPIVISSTGVIPKSLHTSLKTLQIHPLTYILIQKAAILNTCRLVRKFLSIHT

SEQ ID NO: 26369 - protein, 1362 aa, Autographa gamma
MNRENKRYSLRPLPGGRRGTSGASAGCSSMRTIGGGGLNRRVLPEQLTTADNHSSPSLPPSSPSSLFPSIPSSPAAYANSLHQSSSHSTPSSPSTSIQLSEDVVQEAIAARDPAPASGLIGKRKMWSEEMNIFILRTYLIVTSLETNTKHYLTPLYESFIEKYPEMQVSKQRVGDQRRAIVRNKLLSDEKVKQIRLEIQTHLKDNPQASFTPNSNSERLSWTNDINETIMRSYYKITNLETNVTGYRQQLHQQVIALCPSIAHVSVQRISDQRRVIVNNKYISSDRLNTIREEVASELNMNPNLPNSPELINLTPPIVESHSQRSVTPTLTQQLEQLESLTPVVEADSEILIPSLEIQSQIDETFFDIFKKYEATDPTKRPTIPKQKTSRRFGCIVHYLNSCLIPKVISNENDFETVQLVIYSAAYTAAKHNGAKFYETSTARNPSDRIPKWQENLQKRIGNLRAYIARLHEFMNGNRSQYLRKKIEEIKDRFKVHSQHETPNTDLTHFLDTLKQKLSVLVSRLRRYKQTTLRKTQNQLFNNNEKVFYRNLAQNSINNLPSDRRATRIPTKDSLEAFWSNIWSNPVVHKDNLWLEQDKERVKDLPEMEFQEISLDLLKCIINRTHNWKATGSDKLHNYWYKQFTNIHTLLLTHINQFIKSPETLPKYITEGITYMLPKDQSDTGNPAKYRPITCLQSIYKIVTSCICEVIYRHVDENNILAEEQKGCRRSSQGCKEQLTIDAIACKQAHAKSRNIYSMYIDYKKAFDSVPHSWLIYILKHYHIHPSLVSFLENTMSSWKTILKLYSKEEIIETEFLNIRRGIFQGDALSPLWFCLALNPLSTLLNNTNKGFKIKYDDTNFNLSHLLYMDDIKLFGTTLGDIHTLADVTQTFSSDICMEFGIDKCKIHSVRKGRVEPNSYQLHDDRQIEPVDEGEGYKYLGYAQSRQIHQSQTKLTLKEKFKTRLHKIFNTHLNARNTIKAVNSYAIPILTYSFGVIKWSKSQLQNMQRMVNTTMTKYRKHHPRACVQRQTLPRVEGGRGIIDIQNLHSKQIQTLRAFFHSKSNNSHLHLAVVRADNKYTPLHLAHPSIQLEQSTNPQKLDTWAQKSLHGRHRLDLTNSTVDKVASNMWLKRGELFPETEGFMIAIQDQTIDTKNYRKHIIRDPSAQNDFCRHCHRSPETIQHITGACTSIAQSDYKHRHDQIAAIVHQYLAYKYKLLPEKTAYYKYKPETILESAEFKMYWDRTIMTDKTVHFNRPDITLLDKNNKTVFLIDIAVPNTHNLQTTYTEKIAKYTDLAIELKTQWRVDDVRTVPIVISSTGVIPKSLHTSLKTLQIHPLTYILIQKAAILNTCRLVRKFLSIHT

SEQ ID NO: 26370 - protein, 1362 aa, Autographa gamma
MNRENKRYSLRPLPGGRRGTSGASAGCSSMRTIGGGGLNRRVLPEQSTTADDHSSPSLPPSSPSSLFPSIPSSPAAYANSLHQFSSHSTPSSPSTSIQLSEDVVQEAIAARDPAPASGLIGKRKMWSEEMNIFILRTYLIITSLETNTKHYLTPLYESFIEKYPEMQVSKQRVGDQRRAIVRNKLLSDEKVKQIRLEIQTHLKDNPQASFTPNSNSERLSWTNDINETIMRSYYKITNLETNVTGYRQQLHQQVIALCPSIAHVSVQRISDQRRVIVNNKYISSDRLNTIREEVASELNMNPNLPNSPELINLTPPIVESHSQRSVTPTLTQQLEQLESLTPVVEADSEILIPSLEIQSQIDETFFDIFKKYEATDPTKRPTIPKQKTSRRFGCIVHYLNSCLIPKVISNETDFETVQLVIYSAAYTAAKHNGAKFYESSTARNPSDRIPKWQENLQKRIGNLRAYIARLHEFMNGNRSQYLRKKIEEIKDRFKVHSQHETPNTDLTHFLDTLKQKLSVLVSRLRRYKQTTLRKTQNQLFNNNEKVFYRNLAQNSINNLPSDRRATRIPTKDSLEAFWSNIWSNPVVHKDNLWLEQDKERVKDLPEMEFQEISLDLLKCIINRTHNWKATGSDKLHNYWYKQFTNIHTLLLTHINQFIKSPETLPKYITEGITYMLPKDQSDTGNAAKYRPITCLQSIYKIVTSCICEVIYRHVDENNILAEEQKGCRRSSQGCKEQLTIDAIACKQAHAKSRNIYSMYIDYKKAFDSVPHSWLIYILKHYHIHPSLVSFLENTMSSWKTILKLYTKEETIETEFLNIRRGIFQGDALSPLWFCLALNPLSTLLNNTNKGFKIKYDDTNFNLSHLLYMDDIKLFGTTLGDIHTLADVTQTFSSDICMEFGIDKCKIHSVRKGRVEPNSYQLHDDRQIEPVDEGEGYKYLGYAQSRQIHQSRTKLTLKEKFKTRLHKIFNTHLNARNTIKAVNSYAIPILTYSFGVIKWSKSQLQNMQRMVNTTMTKYRKHHPRACVQRQTLPRVEGGRGIIDIQNLHSKQIQTLRAFFHSKSNNSHLHLAVVRADNKYTPLHLAHPSIQLEQSTNPQKLDTWAQKSLHGRHRLDLTNSTVDKVASNMWLKRGELFPETEGFMIAIQDQTIDTKNYRKHIIRDPSAQNDFCRHCHRSPETIQHITGACTSIAQSDYKHRHDQIAAIVHQYLAYKYKLLPEKTAYYKYKPETILESAEFKMYWDRTIMTDKTVHFNRPDITLLDKNNKTVFLIDIAVPNTHNLQTTYTEKIAKYTDLAIELKTQWRVDDVRTVPIVISSTGVIPKSLHTSLKTLQIHPLTYILIQKAAILNTCRLVRKFLSIHT

SEQ ID NO: 26371 - protein, 1412 aa, Spodoptera exigua
MHYFPYLISSTHPYSFLDLFYLPCFCNSIDTYLLLLLSCLILAIPHYIKKKLHIYAMRLRSRVIPQAGTGVNNDGESRPGPSSPGCPSYSGEGTVSQAAQSQAVAARHAHSSTCSSPTSSLFSSIPSSPASYINNQQSSSTNSSPLSFQSTRDVVQEAISAEITVPTQGVRRTRKTWTKPMNIFIMRHYFILTNLEQDTKTYLTPLHARFTAEFPNMNASKQRIGDQRRAIVQRNFLTNEEILKIKEEVRHLLQHQSPTPHNTETNHSSSRRMRWTDHLNETIMKSYYRLTKLETDFTTYRSLLHQDIISKCPSIAHLSAQRLADQRRSIVNNQLLSTDRLNEIREEVRNELSSINTYSSDNTTAQQAIHETLTQPTLLVTNTADIQLTTAPNTIDQNTQQLAQNSLTLSAEITKQLEEMYSETYHKLKSSDPTTRPYIPKLRPSRKLAAITSCLNTHILPKTLTPDTDFNTLQTSIYCAAYTAAKFNGARIKESVESNNQSEQIPWWQKRLERRISKLRANIGRLTEYAKGVRSQALETHICNIKRLYKTHTQHEAENTDITHFLDTLKQKLNTLANRLRRYKETTTRKIQNKQFNNNEKLFYRQLTQQNNKLQHDTPLPSPESLHTFWSNIWSNPIQHQQSIWIEQDKNRWTETPDMKFDQINLHLLQTVITRTHNWKAAGSDNIHNFWYKKLTCTHILLLKHINAFIQSPDTMPPYITQGITYMLPKDPQDTANPAKYRPITCLQNVYKIITSCLSETIYKHTHENNILAEEQKGCRKNSKGCKEQLTIDAVTSKHALKQKREIHTMYIDYKKAFDSVPHSWLIYILKHYKIHPVIINFLENIMPHWNTKLKICTSNKTTETDLISIKRGIFQGDALSPLWFCLALNPLSYMLNQTNEGFNIKQNSEHTSLTHLMYMDDIKLFSSTLNGLHTLADTTQTFSNDICMEFGIDKCKIQSIINGAVVPTTYELRNRETIEATDPNEGYKYLGYYQSKEIHHKDTKKLLQDNFRNRLHKILHTHLNAKNTIKAINTFAIPILTYSFGIIRWTQTDLIKLQRIINTTMTKHRKNHPRACVQRLTLPKIEGGRGLIDITNLHNNQITLLRSFFFNRSQHSPLHKAICLTDSFTPLSLADHAKQMTTISKEQKIQTWTQKSLHGRHRLDLTNPIVDKVASNAWLKRGELFPETEGFMLAIQDQVIDTKNYRKYIIRDSTLGSDHCRHCHRQPETIQHITGACSSITQTDYKHRHDQVAAIIHQALAYKHKLIPEKTPYYKYKPQVILSSPEFKMYWDRTILTDKTIHHNRPDITLLDKKNKIVYLIDIAIPNTHNLSSTHTNKLTKYSDLTIELKTQWQVHTVKTVPIILSSTGIIPKTLHTSLKTLDLHPLTFLLLQKAVILNTCRIVRKFLSID

SEQ ID NO: 26372 - protein, 1356 aa, Spodoptera exigua
MRLRSRVIPQAGTGVNNNGESRPGPSSPGCPSYSGEGTVSHAAQSQAVAARHAQSSTCSSPTSSLFSSIPSSPASYINNRLPSSTNSSPSSFRSTREVVQEAISAEITAPAQGVRRTRKTWTKPMNIFIMRHYFILTNLEQNTKTYLTPLHARFTAEFPDMNASKQRIGDQRRAIVQRNFLTNEEILKIKEEVRLLLQNQSPISHYTETNHSSSRRMRWTDQLNETIMKSYYRLTNLETDFTTYRSLLHQDIISKCPSIAHLSAQRIADQRRSIVNNQLLSTDRLNEIREEVRNELSCMNNYTSDNTTPQPTIHETLTQTTPLATNTANIQLTTATNTNDQNTQQLTQNSLILSAEITKQLEEMYSETYHKLKSSDPTTRPYIPKLKPSRKLAAITSCLNTQILPKTLTPNTDFNTLQTSIYCAAYTAAKFNGARIKENVESNNQSEQVPWWQKRLERRISKLRANIGRLTEYAKGVRSQALEIHICHIKRTYKIHTQHEAENTDITHFLDTLKQKLNSLANRLRRYKETTTRKIQNKQFNNNEKLFYRQLTQQNNKLQHDTPLPSPESLHTFWSNIWSNPMQHQQSIWIDQDKNRWRETPNMQFDQISLHLLQTVITRTHNWKAAGSDNIHNFWYKKFTCTHILLLKHINAFIQSPDTMPPYITQGTTYMLPKDPLDTANPAKYRPITCLQNVYKIITSCLSEIIYKHTHEHNILAEEQKGCRKSSKGCKEQLTIDAVASKQALKQKREIHTMYIDYKKAFDSVPHSWLIYILKHYKIHPVIINFLENIMPHWNTRLKICTSSKTTETDLIPIKRGIFQGDALSPLWFCLALNPLSYMLNKTNEGFNIKHNSEHTSLTHLMYMDDIKLFASTLNGLHTLADTTQTFSNDISMEFGIDKCKIQSIINGAVVPTTYELRNSETVEAIDPNEGYKYLGYYQSKEIHHKDTKKLLQENFRNRLHKILHTHLNAKNTIKAINTFAVPILTYSFGIIRWTQTDLIKLQRIINTTMTKHRKNHPRACIQRLTLPKLEGGRGLIDITNLHNNQITLLRSFFFNRSQHSPLHKAICLTDSFTPLSLADHAKQTTTISKEQKIQTWTQKSLHGRHRLDLTNPIVDKIASNAWLKRGELFPETEGFMLAIQDQVIDTKNYRKYIIRDSTLGSDHCRHCHRQPETIQHITGACSSITQTDYKHRHDQVAAIIHQALAYKYKLITEKTPYYKYKPQVILSSPEFKMYWDRTILTDKTIHHNRPDITLIDKKNKIVYLIDIAIPNTHNLSSTHTNKLSKYADLTIELKTQWQVHTVKTVPIILSSTGIIPKTLHTSLKTLDLHPLTFTLLQKAVILNTCRIVRKFLSID

SEQ ID NO: 26373 - protein, 1232 aa, Spodoptera exigua
MNIFIMRHYFILTNLEQNTKTYLTPLHARFTAEFPDMNASKQRIGDQRRAIVQRNFLTNEEILKIKEEVRLLLQNQSPISHYTETNHSSSRRMRWTDQLNETIMKSYYRLTNLETDFTTYRSLLHQDIISKCPSIAHLSAQRIADQRRSIVNNQLLSTDRLNEIREEVRNELSCMNNYTSDNTTPQPTIHETLTQTTPLATNTANIQLTTATNTNDQNTQQLTQNSLILSAEITKQLEEMYSETYHKLKSSDPTTRPYIPKLKPSRKLAAITSCLNTQILPKTLTPNTDFNTLQTSIYCAAYTAAKFNGARIKENVESNNQSEQVPWWQKRLERRISKLRANIGRLTEYAKGVRSQALEIHICNIKRTYKIHTQHEAENTDITHFLDTLKQKLNSLANRLRRYKETTTRKIQNKQFNNNEKLFYRQLTQQNNKLQHDTPLPSPESLHTFWSNIWSNPMQHQQSIWIDQDKNRWAETPNMQFDQISLHLLQTVITRTHNWKAAGSDNIHNFWYKKFTCTHILLLKHINAFIQSPDTMPPYITQGTTYMLPKDPLDTANPAKYRPITCLQNVYKIITSCLSEIIYKHTHEHNILAEEQKGCRKSSKGCKEQLTIDAVASKHALKQKREIHTMYIDYKKAFDSVPHSWLIYILKHYKIHPVIINFLENIMPHWNTRLKICTSSKTTETDLIPIKRGIFQGDALSPLWFCLALNPLSYMLNKTNEGFNIKHNSEHTSLTHLMYMDDIILFASTLNGIHTLADTTQTFSNDICMEFGIDKCKIQSIINGAVVPTTYELRNSETVEAIDPNEGYKYLGYYQSKEIHHKDTKKLLQENFRNRLHKILHTHLNAKNTIKAINTFAIPILTYSFGIIRWTQTDLIKLQRIINTTMTKHRKNHPRACIQRLTLPKLEGGRGIIDITNLHNNQVTLLRSFFFNRSQHSPLHKAICLTDSFTPLSLADHAKQTTTISKEQKIQTWTQKSLHGRHRLDLTNPIVDKIASNAWLKRGELFPETEGFMLAIQDQVIDTKNYRKYIIRDSTLGSDHCRHCHRQPETIQHITGACSSITQTDYKHRHDQVAAIIHQALAYKYKLITEKTPYYKYKPQVILSSPEFKMYWDRTILTDKTIHHNRPDITLFDKKNKIVYLIDIAIPNTHNLSSTHTNKLSKYADLTIELKTQWQVHTVKTVPIILSSTGIIPKTLHTSLKTLDLHPLTFTLLQKAVILNTCRIVRKFLSID

SEQ ID NO: 26374 - protein, 1380 aa, Entheus sp.
MKMHNNKRYNLRPLPGGRRGASGAGAGCHSMRTIGDEELIRRTPIEEYATAETNSSISSLISHPSSSSSPSSSRASKSSSSLSSRSSSPSFIHNPTTTDVVLEAALAIPLAPAVDVTRKRMKWTKEMNTFIMRTYFTIIITEPQNTNKYLPQLHQKFIEVYPEMQASKQRIGDQRRAILRRKLLSDKEIEDIRSEIESKVQNIKQPQPRRHSLTLTQPTNLTTQSSHVFPVDRRKTKYTDTAINTNKRMRWTTDINEIIIKSFYKVTNLGSNPTGYRQTLHQEVLKECPQLSHVSVQRIADQRRSIINNKLLPEDRIKQLLKDVATEIGTTVNSTSEGTQHINNSFTDDSVLTQDIAPNELIRNRTQNITESNDTFKAEYIKQIDDTFINATELFNDTDPILRPILPKQKSSKKLANIVNILNVKILPKFLNSDSNFVTTQTAIYCAAYTAIKHNGGVIRYNVTNKNTTESTPAWQKRLRDKIQNLRRKIGKLTEYMRGNRGQAVVQEVENIMYQYQVHTQYEPNNSHLSEFLDTLKQKLNSLANRLRRYTETTIRKKQNKQFANNEKLFYRSLSQQHTCSESYNKTPPPEILHTYWSKIWSVPVTHQHGDWINKDESNLENVPDMAFTTITLDRLQSTIAKSHNWKATGSDKIHNYWYKKFTNTHTLILKHINTFLTSPKTMPDYLTAGITYMLPKDQNDTQNPAKYRPITCLQNIYKIITSCISQTIYSHTQTHNIISEVQKGCCKRSQGCKEQLIIDTVASKQAFRKHRNIYTMYIDYKKAFDSVPHSWLIYILKHYKIHPTIINFLETIMKTWKTTLQINNNTSSIQTDTISIKRGIFQGDSLSPLWFCLALNPLSNLLNNTNKGFQIKYNNTHYTLSHLLYMDDIKLFASTLEELFSLADITQTFSTDILMEFGIDKCKIQSVNKGTIELNTYVLRDDQQIDPVDQNDGYKYLGYQQSQQIHQNQTKTTLKQKFKSRIHKIFHTHLNARNTIKAINSYAIPILTYSFGIIRWSQSDLKNLQRIINTSMTKHRKHHPRACIQRMTLPKNDGGRGLIDIQNLHNKQVISLRKYFHHLSNLSPLHKTIVNADHNLTPLNLNNYDIQLAQITNEEKLKSWKQKSLHGRHYLDLMDPNVDRSASNAWLKRGELFPETEGFMIAIQDQVIDTKNYRKHIIRDNNLQNDMCRHCHKHPETIQHITGACLSIAQTDYKHRHDQVAAIVHQYLAYKYKLIPDKIAYYKYKPQAVLDSDDFKLYWDRTIITDKTVHHNRPDLTLHDKRNKTVYLIDIAIPNTHNLITTYTNKITKYTDLTTEIRTQWKVNSVITVPITLSSTGVIPNTLHNSLEKLNIHPLTFLLLQKAVLLNTCRIVRKFLSLK

SEQ ID NO: 26375 - protein, 1352 aa, Colias croceus
MRLRSRILPQAGTKVKNDGESRPGPTSPGCPSYSGGGNVSLIAQSHTVATQSIHDESSSCYSPPSSVISSVNSSPQSISSTQQFRSPHLSSTSSSQSIGDVAQEAISAKVTAPALDGRRTRKTWSREMNIFIMRHYFILTDLEINTKSYLTPLHARFILEFPDMAEVGKQRIGDQRRAIVQRGFLKNQEIHNIKEEVRALLQNTTASEQNNITDYTQSRRIRWTDKLNEEIMRSYYRLTKLETDLTTYRPLLHQDVISKCPSIAHLSVQRIADQRRSIVHNKLLSTDKLNTIREEIKNELSTTILQLSDENTTIDATQASYNYQTPQVTQTFTSEQIPSTTQTTQDSLKLPSELTKQLEELFTDIYTRFKDSDPTKRPYIPKLKPSKKLSSTVNYINNEILPKLLKSDVDFNTIQTLIYSAAFTSAKFIGARIIEDEVTCSKQQRIPWWQRRLEGRIKDLRANIGRLNEYVKGVRSPNLDKHITRIKQTYKIHSQHESENTDITHFLDTLKQKLITLANRLRRYKETTIRKTQNKQFCNNEKLFYRKLSQPNNSHDSNCIPPTSESLQTYWSNIWSQPIEHRHNQWIDEDKEILNHVPDMEFEQIQIDLLKSVIERSHNWKATGTDNIHNFWYKKLTRTHELLLKHINTFIQSPNLLPYYITQGLTYMLPKDLSDSENPSKYRPITCLQNIYKIITACLSESIYKHIHEHNIMAEEQKGCRKNSQGCKEQLTIDSVASIQALRQKRSIYTMYIDYKKAFDSVPHSWLIYILKHYKINHTIIHFLENIMRNWNTKLKVHNSQKTTETDVISIKRGIFQGDSLSPLWFCLALNPLSHMLNRQRIGFEIKHNTQHTTLSHLMYMDDIKLFAGTSDDIHTLATITQNFSNDICMEFGINKCKIQSINKGVVEQAPYELPSHEIIDTVDPVEGYKYLGYTQSQEIHHKEIKKLLQQSFKNRLHKILHTQLNARNTIKAINTFAIPILTYSFGIIRWNQTELATLQRIINTTMTKHRKHHPRSCIQRLTLPKCEGGRGLIDIKNLHNKQLILLRTFFHKRSNQSPLHNAICQADSFTPLTLADHTKQINITSKQQKIDVWTTKSLHGRHRLDLTNPVVDKIASNAWLKRGELFPETEGFMLAIQDQVIDTKNYRKYIIRDSTSSDHCRHCHKQPETIQHITGACSSITQTDYKHRHDQVAAIVHQTLAYKHKLITEKTPYYKYTPQITLDSPDFKMYWDRTILTDKTVHHNRPDITLHDKKNKTIYLIDIAIPNTHNLSSTHTNKLSKYTDLSIELKTQWQVHTVKTIPIIISSTGVIPKTLHTSLKTLNLHPLTYALLQKAVILNTCRIVRKFLSID

SEQ ID NO: 26376 - protein, 1352 aa, Colias croceus
MRLRSRILPQAGTKVKNDGESRPGPTSPGCPSYSGGGNVSLIAQSHTVATQSIHDESSSCYSPPSSVISSVNSSPQSISSTQQFRSPHLSSTSSSQSIGDVAQEAISAKVTAPALDGRRTRKTWSREMNIFIMRHYFILTDLEINTKSYLTPLHARFILEFPDMAEVGKQRIGDQRRAIVQRGFLKNQEIHNIKEEVRALLQNTTASEQNNITDYTQSRRIRWTDKLNEEIMRSYYRLTKLETDLTTYRPLLHQDVISKCPSIAHLSVQRIADQRRSIVHNKLLSTDKLNTIREEIKNELSTTILQLSDENTTIDATQASYNYQTPQVTQTFTSEQIPATTQTTQDSLKLPPELTKQLEELFTDIYTRFKDSDPTKRPYIPKLKPSKKLSSTVNYINNEILPKLLKSDVDFNTIQTLIYSAAFTSAKFIGARIIEDEVTCSKQQRIPWWQRRLEGRIKDLRANIGRLNEYVKGVRSPNLDKHITRIKQTYKIHSQHESENTDITHFLDTLKQKLITLANRLRRYKETTIRKTQNKQFCNNEKLFYRKLSQPNNSHDSNCIPPTSESLQTYWSNIWSQPIEHRHNQWIDEDKEILNHVPDMEFEQIQIDLLKSVIERSHNWKATGTDNIHNFWYKKLTRTHELLLKHINTFIQSPNLLPYYITQGLTYMLPKDLSDSENPSKYRPITCLQNIYKIITACLSESIYKHIHEHNIMAEEQKGCRKNSQGCKEQLTIDSVASIQALRQKRSIYTMYIDYKKAFDSVPHSWLIYILKHYKINHTIIHFLENIMRNWNTKLKVHNSQKTTETDVISIKRGIFQGDSLSPLWFCLALNPLSHMLNRQRIGFEIKHNTQHTTLSHLMYMDDIKLFAGTSDDIHTLATITQNFSNDICMEFGINKCKIQSINKGVVEQAPYELPSHEIIDTVDPVEGYKYLGYTQSQEIHHKEIKKLLQQSFKNRLHKILHTQLNARNTIKAINTFAIPILTYSFGIIRWNQTELATLQRIINTTMTKHRKHHPRSCIQRLTLPKCEGGRGLIDIKNLHNKQLILLRTFFHKRSNQSPLHNAICQADSFTPLTLADHTKQINITSKQQKIDVWTTKSLHGRHRLDLTNPVVDKIASNAWLKRGELFPETEGFMLAIQDQVIDTKNYRKYIIRDSTSSDHCRHCHKQPETIQHITGACSSVTQTDYKHRHDQVAAIVHQTLAYKHKLITEKTPYYKYTPKIILDSPDFKMYWDRTILTDKTVHHNRPDITLHDKKNKTIYLIDIAIPNTHNLSSTHTNKLSKYTDLSIELKTQWQVHTVKTIPIIISSTGVIPKTLHTSLKTLNLHPLTYALLQKAVILNTCRIVRKFLSID

SEQ ID NO: 26377 - protein, 1352 aa, Colias croceus
MRLRSRILPQAGTKVKNDGESRPGPTSPGCPSYSGGGNVSLIAQSHTVATQSIHDESSSCYSPPSSVISSVSSSPQSISSTQQFRSPHSSSTSSSQSIGDVAQEAISAKVTAPAPDGRRTRKTWSREMNIFIMRHYFILTDLEINTKSYLTQLHARFILEFPDMAEVGKQRIGDQRRAIVQRGFLTNQEIHNIKEEVRGLLQNTTAPEQNNITDYTQSRRIRWTDKLNEEIMRSYYRLTKLETDLTTYRPLLHQDVISKCPSIAHLSVQRIADQRRSIVHNKLLSTDKLNTIREEIKNELSTTILQLSDENTTIDGTQASYNYQTSQVTQTFTSEQIPATTQTTQDSLKLPSELTKQLEELFTEIYTRFKDSNPTKRPYIPKLKPSKKLSSTVNYINNEILPKLLKSDLDFNTIQTLIYSAAFTSAKFIGARIIEDKVTCSKQQRIPWWQRRLEGRIKDLRANIGRLNEYVKGVRSPNLDKHITRIKQTYKIHSQHESENTDITHFLDTLKQKLITLANRLRRYKETTIRKTQNKQFCNNEKLFYRKLSQPNNSHDNNCIPPASESLQTYWSNIWSQPIEHRHNQWIDEDKEILNHVPDMEFEQIQIDLLKSVIERSHNWKATGTDNIHNFWYKKLTCTHELLLKHINTFIQSPDLLPYYITQGLTYMLPKDLSDSENPSKYRPITCLQNIYKIITACLSESIYKHIHEHNIMAEEQKGCRKNSQGCKEQLTIDSVASIQALRQKRSIYTMYIDYKKAFDSVPHSWLIYILKHYKINHTIIHFLENIMRNWNTKLKIHNSQKTTETDVISIKRGIFQGDSLSPLWFCLALNPLSHMLNRQCIGFEIKHNTQHTTLSHLMYMDDIKLFAGTSDDIHTLATITQNFSNDICMEFGINKCKIQSINKGVVEQAPYELPSHEIIDTVDPVEGYKYLGYTQSQEIHHKEIKKLLQQSFKSRLHKILHTQLNARNTIKAINTFAIPILTYSFGIIRWNQTELATLQRIINTTMTKHRKHHPRSCIQRLTLPKCEGGRGLIDIKNLHNKQLILLRTFFHKRSNQSPLHNAICQADSFTPLTLADHTKQINITTKQQKIDVWTTKSLHGRHRLDLTNPVVDKIASNAWLKRGELFPETEGFMLAIQDQVIDTKNYRKYIIRDSTSSDHCRHCHKQPETIQHITGACSSITQTDYKHRHDQVAAIVHQTLAYKHKLITEKTPYYKYTPQIILDSPDFKMYWDRTILTDKTVHHNRPDITLHDKKNKTIYLIDIAIPNTHNLSSTHTNKLSKYTDLSIELKTQWQVHTVKTIPIIISSTGVIPKTLHTSLKTLNLHPLTYALLQKAVILNTCRIVRKFLSID

SEQ ID NO: 26378 - protein, 1352 aa, Colias croceus
MRLRSRILPQAGTKVKNDGESRPGPTSPGCPSYSGGGNVSLIAQSHTVATQSIHDESSSCYSPPSSVISSVNSSPQSISSTQQFRSPHLSSTSSSQSIGDVAQEAISAKVTAPALDGRRTRKTWSREMNIFIMRHYFILTDLEINTKSYLTPLHARFILEFPDMAEVGKQRIGDQRRAIVQRGFLKNQDIHDIKEEVRALLQNTTASEQNNITDYTQSRRIRWTDKLNEEIMRSYYRLTKLETDLTTYRPLLHQDVISKCPSIAHLSVQRIADQRRSIVHNKLLSTDKLNTIREEIKNELSTTILQLSDENTTIDATQASYNYQTPQVTQTFTSEQIPATTQTTQDSLKLTSELTKQLEELFTDIYTRFKDSDPTKRPYIPKLKPSKKLSSTVNYINNEILPKLLKSDVDFNTIQTLIYSAAFTSAKFIGARIIEDEVTCSKQQRIPWWQRRLEGRIKDLRANIGRLNEYVKGVRSPNLDKHITRIKQTYKIHSQHESENTDITHFLDTLKQKLITLANRLRRYKETTIRKTQNKQFCNNEKLFYRKLSQPNNSHDSNCIPPTSESLQTYWSNIWSQPIEHRHNQWIDEDKEILNHVPDMEFEQIQIDLLKSVIERSHNWKATGTDNIHNFWYKKLTRTHELLLKHINTFIQSPNLLPYYITQGLTYMLPKDLSDSENPSKYRPITCLQNIYKIITACLSESIYKHIHEHNIMAEEQKGCRKNSQGCKEQLTIDSVASIQALRQKRSIYTMYIDYKKAFDSVPHSWLIYILKHYKINHTIIHFLENIMRNWNTKLKVHNSQKTTETDVISIKRGIFQGDSLSPLWFCLALNPLSHMLNRQRIGFEIKHNTQHTTLSHLMYMDDIKLFAGTSDDIHTLATITQNFSNDICMEFGINKCKIQSINKGVVEQAPYELPSHEIIDTVDPVEGYKYLGYTQSQEIHHKEIKKLLQQSFKNRLHKILHTQLNARNTIKAINTFAIPILTYTFGIIRWNQTELATLQRIINTTMTKHRKHHPRSCIQRLTLPKCEGGRGLIDIKNLHNKQLILLRTFFHKRSNQSPLHNAICQADSFTPLTLADHTKQINITSKQQKIDVWTTKSLHGRHRLDLTNPVVDKIASNAWLKRGELFPETEGFMLAIQDQVIDTKNYRKYIIRDSTSSDHCRHCHKQPETIQHITGACSSITQTDYKHRHDQVAAIVHQTLAYKHKLITEKTPYYKYTPQIILDSPDFKMYWDRTILTDKTVHHNRPDITLHDKKNKTIYLIDIAIPNTHNLSSTHTNKLSKYTDLSIELKTQWQVHTVKTIPIIISSTGVIPKTLHTSLKTLNLHPLTYALLQKAVILNTCRIVRKFLSID

SEQ ID NO: 26379 - protein, 1352 aa, Colias croceus
MRLRSRILPQAGTKVKNDGESRPGPTSPGCPSYSGGGNVSLIAQSHTVATQSIHDESSSCYSPPSSVISSVNSSPQSISSTQQFRSPHLSSTSSSQSIGDVAQEAISAKVTAPALDGRRTRKTWSREMNIFIMRHYFILTDLEINTKSYLTPLHARFILEFPDMAEVGKQRIGDQRRAIVQRGFLKNQEIHNIKEEVRALLQNTTASEQNNITDYTQSRRIRWTDKLNEEIMRSYYRLTKLETDLTTYRPLLHQDVISKCPSIAHLSVQRIADQRRSIVHNKLLSTDKLNTIREEIKNELSTTILQLSDENTTIDATQASYNYQTPQVTQTFTSEQIPATTQTTQDSLKLPSELTKQLEELFTDIYTRFKDSDPTKRPYIPKLKPSKKLSSTVNYINNEILPKLLKSDVDFNTIQTLIYSAAFTSAKFIGARIIEDEVTCSKQQRIPWWQRRLEGRIKDLRANIGRLNEYVKGVRSPNLDKHITRIKQTYKIHSQHESENTDITHFLDTLKQKLITLANRLRRYKETTIRKTQNKQFCNNEKLFYRKLSQPNNSHDSNCIPPTSESLQTYWSNIWSQPIEHRHNQWIDEDKEILNHVPDMEFEQIQIDLLKSVIERSHNWKATGTDNIHNFWYKKLTRTHELLLKHINTFIQSPNLLPYYITQGLTYMLPKDLSDSENPSKYRPITCLQNIYKIITACLSESIYKHIHEHNIMAEEQKGCRKNSQGCKEQLTIDSVASIQALRQKRSIYTMYIDYKKAFDSVPHSWLIYILKHYKINHTIIHFLENIMRNWNTKLKVHNSQKTTETDVISIKRGIFQGDSLSPLWFCLALNPLSHMLNRQRIGFEIKHNTQHTTLSHLMYMDDIKLFAGTSDDIHTLATITQNFSNDICMEFGINKCKIQSINKGVVEQAPYELPSHEIIDTVDPVEGYKYLGYTQSQEIHHKEIKKLLQQSFKNRLHKILHTQLNARNTIKAINTFAIPILTYSFGIIRWNQTELATLQRIINTTMTKHRKHHPRSCIQRLTLPKCEGGRGLIDIKNLYNKQLILLRTFFHKRSNQSPLHNAICQADSFTPLTLADHTKQINITSKQQKIDVWTTKSLHGRHRLDLTNPVVDKIASNAWLKRGELFPETEGFMLAIQDQVIDTKNYRKYIIRDSTSSDHCRHCHKQPETIQHITGACSSITQTDYKHRHDQVAAIVHQTLAYKHKLITEKTPYYKYTPQIILDSPDFKMYWDRTILTDKTVHHNRPDITLHDKKNKTIYLIDIAIPNTHNLSSTHTNKLSKYTDLSIELKTQWQVHTVKTIPIIISSTGVIPKTLHTSLKTLNLHPLTYALLQKAVILNTCRIVRKFLSID

SEQ ID NO: 26380 - protein, 1352 aa, Colias croceus
MRLRSRILPQAGTKVKNDGESRPGPTSPGCPSYSGGGNVSLIAQSHTVATQSIHDESSSCYSPPSSVISSVNSSPQSISSTQQFRSPHSSSTSSSQSIGDVAQEAISAKVTAPAPDGRRTRKTWSREMNIFIMRHYFILTDLEINTKSYLTQLHARFILEFPDMAEVGKQRIGDQRRAIVQRGFLTNQEIHNIKEEVRGLLQNTTAPEQNNITDYTQSRRIRWTDKLNEEIMRSYYRLTKLETDLTTYRPLLHQDVISKCPSIAHLSVQRIADQRRSIVHNKLLSTDKLNTIREEIKNELSTTILQLSDENTTIDATQASYNYQTSQVTQTFTSEQIPATTQITQDSLKLPSELTKQLEELFTDIYTRFKDSNPTKRPYIPKLKPSKKLSSTVNYINNEILPKLLKSDLDFNTIQTLIYSAAFTSAKFIGARIIEDKVTCSKQQRIPWWQRRLEGRIKDLRANIGRLNEYVKGVRSPNLDKHITRIKQTYKIHSQHESENTDITHFLDTLKQKLITLANRLRRYKETTIRKTQNKQFCNNEKLFYRKLSQPNNSHDNNCIPPASESLQTYWSNIWSQPIEHRHNQWIDEDKEILNHVPDMEFEQIQIDLLKSVIERSHNWKATGTDNIHNFWYKKLTCTHELLLKHINTFIQSPDLLPYYITQGLTYMLPKDLSDSENPSKYRPITCLQNIYKIITACLSESIYKHIHEHNIMAEEQKGCRKNSQGCKEQLTIDSVASIQALRQKRSIYTMYIDYKKAFDSVPHSWLIYILKHYKINHTIIHFLENIMRNWNTKLKIHNSQKTTETDVISIKRGIFQGDSLSPLWFCLALNPLSHMLNRQCIGFEIKHNTQHTTLSHLMYMDDIKLFAGTSDDIHTLATITQNFSNDICMEFGINKCKIQSINKGVVEQAPYELPSHEIIDTVDPVEGYKYLGYTQSQEIHHKEIKKLLQQSFKSRLHKILHTQLNARNTIKAINTFAIPILTYSFGIIRWNQTELATLQRIINTTMTKHRKHHPRSCIQRLTLPKCEGGRGLIDIKNLHNKQLILLRTFFHKRSNQSPLHNAICQADSFTPLTLADHTKRINITSKQQKIDVWRTKSLHGRHRLDLTNPVVDKIASNAWLKRGELFPETEGFMLAIQDQVIDTKNYRKYIIRDSTSSDHCRHCHKQPETIQHITGACSSITQTDYKHRHDQVAAIVHQTLAYKHKLITEKAPYYKYTPQIILDSPDFKMYWDRTILTDKTVHHNRPDITLHDKKNKTIYLIDIAIPNTHNLSSTHTNKLSKYTDLSIELKTQWQVHTVKTIPIIISSTGVIPKTLHTSLKTLNLHPLTYALLQKAVILNTCRIVRKFLSID

SEQ ID NO: 26381 - protein, 1297 aa, Colias croceus
MRLRSRILPQAGTKVKNDGESRPGPTSPGCPSYSGGGNVSLIAQSHTVATQSKHDESSSCYSPPSSVISSVNSSPQSISSTQQFRSPHSSSTSSSQSIGDVAQEAISAKVTAPAPDGRRTRKTWSREMNIFIMRHYFILTDLEINTKSYLTQLHARFILEFPDMAEVGKQRIGDQRRAIVQRGFLTNQEIHNIKEEVRGLLQNTTASEQNNITDYTQSRRIRWTDKLNEEIMRSYYRLTKLETDLTTYRPLLHQDVISKCPSIAHLSVQRIADQRRSIVHNKLLSTDKLNTIREEIKNELSTTILQLSDENATIDATQASYNYQTSQVTQTFTSEQIPATTQTTQDSLKLPSELTKQLEELFTDIYTRFKDSDPTKRPYIPKLKPSKKLSSTVNYINNEILPKLLKSDVDFNTIQTLIYSTAFTSAKFIGARIIEDKVTCSKQQRIPWWQRRLEGRIKDLRANIGRLNEYVKGLRSPNLDKHITRIKQTYKIHSQHESENTDITHFLDTLKQKLITLANRLRRYKETTIRKTQNKQFCNNEKLFYRKLSQPNNSHDNNCISPASESLQTYWSNIWSQPIEHRHNQWIDEDKEILNHVPDMEFEQIQIDLLKSVIERSHNWKATGTDNIHNFWYKKLTCTHELLLKHINTFIQSPDLLPHYITQGLTYMLPKDLSDSENPSKYRPITCLQNIYKIITACLSESIYKHIHEHNIMAEEQKGCRKNSQGCKEQLTIDSVASIQALRQKRSIYTMYIDYKKAFDSVPHSWLIYILKHYKINHTIIHFLENIMRNWNTKLKIHNSQKTTETDVISIKRGIFQGDSLSPLWFCLALNPLSHMLNRQCIGFEIKHNTQHTTLSHLMYMDDIKLFAGTSDDIHTLATITQNFSNDICMEFGINKCKIQSINKGVVEQAPYELPSHEIIDTVDPVEGYKYLGYTQSQEIHHKEIKKLLQQSFKSRLHKILHTQLNARNTIKAINTFAIPILTYSFGIIRWNQTELATLQRIINTTMTKHRKHHPRSCIQRLTLPKCEGGRGLIDIKNLHNKQLILLRTFFHKRSNQSPLHNAICQADSFTPLTLADHTKQINITSKQQKIDVWTTKSLHGRHRLDLTNPVVDKIASNAWLKRGELFPETEGFMLAIQDQVIDTKNYRKYIIRDSTSSDHCRHCHKQPETIQHITGACSSITQTDYKHRHDQVAAIVHQTLAYKHKLITEKTPYYKYTPQIILDSPDFKMYWDRTILTDKTVHHNRPDITLHDKKNKTIYLIDIAIPNTHNLSSTHTNKLSKYTDLSIELKTQWQLS

SEQ ID NO: 26382 - protein, 1352 aa, Colias croceus
MRLRSRILPQAGTKVKNDGESRPGPTSPGCPSYSGGGNVSLIAQSHTVATQSIHDESSSCYSPPSSVISSVSSSPQSISSTQQFRSPHSSSTSSSQSIGDVAQEAISAKVTAPAPDGRRTRKTWSREMNIFIMRHYFILTDLEINTKSYLTQLHARFILEFPDMAEVGKQRIGDQRRAIVQRGFLTNQEIHNIKEEVRGLLQNTTAPEQNNITDYTQSRRIRWTDKLNEEIMRSYYRLTKLETDLTTYRPLLHQDVISKCPSIAHLSVQRIADQRRSIVHNKLLSTDKLNTIREEIKNELSTTILQLSDENTTIDATQASYNYQTSQVTQTFTSEQIPATTQTTQDSLKLPSELTKQLEELFTDIYTRFKDSNPTKRPYIPKLKPSKKLSSTVNYINNEILPKLLKSDLDFNTIQTLIYSAAFTSAKFIGARIIEDKVTCSKQQRIPWWQRRLEGRIKDLRANIGRLNEYVKGVRSPNLDKHITRIKQTYKIHSQHESENTDITHFLDTLKQKLITLANRLRRYKETTIRKTQNKQFCNNEKLFYRKLSQPNNSHDNNCIPPAPESLQTYWSNIWSQPIEHRHNQRIDEDKEILNHVPDMEFEQIQIDLLKSVIERSHNWKATGTDNIHNFWYKKLTCTHELLLKHINTFIQSPDLLPYYITQGLTYMLPKDLSDSENPSKYRPITCLQNIYKIITACLSESIYKHIHEHNIMAEEQKGCRKNSQGCKEQLTIDSVASIQALRQKRSIYTMYIDYKKAFDSVPHSWLIYILKHYKINHTIIHFLENIMRNWNTKLKIHNSQKTTETDVISIKRGIFQGDSLSPLWFCLALNPLSHMLNRQCIGFEIKHNTQHTTLSHLMYMDDIKLFAGTSDDIHTLATITQNFSNDICMEFGINKCKIQSINKGVVEQAPYELPSHEIIDTVDPVEGYKYLGYTQSQEIHHKEIKKLLQQSFKSRLHKILHTQLNARNTIKAINTFATPILTYSFGIIRWNQTELATLQRIINTTMTKHRKHHPRSCIQRLTLPKCEGGRGLIDIKNLHNKQLILLRTFFHKRSNQSPLHNAICQADSFTPLTLADHTKQINITSKQQKIDVWTTKSLHGRHRLDLTNPVVDKIASNAWLKRGELFPETEGFMLAIQDQVIDTKNYRKYIIRDSTSSDHCRHCHKQPETIQHITGACSSITQTDYKHRHDQVAAIVHQTLAYKHKLITEKTPYYKYTPQIILDSPDFKMYWDRTILTDKTVHHNRPDITLHDKKNKTIYLIDIAIPNTHNLSSTHTNKLSKYTDLSIELKTQWQVHTVKTIPIIISSTGVIPKTLHTSLKTLNLHPLTYALLQKAVILNTCRIVRKFLSID

SEQ ID NO: 26383 - protein, 1352 aa, Colias croceus
MRLRSRILPQAGTKVKNDGESRPGPTSPGCPSYSGGGNVSLIAQSHTVATQSKHDESSSCYSPPSSVISSVNSSPQSISSTQQFRSPHSSSTSSSQSIGDVAQEAISAKVTAPAPDGRRTRKTWSREMNIFIMRHYFILTDLEINTKSYLTQLHARFILEFPDMAEVGKQRIGDQRRAIVQRGFLTNQEIHNIKEEVRGLLQNTTASEQNNITDYTQSRRIRWTDKLNEEIMRSYYRLTKLETDLTTYRPLLHQDVISKCPSIAHLSVQRIADQRRSIVHNKLLSTDKLNTIREEIKNELSTTILQLSDENATIDATQASYNYQTSQVTQTFTSEQIPATTQTTQDSLKLPSELTKQLEELFTDIYTRFKDSDPTKRPYIPKLKPSKKLSSTVNYINNEILPKLLKSDVDFNTIQTLIYSTAFTSAKFIGARIIEDKVTCSKQQRIPWWQRRLEGRIKDLRANIGRLNEYVKGLRSPNLDKHITRIKQTYKIHSQHESENTDITHFLDTLKQKLITLANRLRRYKETTIRKTQNKQFCNNEKLFYRKLSQPNNSHDNNCISPASESLQTYWSNIWSQPIEHRHNQWIDEDKEILNHVPDMEFEQIQIDLLKSVIERSHNWKATGTDNIHNFWYKKLTCTHELLLKHINTFIQSPDLLPHYITQGLTYMLPKDLSDSENPSKYRPITCLQNIYKIITACLSESIYKHIHEHNIMAEEQKGCRKNSQGCKEQLTIDSVASIQALRQKRSIYTMYIDYKKAFDSVPHSWLIYILKHYKINHTIIHFLENIMRNWNTKLKIHNSQKTTETDVISIKRGIFQGDSLSPLWFCLALNPLSHMLNRQCIGFEIKHNTQHTTLSHLMYMDDIKLFAGTSDDIHTLATITQNFSNDICMEFGINKCKIQSINKGVVEQAPYELPSHEIIDTVDPVEGYKYLGYTQSQEIHHKEIKKLLQQSFKSRLHKILHTQLNARNTIKAINTFAIPILTYSFGIIRWNQTELATLQRIINTTMTKHRKHHPRSCIQRLTLPKCEGGRGLIDIKNLHNKQLILLRTFFHKRSNQSPLHNAICQADSFTPLTLADHTKQINITSKQQKIDVWTTKSLHGRHRLDLTNPVVDKIASNAWLKRGELFPETEGFMLAIQDQVIDTKNYRKYIIRDSTSSDHCRHCHKQPETIQHITGACSSITQTDYKHRHDQVAAIVHQTLAYKHKLITEKTPYYKYTPQIILDSPDFKMYWDRTILTDKTVHHNRPDITLHDKKNKTIYLIDIAIPNTHNLSSTHTNKLSKYTDLSIELKTQWQVHTVKTIPIIISSTGVIPKTLHTSLKTLNLHPLTYALLQKAVILNTCRIVRKFLSID

SEQ ID NO: 26384 - protein, 1362 aa, Cecropterus dorantes
MRHKQSGSGCPTYSGGGNASHMSHNDEAADESRITSYSSSPISSTQSLFPSPNSSPYSYQTQQSSSRSHTITPLSNRSAEDVYCVPSISSSSTNIVSCNPPPSSFLFSLSDNVVGEASAKNPSPIADIKRARKTWSTEMNIFIWRTYLTITKLESCTRNYLDELHLQFYSKFQHMDVSKQRVGDQRRAIVRNKLLPQQLLDKIKEEVRTYLQSREPLAHTHTQTINTRTNITEKRRMVWTTEINEAIIKIYYEVTEVESNLTTYRKKLYDKFIEHFPHLHNLTEQRIADQRRAIIKNKMLTESRISQIKQEVTAKLADNVIPDNETVNYSQRYSFNNISSTNSQETVDTCERVLTENESSQIDTYFAEALIQYKHTDPTSRPHIPKQRLTKKLSNALQHLNDILIPKIITHNTDFEMTQLIIYCAAYTAARYNGFKIERQIKTPPNNLTPAWQVKLERRIEELRAHIGRLTEFINGVRSNSLIKKVEAIKHKYKIHSQHENPNTDLSHFLDTLKQKLNALASRLRRYKKTTLRKTQNKLFNNNEKAFYRNFTKHTTTSSTTNTQTPVLTKEALATFWSNLWSEPIKHKHCSSWIKEDKNRLSNLPEMQFENISLDLMKRVIGRTHNWKATGSDKIHNYWYKKFTSIHTLLHIHINNFIKSPNSLPHYITQGITYMLPKDMTDTNNPAKYRPITCLQNIYKIITSCISEVIYEHVDQHNLLAEEQKGCRRNSQGCKEQLTIDSVAMKQAYSSKRSIYTMYIDYQKAFDSVPHSWLLYILKHYNIHPILVQFLESVMDIWKTKIKLHGSTGLIETDLINIKRGIFQGDALSPLWFCLALNPLSQLLNNSNKGFKIKYNKEQHTISHLMYMDDIKLFGSTLTEMDTLTKITQTFSSDICMQFGIDKCKIQSVCKGVIEHNTYNLNSEDLIQPVNQSAGYKYLGYQQSRLIHQKETKSTLIEKFKGRLRKILNTQLNARNTIKAVNTYAIPILTYSFGIIQWTQTDLHKLQRIINTTMTQYRKHHPRACVQRQTLPRQEGGRNLIDIQNLHNRQVKSLRNYFYNRSHSSQIHLATVQADKKLTPLNLNDQSRHIDEITQEQKINTWTQKSLHGRHRLDLNNRYVDKAASNEWLRRGELFPETEGFMIAIQDQVIETRNYRKHIIKDPNFVNDLCRHCHSASETIQHITGACRCIVQTDYKHRHDQVAAIIHQYLALKYKLVTEKTNYYKYSPAVILESPKFKLYWDRTIITDKTVHYNRPDITLHDKENKTVYLIDIAIPNTNNLQSTYTTKLTKYTDLTIELKTQWRVDTVKTVPIVISSTGIIPKTLHSSLKLLQIHPLTFLTIQKAVILNTCRIVRKFLSIDT

SEQ ID NO: 26385 - protein, 1390 aa, Autochton pseudocellus
MTNGALVFTKYAMRLRSRQIPQAGTCEGESRPGPSGSGCPTYSGGGTASHRSHNDVVADQSCFTSHPSSPVSSTLSLFPSPNSSPYSYQTQQSSSRSHTMTPLSNHSTDDAHHVPPISSSSNIISNNPPPSSLLFSLSDNVVEEASAKNPSPVADIKRARKAWSKEMNIFIWRTYLTITKLESCTRGYLDELHLQFYSKFPHMDVSKQRVGDQRRAIVRNKLLPQQLLDKIKEEVRAHLRSSESLAHTHTQTINTQTQTTENRRIVWTTDINEAIIKIYYEVTEVESNLTTYRKKLYDKFIEHFPHFSKLTEQRIADQRRAIIKNKMLTENRISQIKQEVAAKLADNVIPDNEIHNCSQRNSYNHISSTHNEESVNTCKRVLLTENESSQLEAYFSEALTEYKHTDPTSRPHIPKQRLTKKLSNALQHLNDILIPKVISHNTDFEMTQLVIYCAAYTAARYNGYKLDRPIKTPSNNFIPAWQVKLEKRIEELRAHIGRLTEFIKGVRSNSLIKKVEAIKHKYKIHSQHENPNTDLSHFLDTLKQKLNALANRLRRYKKTTLRKTQNKLFNNNEKVFYRNLSKQITTSPTDIQNTAITKDALTSFWSNLWSEPTKHKHSSSWIKEDKNRLSDLPKMQFDNISLDLMKRVIGRTHNWKATGSDKIHNYWYKKFTSTHTLLHTHINNFIKSPISLPHYITQGITYMLPKDITDMNNPAKYRPITCLQNIYKIITSCISEIIYEHVDQHNLLAEEQKGCRRNRQGCKEQLTIDSVVMKQAYVSKKSIYTMYIDYQKAFDSVPHSWLLYILKHYNIHPTIVEFLESVMDIWKTKIKLHGSTGLIETDLINIKRGIFQGDALSPLWFCLALNPLSQLLNNSNRGFKIKYNKEQHTISHLMYMDDIKLFGSTLNEIDTLAKITQTFSSDICMQFGIDKCKIQSVCKGLIEPNPYNINSEDLIQPVDQLEGYKYLGYQQSRLIHQKETKSALIEKFKVRLRNILNTQLNARNTIKAVNTYAIPILTYSFGIIQWTQTDLSKLQRIINTTMTKYRKHHPRACIQRQTLPRQEGGRNLIDIQNLHNRLVKSLRNYFYNRSHNSQIHLATVQADKKLTPLNLNDQSKHIDEMTQEQKINTWTQKSLHGRHRLDLNNPYVDKAASNEWLRRGELFPETEGFMIAIQDQVIETRNYRKHIIKDPNCVNDLCRHCHSASETIQHITGGCRCIVQTDYKHRHDQVAAIIHQYLALKYKLITEKTNYYKYSPAVILESPKFKLYWDRTIITDKTVHYNRPDITLHDKENKTVYLIDIAVPNTNNLQSTYINKLTKYTDLTIELKTQWRVDTVKTIPIVISSTGIIPKTLHSDLKLLQIHPLTFLTLQKAVILNTCRIVRKFLSIDT

SEQ ID NO: 26386 - protein, 1373 aa, Emesis diogenia
MSNRTYYLRPLPGGRRGTSGANAGRLSMRTVGGGGLNRRVPPEKNTTADNHPSSSVSPISSPPSQLFPSLPSSPQSYSDTLKQSSSSSPPPSSPSLRASPTSLISNTPENVVQEAITAKTPAPAKGGSNTRKRWTQEMNIFIMRTYFIITSLETDTTIRYLPPLHAKFLEKFPEMDVSRQRIGDQRRAIVKNKLLSDEKIQELKLEVQFHLNNHNQIHAETNNLTTTTGRMTWNKETNEIIIRTYYQITKLETENMTTYRQILHQEVIKLCPQLANTSIQRIADQRRAIINNKYITSERLEQIKTEIQQELNLNTPNANEELINTQPHSHEDNEIYQTQPSENYAIPESTYTHQDTQNEVEQRTQTHLTQEFERDIENDFVECMTKFKDTDPTSREHIPKQKSSKKFANIIYYLNNCVIPKTITTETDFETLQLILYCAAHTAAKHNGAKFPSTQTNITQHTEPLWQKRLNKRIEQLRADIARLTEYIRGSRSQHLENHIRRIKDRYQTHSQHESPNTDITHFLDTLKQKLGALANRLRRYKETTLRKIQNKLFTNNEKIFYRKLTQNQSTDSVNRTSTPNKEELHQFWSNIWANPVNHKQNSWIEEEKEKFRNLPEMKFENISLELLQKIITKTHNWKATGSDKIHNFWYKKFTNIHPLLLKHINSFIDTPQSMPSYITEGITFMLPKDINETNNPAKYRPITCLQTIYKIITSCITEIIYSYAQENNILAEEQKGCRRHSQGCKEQLTIDNIVSKQAIAKKKDIYTMYIDYKKAYDSVPHSWLISTLEHYNIHPTIVNFLKTAMKTWTTTLKINSKEGLIDTEPIHIKRGIFQGDALSPLWFCLALNPLSRVLNDTSKGFNIAHNTHRYTLTHLMYMDDIKLFASSLTDIQDLTAITQTFSTDIQMEFGIDKCKIQSVRKGHVENDPYQLNTLEIIEPVNNIEGYKYLGYQQTRQIHQKQTKKKLTDNFKSRLHKILNTKLNSCNTIKAINTFAIPILTYSFGIIQWSQTDLKNLQRMINTTMTQYRKHHPRACVQRQTLPRNEGGRGLIDIQNLHNKQIGSLRAYFHYKSQHSQLHHAITQSDTKLTPLNLEQTELQLTITSINQKLDTWVQKSLHGRHRLDLINANVDKTASNAWLKRGELFPETEGFMIAIQDQTIDTKNYRKHIIRDPTLHSDLCRHCHSASETIQHITGACKSITQTDYKHRHDQVAAIIHQYLAYKYKLITEKTAYYKYTPQTILESSHHKLYWDRTLVTDKTVHYNRPDITLQDKKNKTVYLIDIAIPNTHNIHTTFTEKIAKYTDLAIEIKAQWRVNSVRTIPLILSSTGVIPKTLHNSLKVLDIHPLTYILLQKAVILNTCRLVRKFLALET

SEQ ID NO: 26387 - protein, 1386 aa, Spodoptera litura
MMSTLAHLSYKTTPHIYAMRLRSRVIPQAGTGVCNDGESRPGPSCPGCPSYSGEGTVSHAAQPQAVAAQHDQLSTCSSPTSSLFSSIPSSPASYLNNQQSSSTNSSPLSFHSARDVVQEAMLAEVTAPAQGGRRTRKTWTKDMNIFIMRHYFILTELETNIKNYLTPLHSRFNLEFPEMNASKQRIGDQRRAIVQRNFLTEREILNIKDEVRLLLQNQSSMSQYNITNIDQTSSRRMRWSDDLNETIMRSYYRLTNLETDLTTYRPLLHQDIISKCPSIAHLSAQRISDQRRSIVNNKLLSNARLNEIREEVRNELASISTDNSDYIISHQTTNEIVTQLNPVHTTNDDHTGRTTPTSASDLNTPQIAQNTSQAEQNTLHLPAEVCKQLEQMYTEHCNKFNASNPTTRPYIPKLKSSRKLAAIISHLNNHILPNILNSATDFLTLQTSIYCAAYTAAKFNGARIKETNEHISQPVKVPWWQKRLERRISDLRANIGRLTEYTRGTRSQALETHIHNIKQVYKIHSQHEPENTDITHFLDTLKQKLNTLTNRLRRYRETTIRKIQNKQFCNNEKLFYRKLTQQNNNNSQGSNTPLPTPESLHSFWSNIWSNPVTHHQNIWIEDDKERWRDTPEMKFDHINLQLLQTVIARTHNWKAAGSDNIHNFWYKKLTCTHTLLLKHINTFIQSPDTMPPYITQGITYMLPKDPLDTANPAKYRPITCLQNIYKIITSCLSETIYKHTHEHNILAEEQKGCRKNSKGCKEQLTIDAVVSKQALKQKRDIHTMYIDYKKAYDSVPHSWLIYILKHYKIHPTIIQFLEKIMPNWNTKLKIHNANEITETEFISIKRGIFQGDALSPLWFCLALNPLSNMLNKNDFGFKIKHNSQHTRLTHLMYMDDIKLIAGTLNEIHTLAEITQTFSNDICMEFGIDKCKIQSLINGTVEPTSYELRNHEIIESVDPNEGYKYLGYHQSAEIHHKNTKKILQQNFKNRLHKILHTQLNSKNTIKAINTFAIPILTYSFGIIRWTKTDLTTLQRLINTTMTKHRKHHPRACIQRLTLPKIEGGRGLIDITNLHNNQITALRRFFFNRSQHSPLHKAICHADTYTPLSLADHTKQMTTTSKQQKIQTWTQKSLHGRHRLDLTNPIVDKIASNAWLKRGELFPETEGFMLAIQDQVIDTKNYRKYIIRDSTLGSDHCRHCHRQPETIQHITGACSSITQTDYKHRHDQVAAIIHQALAHKHKLIPEKTPYYKYTPQIILDSPEFKIYWDRTILTDKTVHHNRPDITLHDKKNKIVYLIDIAIPNTHNLSSTHTNKLSKYADLTIELKTQWQVHTVKTVPIIVSSTGVIPKTLHTSLKTLDLHPLTFTLLQKAVILNTCRIVRKFLSID

SEQ ID NO: 26388 - protein, 1355 aa, Spodoptera frugiperda
MRLRSRVIPQAGTEVNNDGESRPGPSSPGCPSYSGEGTVSHAAQPQAVAAQLDQVSTCSSPTSSLFSSLPSSPASYLNNHQSSSANSSPLSFHSARDVVQEAIPAEVTAPAQGGRRTRKTWTKQMNIFIMRHYFILTDLESNTRTYLTPLHARFTAEFPEMNASKQRIGDQRRAIVQRNFLTEQEIQTIKEEVRLLLQTHPSISQTNTDNTQTRRMRWTDNLNEAIMRSYYRLTNLETDLTTYRPLLHQDVTSKCPSIAHLSAQRISDQRRSIVNNQLLSVDRLNQIREEVRMELASVSTDNSEFATPDIIQATQSQPTSLNINDSNSEPTTSTNTNDQNTRPIAQTTLNLSPEILEQLEQMYMEHHNRFKDSDPTTRPYIPKLKSSRKLTAITTHLNAHILPKLLTPDTDFHTLQTSIYCAAYTIAKFNGARIKESNGISNQSVRVPWWQKRLQRRISELRADIGRLTEYANGARSQALENHICNIKQIYKIHTQHETENTDITHFLDTLKQKLNTLASRLRRYKETTARKTQNTQFYNNEKLFYRKLTQRNNSSQENNTPLPTPESLHAFWFNIWANPVTHHQNTWIEEDKERWTDTPEMLFDQISLQLLQTVIARTHNWKTAGSDNIHNFWYKKLTCTHTLLLKHINTFIQSPNTMPPYITQGTTYMLAKDPSDTANPAKYRPITCLQNIYKIITSCLSETIYKHTHEHNILAEEQKGCRKNSKGCKEQLIIDTVASKQAVKQKRDIHTMYVDYKKAYDSVPHSWLIYILKHYKIHPTIIKFLEDIMPSWTTKLKIRNENQITETEFIPIKRGIFQGDALSPLWFCLALNPLSNMLNKNSTGFKIKHNSLHTGLTHLMYMDDIKLFAGTLNDIHTLADVTETFSNDICMEFGIDKCKIQSIIKGTIESTSYELRNHEVIEPVDPNEGYKYLGYYQSTEIHHKNTKTTLQQNFRNRLHKILHTHLNSKNTIKAINAFAVPILTYSFGIIRWTQTDLTTLQRIINTTMTKHRKHHPRACIQRLTLPKIEGGRGLIDITNLHNNQITGLRTFFFNRSQHSSLHKAVCQADTYTPLSLADHTKQMTTVSNQQKIQTWTQKSLHGRHRLDLTNPIVDKIASNAWLKRGELFPETEGFMLAIQDQVIDTKNYRKYIVRDSTLGSDHCRHCHRQPETIQHITGACSSITQTDYKHRHDQVAAIIHQALAYKYRLIPEKTPYYKYTPQIILDSPEFKMYWDRTILTDKTIHHNRPDITLHDKKNKIVYLIDIAIPNTHNLSSTHTNKLAKYADLTIELKTQWQVRTVKTVPIIISSTGVIPKTLHTSLKSLDLHPLTYTLLQKAVILNTCRIVRKFLSID

SEQ ID NO: 26389 - protein, 1378 aa, Spodoptera litura
MISTLVHPSYKTTSHIYAMRLRSRVIPQAGTGVSNDGESRPGPSSPGCPSYSGEGTVSQAARPQTVAAKHDQLSTCSSPTSSLFSSIPSSPASYLNNQQSSSTNSSPLSFQSARDVVQEASSAKVTALAQGGRRTRKTWTRDMNIFIMRHYFILTELETNIKTYLTPLHTRFSLEFPEMNASKQRIGDQRRAIVQRNFLTKQEILNIKDEVRILLQNQPLTPQYNTDTDQTPSRRMRWSDQLNETIMKSYYRLTNLETDLTTYRPLLHQDVISKCPSIAHLSAQRISDQRRSIVNNQLLSITRLNQIREEVRSELASINTDSSNCTIHETLTQPTTAVTNDDQTELTAPIRTSDHDTTQIAQNTTQTPQNTLHLPAEVLKQLEELYNEHYNKFKESNPTTRPYIPKLKSSKKLAAITSCLNTHILPKTLTSDTDFCTLQTIIYCAAYTAAKFNGARIKENGEYSNQPVKVPWWQKRLQRRISNLRANIGRVTEYAKGVRSQALEEHIHNIKQIYKIHSQHEPENTDITHFLDTLKQKLNTLANRLRRYKETTLRKTQNKQFYNNEKLFYRKLTQQHNNPQGNNTHLPSTESLQEFWSNIWSNPIQHQQNTWIEKDKKRWEDIPEMEFDQINLRLLQAVIARTHNWKAAGSDNIHNFWYKKLTCTHTLLLKHINTFIQSPNTMPPYITQGTTYMLPKDPSDTSNPAKYRPITCLQNMYKIITSCLSETIYKHTQEHNILAEEQKGCRKNSQGCKEQLTIDAVASTQAIKLKRDIHTMYIDYKKAFDSVPHSWLIYILKHYKIHPVIIQFLEKIMPLWNTKLKICNSTESTETDHIPIRRGIFQGDALSPLWFCLALNPLSNMLNKNNIGLKIEHNSEHTTLTHLMYMDDIKLFASTLNEIHALADITQTFSNDIRMEFGIDKCKIQSVIKGSTVPSTYELENQEIIEAIDPNEGYKYLGYYQSKEIHHKDTKKALQKNFRSRLHKVLHTHLNAKNTIKAINTFAIPILTYSFGIIRWSQTDLTTLQRIINTTMTKHRKHHPRACIQRLTLPKNEGGRGLIDITNLHNNQIKLLRTFFFNRSQHSPLHKAICLIDSFTPLYLANHTKHMNIISKEQKIQTWTQKSLHGRHRLDLTNPIVDKIASNAWLKRGELFPETEGFMLAIQDQVIDTKNYRKYIIRDSALGSDHCRHCHRQPETIQHITGACSSITQTDYKHRHDQVAAIIHQALAYKHKLIAEKTPYYKYTPQIILDSPEYKMYWDRTILTDKTIHHNRPDITLHDKKNKLVYLIDIAIPNTHNLSSTHTNKLSKYADLTIELKTQWQVHTVRTVPIIISSTGVIPKTLHTSIKTLDLHPLTYTLLQKAVILNTCRIVRKFLSIE

SEQ ID NO: 26390 - protein, 1236 aa, Spodoptera litura
MNIFIMRHYFILTELETNIKTYLTPLHTRFSLEFPEMNASKQRIGDQRRAIVQRNFLTKQEILNIKDEVRILLQNQPLTPQYNTDTDQTPSRRMRWSDQLNETIMKSYYRLTNLETDLTTYRPLLHQDVISKCPSIAHLSAQRISDQRRSIVNNQLLSITRLNQIREEVRSELASINTDSSNCTIHETLTQPTTAVTNDDQTELTAPIRTSDHDTTQIAQNTTQTPQNTLHLPAEVLKQLEELYNEHYNKFKESNPTTRPYIPKLKSSKKLAAITSCLNTHILPKTLTSDTDFCTLQTIIYCAAYTAAKFNGARIKENGEYSNQPVKVPWWQKRLQRRISNLRANIGRVTEYAKGVRSQALEEHIHNIKQIYKIHSQHEPENTDITHFLDTLKQKLNTLANRLRRYKETTLRKTQNKQFYNNEKLFYRKLTQQHNNPQGNNTHLPSTESLQEFWSNIWSNPIQHQQNTWIEKDKKRWEDIPEMEFDQINLRLLQAVIARTHNWKAAGSDNIHNFWYKKLTCTHTLLLKHINTFIQSPNTMPPYITQGTTYMLPKDPSDTSNPAKYRPITCLQNMYKIITSCLSETIYKHTQEHNILAEEQKGCRKNSQGCKEQLTIDAVASTQAIKLKRDIHTMYIDYKKAFDSVPHSWLIYILKHYKIHPVIIQFLEKIMPLWNTKLKICNSTESTETDHIPIRRGIFQGDALSPLWFCLALNPLSNMLNKNNIGLKIEHNSEHTTLTHLMYMDDIKLFASTLNEIHALADITQTFSNDIRMEFGIDKCKIQSVIKGSTVPSTYELENQEIIEAIDPNEGYKYLGYYQSKEIHHKDTKKALQKNFRSRLHKVLHTHLNAKNTIKAINTFAIPILTYSFGIIRWSQTDLTTLQRIINTTMTKHRKHHPRACIQRLTLPKNEGGRGLIDITNLHNNQIKLLRTFFFNRSQHSPLHKAICLIDSFTPLYLANHTKHMNIISKEQKIQTWTQKSLHGRHRLDLTNPIVDKIASNAWLKRGELFPETEGFMLAIQDQVIDTKNYRKYIIRDSALGSDHCRHCHRQPETIQHITGACSSITQTDYKHRHDQVAAIIHQALAYKHKLIAEKTPYYKYTPQIILDSPEYKMYWDRTILTDKTIHHNRPDITLHDKKNKLVYLIDIAIPNTHNLSSTHTNKLSKYADLTIELKTQWQVHTVRTVPIIISSTGVIPKTLHTSIKTLDLHPLTYTLLQKAVILNTCRIVRKFLSIE

SEQ ID NO: 26391 - protein, 1378 aa, Spodoptera litura
MISTLVHPSYKTTSHIYAMRLRSRVIPQAGTGVSNDGESRPGPSSPGCPSYSGEGTVSQAAQPQTVAAKHDQLSTCSSPTSSLFSSIPSSPASYLNNQQSSSTNSSPLSFQSARDVVQEASSAKVTAPAQGGRRTRKTWTRDMNIFIMRHYFILTELETNIKTYLTPLHTRFSLEFPEMNASKQRIGDQRRAIVQRNFLTKQEILNIKDEVRILLQNQPLTPQYNTDTDQTPSRRMRWSDQLNETIMKSYYRLTNLETDLTTYRPLLHQDVISKCPSIAHLSAQRISDQRRSIVNNQLLSITRLNQIREEVRSELASINTDSSNCTIHETLTQPTTAVTNDDQTELTAPIRTSDHDTTQIAQNTTQTPQNTLHLPAEVLKQLEELYNEHYNKFKESNPTTRPYIPKLKSSKKLAAITSCLNTHILPKTLTSDTDFCTLQTIIYCAAYTAAKFNGARIKENGEYSNQPVKVPWWQKRLQRRISNLRANIGRVTEYAKGVRSQALEEHIHNIKQIYKIHSQHEPENTDITHFLDTLKQKLNTLANRLRRYKETTLRKTQNKQFYNNEKLFYRKLTQQHNNPQGNNTHLPSTESLQEFWSNIWSNPIQHQQNTWIEKDKKRWEDIPEMEFDQINLRLLQAVIARTHNWKAAGSDNIHNFWYKKLTCTHTLLLKHINTFIQSPNTMPPYITQGTTYMLPKDPSDTSNPAKYRPITCLQNMYKIITSCLSETIYKHTQEHNILAEEQKGCRKNSQGCKEQLTIDAVASTQAIKLKRDIHTMYIDYKKAFDSVPHSWLIYILKHYKIHPVIIQFLEKIMPLWNTKLKICNSTESTETDHIPIRRGIFQGDALSPLWFCLALNPLSNMLNKNNIGLKIEHNSEHTTLTHLMYMDDIKLFASTLNEIHALADITQTFSNDIRMEFGIDKCKIQSVIKGSTVPSTYELENQEIIEAIDPNEGYKYLGYYQSKEIHHKDTKKALQKNFRSRLHKVLHTHLNAKNTIKAINTFAIPILTYSFGIIRWSQTDLTTLQRIINTTMTKHRKHHPRACIQRLTLPKNEGGRGLIDITNLHNNQIKLLRTFFFNRSQHSPLHKAICLIDSFTPLYLANHTKHMNIISKEQKIQTWTQKSLHGRHRLDLTNPIVDKIASNAWLKRGELFPETEGFMLAIQDQVIDTKNYRKYIIRDSALGSDHCRHCHRQPETIQHITGACSSITQTDYKHRHDQVAAIIHQALAYKHKLIAEKTPYYKYTPQIILDSPEYKMYWDRTILTDKTIHHNRPDITLHDKKNKLVYLIDIAIPNTHNLSSTHTNKLSKYADLTIELKTQWQVHTVRTVPIIISSTGVIPKTLHTSIKTLDLHPLTYTLLQKAVILNTCRIVRKFLSIE

SEQ ID NO: 26392 - protein, 1240 aa, Carposina sasakii
MNEFIWRNYLILSNLEENPRGFLEQLHKLFIDKFPNIDVSRNRIGDQRRTILNNKLLPQTTLDNIRKEVLTQLNETRRHNNNSDTQTQIQTLPTPTQRMHWSNDLNECIMRHYYRITNLESNITGYRSALHTAFITTYPHLSHITEQRIADQRRTIIYNKLLSAEKLSHIKSDVARDLNTANYELSNSQLIRQNTTINAIDFDTTDTNPLEIILPTVNTSSNNIPVSSFSPEAIAELSNTFNDAYKNFKDIEAVNRPFIPKLRPCRKLALMVQAINYKILPDHITDNTDFTTCQTLIYCAAYTASTFFFKKLYSQNEQDIHRPTTKTPLWQLRLQKRIDQLRVKIGRLTEFMKGNTNSKLKRHVEDILANHKVHSLHEPDNTQLIDFLDTLKQKLNALSSRLRRYKLTTLRKTQNKLFNSNEKYFYRKLTTENNEPSHNTINQLPEANELQEFWSNIWSNPVEHTSNDWIGNENDVINSVTDMTYDKISIDLLKHVISKTHNWKATGSDKIHNFWYKKLTSLHDTLLRHINTFIEQPQSMPSYITYGTTYMIPKDMTDTKNPAKYRPITCLQNIYKITTSCISRLIYQHTNSNNILAEQQKGCRKGSQGCKEQLTIDAVVSVQARRKKRSIYTMFIDYKKAFDSVPHTWLIKILEHYKIHPILINFLKNTMQNWSTVLKLNTSEVSVQTEYITIRRGIFQGDSLSPLWFCLALNPLSHLLNNSGNGYKINYNDTQHKLTHLLYMDDIKLYGSTLEEIYNLADITERFSTDIHMDFGIDKCKLQSINKGKIEHNTYELNNGEQIDAVNDIDGYKYLGYQQTKQIHQKYTKDVLKLKFRSRLHKLLNTHLNSRNTIKAINTYAIPILTYSFGIISWSQTDLTKLQRIISTLMTKYRKHHPRSCIQRLTLPKHEGGRALIDIKNLHNKQITTLRKYFHSQTERSTLHNAIVHADTKYTPLNLKSYDKQANEHITTIQNKIDTWTQKSLHGRHRLDLVNPNIDKVASNEWLKRGELFPETEGFMLSIQDQVIDTKNYQKHIIRSTILTSDLCRHCHNSSETIQHITGACRTITQTDYKHRHDQVAAIIHQYLAYKCQLITEKTAYYKYTPQTVLDSPTFKLYWDRTIITDKTIHCNIPDITLHDKTNKTVYLIDIAIPNTHNLTSTYTQKISKYTDLSIEIKTQWQVNMVKTIPIVLSTTGVIPKTLRTSLDTLNMHLSITYLLQKATILNTCRIVRKFLSNPS

SEQ ID NO: 26393 - protein, 890 aa, Carposina sasakii
MKGNTNTKLKKHVEDILANHKVHSLHEPNNTQLIDFLYTLKQKLNALSSRLRRYKLTTLRKVQNKLFNSNEKQFYRKLTTTENNQLSPNTIHQLPEANELYEFWSNIWSNPVEHTCNNWIDSENDVINSVTDMAFDKVSIDLLKQVISKTHSWKATGSDKIHNFWYKKLTCLHDTLLRHINTFIQQPQSMPSYITHGTTYMIPKDMTDTKNPAKYRPITCLQNIYKITTSCISRLIYQHTNSNNILAEQQKGCRKGSQGCKEQLTIDAVVTAQTRRKKTSIYTMFIDYKKAFDSVPHTWLIKILEYYKIHPILINFLKNTMQNWSTVLKLNTTEESVQTESITIRRGIFQGDSLSPLWFCLALNPLSHLLNNSGNGYKINYNDTQQKLTHLLYMDDIKLYGSTLEEIYNLADITERFSADIHMEFGIDKCKLQSINKGKIEHNTYELNNGEQIDAVNDIDGYKYLGYQQTKQIHHKYTKDVLKQKFRSRLHKILNTHLNSRNTIKAINTFAIPTLTYSFGIISWSQTDLTQLQRIINTLLTKYRKHHPRSCIQRLTLPKHEGGRALIDIKNLHNKQITTLRKYFHSQTERSTLHNAIVHTDTKYTPLNLKSYDKQANEHITTIQNKIDTWTQKSLHGRHRLDLVNPNIDKVASNEWLKRGDLFPETEGFMLSIQDQVIDTKNYQKHIIRSTTLTSDLCRHCHSSSETIQHITGACRTIAQTDYKHRHDQVAVIIHQHLAYKYQLITEKTAYYKYTPQTVLDSSTCKLYWDRTIITDKTIHCNRPDITLHDKTNKTVYVIDIAIPNTHNLTSTYTQKITKYTDLSIEIKTQWQVDTVKTIPIVLSTTGVIPKTLRTSLDTLNIHPSITCLLQKAIILNTCRIVRKFLSNPY

SEQ ID NO: 26394 - protein, 1385 aa, Carposina sasakii
MLRKAKKKNLLPQEGTSAAGESLPEPTSSGSPSYSGGGTSMPIRRYNLRSLAGANRQAASECSRRSSIENTLESASCEIAYPHNISPSSSLSSGRSYRPFTYSSTISTHSSSTSPQSADVAQEAFADNPMPATGSRARIRWTQEMNEFIWRNYLILSNLEENPRGFLEQLHKLFIAKFPKIDVSRNRIGDQRRTILNNKLLPQTTLDNIRKEVLTQLNETRRHNNNSDTQTQIQTLSTPTQRMHWSNDLNECIMRHYYRLTNLESNITGYRSALHTAFITTYPHLSHITEQRIADQRRTIIYNKLLSAEKLSHIKADVARDLNTANYELSNSEETSQNITLNAIEFNTTDTNPIELIHPTVDASSNNISVNLFLPEAIAELRNTFNDAYKNFKDIEAVNRPFIPKLRPCRKLALMVQAINHKILPDHITDSTDFMTCQTLIYCAAYTASTFFFKKLDPQNKQEIHRPTTKIPSWQLRLQKRIDQLRVKIGRLTEFMKGNTNTKLKKHVEDILANHKVHSLHEPNNTQLIDFLDTLKQKLNALSSRLRRYKLTTLRKIQNKLFNCNEKQFYRKLTTTENNQLSPNTIHQLPEANELHKFWSNIWSNPVEHTCNNWIDSENDVINSVTDMAFDKVSIDLLKHVISKTHSWKATGSDKIHNFWYKKLTSLHDTLLRHINTFIQQPQSMPSYITHGTTYMIPKDMTDTKNPAKYRPITCLQNIYKITTSCISRLIYQHTNSNNILAEQQKGCRKGSQGCKEQLTIDAVVTAQTRRKKTSIYTMFIDYKKAFDSVPHTWLIKILEYYKIHPILINFLKNTMQNWSTVLKLNTTEDSVQTESITIRRGIFQGDSLSPLWFCLALNPLSHLLNNSGNGYKINYNDTQQKLTHLLYMDDIKLYGSTLEEIYNLADITERFSADIHMEFGIDKCKLQSINKGKIEHNTYELNNGEQIDAVNDIDGYKYLGYQQTKQIHHKYTKDVLKQKFRSRLHKILNTHLNSRNTIKAINTFAIPTLTYSFGIISWSQTDLTQLQRIINTLLTKYRKHHPRSCIQRLTLPKHEGGRALIDIKNLHNKQITTLRKYFHSQTERSTLHNAIVHADTKYTPLNLKSYDKQANEHITTIQNKIDTWTKKSLHGRHRLDLVNPNIDKVASNEWLKRGELFPETEGFMLSIQNQVIDTKNYQKHIIRSTILTSDLCRHCHNSSETIQHITGACRTITQTDYKHRHDQVAAIIHQHLAYKCQLITEKTAYYKYTPQTVLDSPTFKLYWDRTIITDKTIHCNRPDITLHDKTNKTVYLIDIAIPNTHNLTSTYTQKISKYTDLSIEIKTQWQVNMVKTIPIVLSTTGVIPKTLRTSLDTLNMHLSITYLLQKATILNTCRIVRKFLSNPS

SEQ ID NO: 26395 - protein, 1385 aa, Carposina sasakii
MLRKAKKKNLLPQEGTSAAGESLPEPTSSGSPSYSGGGTSMPIRRYNLRSLAGANRQAASECSRRSSIENTLESASCEIAYPHNISPSSSLSSGRSYRPFTYSSTISTHSSSTSPQSADVAQEAFADNPMPATGSRARIRWTQEMNEFIWRNYLILSNLEENPRGFLEQLHKLFIAKFPKIDVSRNRIGDQRRTILNNKLLPQTTLDNIRKEVLTQLNETRRHNNNSDTQTQIQTLPTPTQRMHWSNDLNECIMRHYYRLTNLESNITGYRSALHTAFITTYPHLSHITEQRIADQRRTIIYNKLLSAEKLSHIKADVARDLNTANYELSNSEETSQNITLNAIEFNTTDTNPIELIHPTVDASSNNISVNLFLPEAIAELRNTFNDAYKNFKDIEAVNRPFIPKLRPCRKLALMVQAINHKILPDHITDSMDFMTCQTLIYCAAYTASTFFFKKLDPQNKQDIHRPTTKIPSWQLRLQKRIDQLRVKIGRLTEFMKGNTNTKLKKHVEDILANHKVHSLHEPNNTRLIDFLDTLKQKLNALSSRLRRYKLTTLRKIQNKLFNCNEKQFYRKLTTTENNQLSPNTIHQLPEANELHKFWSNIWSNPVEHTCNNWIDSENDVINSVTDMAFDKVSIDLLKHVISKTHNWKATGSDKIHNFWYKKLTSLHDTLLRHINTFIQQPQSMPSYITHGTTYMIPKDMTDTKNPAKYRPITCLQNIYKITTSCISRLIYQHTNSNNILAEQQKGCRKGSQGCKEQLTIDAVVTAQTRRKKTSIYTMFIDYKKAFDSVPHTWLIKILEYYKIHPILINFLKNTMQNWSTVLKLNTTEESVQTESITIRRGIFQGDSLSPLWFCLALNPLSHLLNNSGNGYKINYNDTQQKLTHLLYMDDIKLYGSTLEEIYNLADITERFSADIHMEFGIDKCKLQSINKGKIEHNTYELNNGEQIDAVNDIDGYKYLGYQQTKQIHHKYTKDVLKQKFRSRLHKILNTHLNSRNTIKAINTFAIPTLTYSFGIISWSQTDLTQLQRIINTLLTKYRKHHPRSCIQRLTLPKHEGGRALIDIKNLHNKQITTLRKYFHSQTERSTLHNAIVHADTKYTPLNLKSYDKQANEHITTIQNKIDTWTKKSLHGRHRLDLVNPNIDKVASNEWLKRGELFPETEGFMLSIQDQVIDTKNYQKHIIRSTILTSDLCRHCHNSSETIQHITGACRTITQTDYKHRHDQVAAIIHQHLAYKCQLITEKTAYYKYTPQTVLDSPTFKLYWDRTIITDKTIHCNRPDITLHDKTNKTVYLIDIAIPNTHNLTSTYTQKISKYTDLSIEIKTQWQVNMVKTIPIVLSTTGVIPKTLRTGLDTLNMHLSITYLLQKATILNTCRIVRKFLSNPS

SEQ ID NO: 26396 - protein, 1385 aa, Carposina sasakii
MLRKAKKKNLLPQEGTSAAGESLPEPTSSGSPSYSGGGTSMPIRRYNLRSRAGANRQAASECSRRSSIENTLESASCEIAYPHNISPSSSLSSGRSYRPFTYSSTISTHSSSTSPRSADVAQEAFADNPMPATGSRARIRWTQEMNEFIWRNYLILSNLEENPRGFLEQLHKLFIAKFPNIDVSRNRIGDQRRTILNNKLLPQTTLDNIRKEVLTQLNETRRHYNNSDTQTQIQTLPTPTQRMHWSNDLNECIMRHYYRLTNLESNITGYRSALHTAFITTYPHLSHITEQRIADQRRTIIYNKLLSAEKLSHIKADVARDLNTANYELSNSEETSQNITLNAIEFNTTDTNPIELIHPTVDASSNNIPVNLFLPEAIAELRNTFNDAYKNFKDIEAVNRPFIPKLRPCRKLALMVQAINHKILPDHITDSTDFMTCQTLIYCAAYTASTFFFKKLDPQNKQDIHRPTTKIPSWQLRLQKRIGQLRVKIGRLTEFMKGNTNTKLKKHVEDILANHKVHSLHEPNNTQLIDFLDTLKQKLNALSSRLRRYKLTTLRKVQNKLFNSNEKQFYRKLTTTENNQLSPNTIHQLPEANELYEFWSNIWSNPVEHTCNNWIDSENDVINSVTDMAFDKVSIDLLKHVISKTHSWKATGSDKIHNFWYKKLTCLHDTLLRHINTFIQQPQSMPSYITHGTTYMIPKDMTDTKNPAKYRPITCLQNIYKITTSCISRLIYQHTNSNNILAEQQKGCRKGSQGCKEQLTIDAVVTAQTRRKKTSIYTMFIDYKKAFDSVPHTWLIKILEYYKIHPILINFLKNTMQNWSTVLKLNTTEESVQTESITIRRGIFQGDSLSPLWFCLALNPLSHLLNNSGNGYKINYNDTQQKLTHLLYMDDIKLYGSTLEEIYNLADITERFSDDIHMEFGIDKCKLQSINKGKIEHNTYELNNGEQIDAVNDIDGYKYLGYQQTKQIHHKYTKDVLKQKFRSRLHKILNTHLNFRNTIKAINTFAIPTLTYSFGIISWSQTDLTQLQRIINTLLTKYRKHHPRSCIQRLTLPKHEGGRALIDIKNLHNKQITTLRKYFHSQTERSTLHNAIVHTDTKYTPLNLKSYDKQANEHITTIQNKIDTWTQKSLHGRHRLDLVNPNIDKVASNEWLKRGDLFPETEGFMLSIQDQVIDTKNYQKHIIRSTTLTSDLCRHCHSSSETIQHITGACRTIAQTDYKHRHDQVAVIIHQHLAYKYQLITEKTAYYKYTPQTVLDSSTCKLYWDRTIITDKTIHCNRPDITLHDKTNKTVYLIDIAIPNTHNLTSTYTQKITKYTDLSIEIKTQWQVDTVKTIPIVLSTTGVIPKTLRTSLDTLNIHPSITCLLQKAIILNTCRIVRKFLSNPY

SEQ ID NO: 26397 - protein, 1240 aa, Carposina sasakii
MNEFIWRNYLILSNLEENPRGFLEQLHKLFIAKFPNIDVSRNRIGDQRRTILNNKLLPQTTLDNIRKEVLTQLNKTRRHNNNSDTQTQIQTLPTPTQRMHWSNDLNECIMRHYYRLTNLESNITGYRSALHTAFITTYPHLSHITEQRIADQRRTIIYNKLLSAEKLSHIKADVARDLNTANYELSNSEETSQNITLNAIEFNTTDTNPIELIHPTVDASSNNIPVNLFLPEAIAELRNTFNAYKNFKDIEAVNRPFIPKLRQCRKLALMVQAINHKILPDHITDSTDFMTCQTLFYCAAYTASTFFFKKLDPQNKQDIHRPTTKIPSWQLRLQKRICQLRVKIGRLTELMKGNTNTKLKKHVEDILANHKVHSLHEPNNTQLIDFLDTLKQKLNALSSRLRRYKLTTLRKVQNKLFNSNEKQFYMKLTTTENNQLSPNTIHQLPEANELHEFWSNIWSSPVEHTCNNWIDSENDVINSVTDMAFDKVSIDLLKHVISKTHSWKATGSDKIHNFWYKKLTSLHDTLLRHINTFIQQPQSMPSYITHGTTYMIPKDMTDTKNPAKYRPITCLQNIYKITTSCISRLIYQHTNSNNILAEQQKGCRKGSQGCKEQLTIDAVVTAQTRRKKTSIYTMFIDYKKAFDSVPHTWLIKILEYYKIHPILINFLKNTMQNWSTVLKLNTTEESVQTESITIRRGIFQGDSLSPLWFCLALNPLSHLLNNSGNGYKINYNDTQQKLTHLLYMDDIKLYGSTLEEIYNLADITERFSADIHMEFGIDKCKLQSINKGKIEHNTYELNNGEQIDAVNDIDGYKYLGYQQTKQIHHKYTKDVLKQKFRSRLHKILNTHLNSRNTIKAINTFAIPTLTYSFGIISWSQIDLTQLQRIINTLLTKYRKHHPRSCIQRLTLPKHEGGRALIDIKNLHNKQITTLRKYFHSQTERSTLHKAIVHTDTKYTPLNLKSYDKQANEHITTIQNKIDTWTQKSLHGRHRLDLVNPNIDKVASNEWLKRGDLFPESEGFMLSIQDQVIDTKNYQKHIIRSTTLTSDLCRHCHSSSETIQHITGACRTIAQTDYKHRHDQVAAIIHQHLAYKYQLITEKTAYYKYTPQTVLDSSTCKLYWDRTIITDKTIHCNRPDITLHDKTNKTVYLIDIAIPNTHNLASTYTQKITKYTDLSIEIKTQWQVDTVKTIPIVLSTTGVIPKTLRTSLDTLNIHLSITYLLQKAIILNTCRIVRKFLSNPY

SEQ ID NO: 26398 - protein, 1226 aa, Manduca sexta
MNIFIMRHYFILTDLETNTKTYLTPLHARFNAQFPNIEVGKQRVGDQRRAIVQRNFLTKEEIRNIKEEVRNLLSKNQHLSLNTNTDIQHTQSNRIRWTNELNETIMRSYYRLTKLETDLTTYRPLLHQDIVSKCPSISHLSAQRIADQRRSIVNNRLLSTDQLNRIRQEVQNELISDTACTLEDSTQLAQDTSVISTDPIETITIQIDLSPRQTTNSNDQPSLSIELQQQLEEMFWETFHTFKDTHPTNRPYLPKLKPSKRLASIINYLNTDILTKIVTIDTDFKTTHAIIYCAAYTATKFNGVKILDTCNLNSNLDRKPRWQKRLEGRISELRANIGRLTEYIRGVRSTALQKHINKIKEQYKIHSQHETLNNDLSHYLDTLKQKLNVLASRLRRYKETTLRKVQNKHFGNNEKLFYRNPTSPNSSPENNSPLPTPETLHAFWSNIWSNPVEHIENSWITEDRQILKNIPEMEFDNIPIDLLKAVISKTHNWKAPGSDNIHNFWYKKLTSVHSLLLKHINSFINLPYTMPAFITQGVTYMLPKDLSDTENPAKYRPITCLQNIYKIITACLSETIYKYTQEQQILAEEQKGCRKNSQGCKEQLTIDAVVSKQAVIQKLDIHTMYIDYKKAFDSVPHTWLIYILKHYKINPAIISFLEKIMLNWNTKLKICNSGKTTETESISIKRGIFQGDALSPLWFCLALNPLSNMLNKNNFGYKIKHDTHQISLSHLMYMDDIKLFSNTLKDLRTLADIVQTFSHDIHMEFGVDKCKIQSVHKGTIVPASYKLANQEVIDAVDPVEGYKYLGYHQSQELHHKNIKQLLQQNFRTRLHKVLHTHLNARNTIKAINTFAVPILTYSFGVIRWTQTDLKNLQRIINTAMTKHRKHHPRACIQRMTLPKCEGGRGLIDITNLHNKQIMSLRSFFHNRSLHSTLHKAICEVDKYTPLFLADHTKEMPITTKQQKIDIWTQKSLHGRHRHDLTNPNVDKIASNAWLKRGELFPETEGFMQAIQDQVIDTKNYRKHIIRDSSLSSDHCRHCHKHPETIQHITGACSSITQTDYKHRHDQVAAIIHQTLAYKHKLITEKTAYYKYTPQIILESPDYKLYWDRTILTDKTVHHNRPDITLHDKHSKTVYLIDIAIPNTHNLTATHTNKLTKYADLTIELKTQWRVQSVKTVPIVISSTGVIPKTLHTSLKTLNIHPLTFTLMQKAVILNTCRIVRKFLAID

SEQ ID NO: 26399 - protein, 1372 aa, Hemaris fuciformis
MPREGRTLAAFSYTLTNDQRSTSNNPNAMRLRNRTIPQAGTEANCDGESRPEPHSSGCPTYSGEGTVSHKSAQSQTVVGQHDQTRSCSSPTSSLFSSIPSSPPSYLDRLRESSPPSSLSLSPHSVEDVVQAAISAEVTAPAKNGRRKKWTKDMNVFIMRHYFILTDLESNTRQYLAPLHERFSAQYPEMQVGKQRVGDQRRAIIQRKFLSEKEINDIKDDVKKLLHNQSPTDINIHTEYKQSRMRWSTELNEAILRSYYRLTKLETDLTSYRPLLHQQITSEYPSLSHLTAQRISDQRRSIINNQLLTPEHINKILEEVRNELNIHPTDNTTDASVTEHPPPPISLNPIEIETKQRNTSPEHNSTSKLPTHIQQELEVMFSETYNKYLNTEPTSRPNLPKQKPSKKFAVIVNHLNSDILPKFLSTDTDFNTTQAIIYCGAYTAVKFNGGRILDKNTLNNRIQRVPRWQRRLEKRINSLRIDIGRVTEYARGVRSQKLEKHINKIKQKYKIHSQHETQNTDLTHYLDTLKQKLNTLASRLRRYKETTNRKTQNKLFSNNEKLFYRKLSLQQNTPSENSPLPSPEALHSFWSDIWSKPVQHNINQWVEEDKDKLKNIPLMEFDAIHIDLLKAVISKTHNWKSPGSDNIHNFWYKKFSCTHTLLHRHINTFIQSPNTMPHYITQGITYMIPKDLTDTTNPAKYRPITCLQNIYKIITSCLSESIYQHININHILAEEQKGCRKSSQGCKEQLTIDAVASNQAVHQKRSIYTMYIDYKKAFDSVPHSWLIYILEHYKVHPIITSFLQSTMLHWNTRLKICNSNKTTETGFISIKRGIFQGDALSPLWFCLALNPLSYMLHKENIGFTIKNDFQDITLSHLMYMDDIKLFGSTIDHIHTLAGITQTFSSDIHMEFGIDKCAIQSVNQGVVEPTSYNLVNHDDVIDPLDPINGYKYLGFHQSRQIHHKDMKTKLQQNFKTRIHKILHTQLNSRNTIKAINTFAVPILTYSFGIIRWTQTDLKNLQRIINTTLTKHRKHHPRACIQRLILPNDEGGRGLIDITNLHNKQITSLRTFFHTHANQSTLHKAIAESDSYTPLKLADRNKQIKIETNQQKIDTWTQKSLHGRHRLDLINPIVDKIASNAWLKRGELYPETEGFMLAIQDQVIDTKNYRKYIIRDSTLNSDHCRHCHKQPETIQHITGACSFITQTDYKHRHDQVAAIIHQTLAHKHNLIAEKIAYYKYTPQVVLESQDYKLYWDRTILTDKTVHHNRPDITLHDKHNKVVYLVDISVPNTHNLTLTHTNKLSKYTDLSIELKTQWRVQSVKTVPIIISSTGVVPKTLHASLKALKVHPLTYILLQKAVILNTCRIVRKFLSLE

SEQ ID NO: 26400 - protein, 1350 aa, Deilephila porcellus
MRLRNRTLPQAGTGVEHDGEPRPGPSGSGCPTYSGEGTVSHRTAQLQAAAAPRDELSCSSPSSLFSSLPSSPLSFLNKSYDSDSSNSSTTSPLHSVQDVVQEAISAEVTAPVMGGRRTRKTWTKDMNIFIMRHYFIFTDLETNTRQYLTPLHTRFIEQFPDMQVGKQRVGDQRRAIVQRNLLTTQEIFSIKEEVRNLLKNQPPPNVNTCTENTQNGRMRWTVELNEAIMRSYYKVTKLETDLTSYRSQLHQDVISNYPSLSHLTAQRISDQRRSIVNNRLLSSEQLNKIYDEVRCELSTIHTRNNEDTTLPVSHNPTFNNLDRIQITDSHQNQTSRNNTRTNTTLTPELKLQLENMFLEAFNKFRDTQPTSRPYLPKLRPSKKLAAIISHLNSDILPKLLSSDTSFNITQTIIYCGAYAAIKFNGVRILEGNITLHKKPPRVPRWQQRLEERIGSLRVNIGRMTEYARGIRSLTLEKHINKIKQQYNIHSQHETPNTDVTHYLDTLKQKLNTLASRLRRYKETTRRKAENKQFCNSEKLFYRKLTQKHDVSTHNSSLPTPDALQTFWSQIWSNPVQHRNNQWIEDDKQRLNDIPGMDFDQIHIDLLTRVIHKTHNWKTSGSDNIHNFWYKKFTCTHTLLLKHINTFIRSPHTLPQYVTQGTTYMIPKDFSDTANPAKYRPITCLQNIYKIITSCLSESIYEYINKYKILAEEQKGCRKLSQGCKEQLTIDAVASNQALTQKRSIHTMYIDYKKAYDSVPHSWLIYILKHYKIHPLITFFLENTMSNWNTKLKICNDNNTTETEFIPIKRGIFQGDALSPLWFCLALNPLSNMLNNNVLGFKIKHDTQQTNLSHLMYMDDIKLFGSTLDEIHALADITQTFSHDIHMEFGIDKCKIQSINKGIVDTTSSYELINHDVIDSVNPELGYKYLGYNQSRQIHHKDMKAALKQNFRNRLHKILHTHLNARNTIKAINTYAVPILTYSFGVIRWTQTDLKNLQRIINTTMTKYRKHHPRACIQRLTLPKHEGGRGLIDITNLHNKQITTLRTFFHTYSQQSTLHKAISQADTYTPLKLADHTKQLEINTNQQKIDTWIQKSLHGRHRLDLNNPNVDKIASNAWLRRGELFPETEGFMVAIQDQVIDTKNYRKHIIRDSSLISDHCRHCHKQPETIQHITGACSFITQTDYKHRHDQVAAIIHQTLAHKYKLITEKIAYYKYTPQIILDSPDYKLYWDRTILTDKTIHHNRPDITLHDKQNKTVFLIDIAIPNTHNLTPTHTNKLTKYTDLSIELKTQWKVQTVKTIPIIISSTGVIPKTLHTSLKALSIHPLTYILLQKAVILNTCRIVRKFLSIE

SEQ ID NO: 26401 - protein, 1364 aa, Hemaris fuciformis
MPREGRTLAAFSYTLTNDQRSTSNNPNAMRLRNRTIPQAGTEANCDGESRPEPHSSGCPTYSGEGTVSHKSAQSQTVVGQHDQTRSCSSPTSSLFSSIPSSPPSYLDRLRESSPPSSLSLSPHSVEDVVQAAISAEVTAPAKNGRRKKWTKDMNVFIMRHYFILTDLESNTRQYLAPLHERFYTQYPEMQVGKQRVGEKKVGEKEINDIKDDVKKLLHNQSPTDINIHTEYKQSRMRWSTELNEAILRSYYRLTKLETDLTSYRPLLHQQITSEYPSLSHLTAQRISDQRRSIINNQLLTPEHINKILEEVRNELNIHPTDNTTDASVTEHPPPPISLNPIEIETNQRNTSPEHNSTSKLPTHIQQELEVMFSETYNKYLNTEPTSRPNLPKQKPSKKFAVIVNHLNSDILPKFLSTDTDFNTTQAIIYCGAYTAVKFNGGRILDKNTLNNRIQRVPRWQRRLEKRINSLRIDIGRVTEYARGVRSQKLEKHINKIKQKYKIHSQHDTQNTDLTHYLDTLKQKLNTLASRLRRYKETTNRKTQNKLFSNNEKLFYRKLSVQQNTPSENSPLPSPEALHSFWSYIWSKPVQHNINQWVEEDKDKLKNIPLMEFDAIHIDLLKAVISKTHNWKSPGSDNIHNFWYKKFSCTHTLLHRHINTFIQSPNTMPHYITQGITYMIPKDPTDTTNPAKYRPITCLQNIYKIITSCLTESIYQHININHILAEEQKGCRKSSQGCKEQLTIDAVASNQAVHQKRSIYTMYIDYKKAFDSVPHSWLIYILEHYKVHPIITSFLQSTMLHWNTRLKICNSNKTTETGFISIKRGIFQGDALSPLWFCLALNPLSYMLHKENIGFTIKNDFQDITLSHLMYMDDIKLFGSTIDHIHTLAGITQTFSSDIHMEFGIDKCAIQSVNQGVVEATSYNLVNHDDVIDPLDPINGYKYLGFHQSRQIHHKDMKTKFQQNFKTRIHKILHTQLNSRNTIKAINTFAVPILTYSFGIIRWTQTDLKNLQRIINTTLTKHRKHHPRACIQRLILPNDEGGRGLIDITNLHNKQITSLRTFFHTHANQSTLHKAIVESDSYTPLKLADRNKQIKIETNQQKIDTWTQKSLHGRHRLDLINPIVDKIASNAWLKRGELYPETEGFMLAIQDQVIDTKNYRKYIIRDSTLNSDHCRHCHKQPETIQHITGACSFITQTDYKHRHDQVAAIIHQTLAHKHNLIAEKIAYYKYTPQVVLESQDYKLYWDRTILTDKTVHHNRPDITLHDKHNKVVYLVDISVPNTHNLTLTHTNKLSKYTDLSIELKTQWRVQSVKTVPIIISSTGVVPKTLHASLKALKIHPLTYILLQKAVILNTCRIVRKFLSLE

SEQ ID NO: 26402 - protein, 1373 aa, Hemaris fuciformis
MPREGRTLAAFSYTLTNDQRSTSNNLNAMRLRNRTIPQAGTEANCDGESRPGPHSPGCPTYSGEGTVSHKSAQSPEAVADQHDQPRPCSSPTSSLFSSIPSSPPPYLDRLREPSSPSSLSLSPHSVEDVVQEAISAEVTAPAKNGRRKKWTKDMNVFIMRHYFILTDLESNTKQYLAPLHERFSAQYPEMQVGKQRVGDQRRAIIQRKFLSEKEINDIKEDVRNLLRNQSPTDFNTHREYKQSRMRWSTELNEAILRSYYKLTKLETDLTSYRPLLHQHIISEYPSLSHLTAQRISDQRRSIINNQLLSPEHINKILEEVRNELNIHSANSTTDASVTEHSPPPISSNPTEIDTNPQNTSPEHNSTSKLPTHLQQELEDMFSEIFNKYRNTEPTSRSNLPKQKPSKKFAMIVNHLNSDILPKYLSTDTDFNTTQAIIYCGAYTAVKFNGGRIQEKNTLNNRTMRVPRWQKRLEERINSLRIDIGRVTEYVRGVRSQKLEKHINKIKQKYKIHSQHETQNTDITHYLDTLKQKLNTLASRLRRYKETTKRKTQNKLFSNNEKLFYRKLSLQQNTSSENTPLPSPEALHSFWSDIWSKPVQHNINQWVEEDKDKLKNIPLMEFDAIHIDLLKAVISKTHNWKSPGSDNIHNFWYKKFSCTHTLLHRHINTFIQSPNTMPLYITQGITYMIPKDLTDTTNPAKYRPITCLTNIYKIITSCLSESIYQHININHILAEEQKGCRKSSQGCKEQLTIDAVASNQAVHQKRSIYTMYIDYKKAFDSVPHSWLIYILEHYKVHPIITSFLQSTMLHWNTRLKICNSNKTTETGFISIKRGIFQGDALSPLWFCLALNPLSYMLHKENIGFTIKNDFQDITLSHLMYMDDIKLFGSTIDHIHTLAGITQTFSSDIHMEFGIDKCAIQSVNQGVVEPTSYNLVNHDDVIDPLDPINGYKYLGFHQSRQIHHKDMKTKLQQNFKTRIHKILHTQLNSRNTIKAINTFAVPILTYSFGIIRWTQTDLKNLQRIINTTLTKHRKHHPRACIQRLILPNDEGGRGLIDITNLHNKQITSLRTFFHTNANQSTLHKAIVEADSYTPLKLADRNKQIKIETNQQKIDTWTQKSLHGRHRLDLINPIVDKIASNAWLKRGELYPETEGFMLAIQDQVIDTKNYRKYIIRDSTLNSDHCRHCHKQPETIQHITGACSFITQTDYKHRHDQVAAIIHQTLAHKHNLIAEKIAYYKYTPQVVLESQDYKLYWDRTILTDKTVHHNRPDITLHDKHNKVVYLVDISVPNTHNLTLTHTNKLSKYTDLSIELKTQWRVQSVKTVPIIISSTGVVPKTLHTSLKALKIHPLTYILLQKAVILNTCRIVRKFLSLE

SEQ ID NO: 26403 - protein, 1373 aa, Hemaris fuciformis
MPREGRTLAAFSYTLTNDQRSTSNNLNAMRLRNRTIPQAGTEANCDGESRPGPHSPGCPTYSGEGTVSHKSAQSPEAVADQHDQPRPCSSPTSSLFSSIPSSPPSYLDRLREPSSPSSLSLSPHSVEDVVQEAISAEVTAPAKNGRRKKWTKDMNVFIMRHYFILTDLESNTKQYLAPLHERFSAQYPEMQVGKQRVGDQRRAIIQRKFLSEKEINDIKEDVKNLLRNQSPTDFNTHREYKQSRMRWSTELNEAILRSYYKLTKLETDLTSYRPLLHQHIISEYPSLSHLTAQRISDQRRSIINNQLLSPEHINKILEEVRNELNTHSANSTTDASVTEHSPPPISSNPIEIDTNPQNTSPEHNSTSKLPTHLQQELEDMFSEIFNKYRNTEPTSRSNLPKQKPSKKFAMIVNHLNSDILPKYLSTDTDFNTTQAIIYCGAYTAVKFNGGRIQDKNTLNNRTKRVPRWQKRLEERINSLRIDIGRVTEYVRGVRSQKLEKHINKIKQKYKIHSQHETQNTDITHYLDTLKQKLNTLASRLRRYKETTNRKTQNKLFSNNENFFYRKLSLQQNTPSENSPLPSPEALHSFWSDIWSKPVQHNINQWVEEDKDKLKNIPLMEFDAIHIDLLKAVISKTHNWKSPGSDNIHNFWYKKFSCTHTLLHRHINTFIQSPNTMPHYITQGITYMIPKDLTDTTNPAKYRPITCLQNIYKIITSCLSESIYQHININHILAEEQKGCRKSSQGCKEQLTIDAVASNQAVHQKRSIYTMYIDYKKAFDSVPHSWLIYILEHYKVHPIITSFLQSTMLHWNTRLKICNSNKTTETGFISIKRGIFQGDALSPLWFCLALNPLSYMLHKENIGFTIKNDFQDITLSHLMYMDDIKLFGSTIDHIHTLAGITQTFSSDIHMEFGIDKCAIQSVNQGVVEPTSYNLVNHDDVIDPLDPINGYKYLGFHQSRQIHHKDMKTKLQQNFKTRIHKILHTQLNSRNTIKAINTFAVPILTYSFGIIRWTQTDLKNLQRIINTTLTKHRKHHPPSCIQRLILPNDEGGRGLIDITNLHNKQITSLRTFFHTHANQSTLHKAIVEADSYAPLKLADRNKQIKIETNQQKIDTWTQKSLHGRHRLDLINPIVDKIASNAWLKRGELYPETEGFMLAIQDQVIDTKNYRKYIIRDSTLNSDHCRHCHKQPETIQHITGACSFITQTDYKHRHDQVAAIIHQTLAHKHNLIAEKIAYYKYTPQVVLESQDYKLYWDRTILTDKTVHHNRPDITLHDKHNKVVYLVDISVPNTHNLTLTHTNKLSKYTDLSIELKTQWRVQTVKTVPIIISSTGVVPKTLHASLKALKIHPLTYILLQKAVILNTCRIVRKFLSLE

SEQ ID NO: 26404 - protein, 1372 aa, Hemaris fuciformis
MPREGRTLAAFSYTLTNDQRSTSNNPNAMRLRNRTIPQAGTEANCDGESRPEPHSSGCPTYSGEGTVSHKSAQSQTVVGQHDQTRSCSSPTSSLFSSIPSSPPSYLDRLRESSPPSSLSLSPHSVEDVVQAAISAEVTAPAKNGRRKKWTKDMNVFIMRHYFILTDLESNTRQYLAPLHERFSAQYPEMQVGKQRVGDQRRAIIQRKFLSEKEINDIKDDVKKLLYNQSPTDINIHTEYKQSRMRWSTELNEAILRSYYRLTKLETDLTSYRPLLHQQITSEYPSLSHLTAQRISDQRRSIINNQLLTPEHINKILEEVRNELNIHPTDNTTDASVTEHPPPPISLNPIEIETNQRKTSLEHNSTTKLPTHIQQELEIMFSETYNKYLNTEPTSRPNLPKQKPSKKFAVIVNHLNSDILPKFLSTDTDFNTTQAIIYCGAYTAVKFNGGRILDKNTLNNRIQRVPRWQRRLEKRINSLRIDIGRVTEYARGVRSQKLEKHINKIKQKYKIHSQHETQNTDLTHYLDTLKQKLNTLASRLRRYKETTNRKTQNKLFSNNEKLFYRKLSVQQNTPSENSPLPSPEALHSFWSDIWSKPVQHNINQWVEEDKDKLKNIPLMEFDAIHIDLLKAVISKTHNWKSPGSDNIHNFWYKKFSCTHTLLHRHINTFIQSPNTMPHYITQGITYMIPKDPTDTTNPAKYRPITCLQNIYKIITSCLSESIYQHININHFLAEEQKGCRKSSQGCKEQLTIDAVASNQAVHQKRSIYTMYIDYKKAFDSVPHSWLIYILEHYKVHPIITSFLQSTMLHWNTRLKICNSNKTTETGFISIKRGIFQGDALSPLWFCLALNPLSYMLHKENIGFTIKNDFQDITLSHLMYMDDIKLFGSTIDHIHTLAGITQTFSSDIHMEFGIDKCAIQSVNQGVVEPTSYNLVNHDDVIDPLDPINGYKYLGFHQSRQIHHKDMKTKLQQNFKTRIHKILHTQLNSRNTIKAINTFAVPILTYSFGIIRWTQTDLKNLQRIINTTLTKHRKHHPRACIQRLILPNDEGGRGLIDITNLHNKQITSLRTFFHTHANQSTLHKAIVESDSYTPLKLADRNKQIKIETNQQKIDTWTQKSLHGRHRLDLINPIVDKIASNAWLKRGELYPETEGFMLAIQDQVIDTKNYRKYIIRDSTLNSDHCRHCHKQPETIQHITGACSFITQTDYKHRHDQVAAIIHQTLAHKHNLIAEKIAYYKYTPQVVLESQDYKLYWDRTILTDKTVHHNRPDITLHDKHNKVVYLVDISVPNTHNLTLTHTNKLSKYTDLSIELKTQWRVQSVKTVPIIISSTGVVPKTLHASLKALKIHPLTYILLQKAVILNTCRIVRKFLSLE

SEQ ID NO: 26405 - protein, 1287 aa, Azonax typhaon
MVDYATSTISSPSNSVSQFSLSSSNTSYLSDNVVQEADADSLAPVTDKKRARKKWSKEMNVFIWRAYLKITQLESSVRGYLEELYVQFHHKFPHMDASKQRVGDQRRAIVRNKLLPQTLLDEIREEVRLELNNTNQPQTGTTNTQTNPTDRRRMTWTTQMNEAIVRIYLEVTELDTNLTTYRKKLYDKFIETFPHLSHITEQRIADQKRIIINNKMLLDTRIEEIRQEVELKLKRHNINTYTETHQHDQIEHPNNTDNTQNTTQKRLTLTHSEPAKIAIPENEKHRIDSLFSEALGTFKNTQPTLRPLLPKQKVTKKLIKAVQYLNLTLIPKYIFEDIDFETVQLVIYCAAYSAVIYCGGRVDCQQNKITHNDKIPAWQINLQKRIEQLRVHIGRLTEYKNGVRNKALDKKVANIKRRYRIHSLHENPNTDISQFLDTLKQKLNALANRLRRYKKTTLRKTQNRIFQNNEKIFYRSLTQPINNSHSSLANTTSPSKEDFTTFWSKLWSDTVEHNESEWIREDKDRLTNLPDMHFDNISLALLKRVIDRTHNWKATGSDKIHNYWYKKFTSIHPILHIHINNFIKSPNTIPHYITQGITYMIPKDTTAINNPAKYRPITCLQNIYKIITSCISELIYTHAEQNNILAEEQKGCRKNTQGCKEQLIIDSVILKQAYNKKRNIYTMYVDYQKAFDSVPHSWLLYVLKHYNINPIIISFLKSVMLNWKTQLKIHSNTGTIETDLIKIKRGIFQGDALSPLWFCLALNPLSNLLNNSQKGFIIKHNNVQHTISHLMYMDDIKLFGSSLNQLNTLANITEKFSNDIHMQFGVDKCKIQSVHKGAIECNSYTLNNEEIINPVDQVIGYKYLGYQQSQQIHQKQTKTTLTEHFKSRLHKILNTQLNARNTIKAINTFAIPILTYSFGIIQWTQTDIKKLQRLINTTMTKYRKHHPRSCTERLSLSRQEGGRSLIDIQNLHNRQITTLRTYFHNRALHSHIHRATVRADTKLTPLNLGDNTIDLPQKTIEQKINTWTQKSLHGRHRSDLTNVSIDKNASNAWLKRGELFPETEAFMIAIQDQVIDTRNYRKHIIKDSSLGTDLCRHCHSSSETIQHITGACRSIVQTDYKHRHDQVAAIIHQYLGLKHKLITEKTNYYKYTPAATLENKLFKLYWDRTILTDKTVHHNRPDITLHDKINKTVYLIDIAIPNTHNLKTAFTEKLTKYTDLSIELKAQWKVNTVRTIPIIISSTGIVPKTLHISLKTLQIHPLTFLTIQKAVILNTCRIVRKFLSIDP

SEQ ID NO: 26406 - protein, 1249 aa, Oechydrus chersis
MNTFIMRTYYLVTNLEKDTSQYLPLLHTQFQERYPDLHVSRQRLGDQRRAITQRGLLSKNKLQTIKDEVKTHLENPAVEPTSTTFNLTLTSGSRKRWTNEENETIIKKYYTLTNLESNRTAYRKQLYQEVIKEHPHLSVFSEQRISDQLRVIRNNRMISEERLLQIRDEITINLQASTLAKVLSQQNYEEPYTQIDNTQTYSDPPTIFDNCQLSNCPQIMRPDVEKNNYQQESKTNSLIDTLTPGNISEIEQCFLHTYERFKGTCPTNRPSIPKQRPSRNLAKIVTYINRKILPKHLTTDSDFQTLQTSIYCAAYTAATQNGSKINEQPGTSNKQTMPRWQKRLQDRIDDLRVKIGRLTEYIRGTRSERLERQVKLIKSHYKLHSKHENENTDLKQFLDTLKQKLSALSSRLRRYKMTSLRIIQNKQFNNNEKSFYRTFGQSTQTSQTTNLEPPDPKTLHEFWSNIWSKSIQHNESAHWIAIDKQSQTDTTDMKFENITIDLLDKVIAKTHNWKATGSDNLHNYWYKRFTTIYPMLLIHINKFIHSPDTVPQYITQGITYMLPKDPADTKNPAKYRPITCLQSIYKIITSCLSELIYTHVESNNILAEQQKGCRKGSQGCKEQLIIDAVVSKQALTRKRNIYTMYVDYKKAFDSVPHSWLMAVLEHYKINPTLITFLEKIMSQWSTNLKVNNITSTIETDSINIRRGIFQGDSLSPLWFCLALNPLSNLLNRSEKGFKIKYNNTHHLLTHLMYIDDIKLYSSNLEELHHLAEITETFSTDIKMEFGIDKCRTQSVHRGNLEENTYLMQNGDAIEPVDSFEGYKYLGYYQTKQIHQRETKTVLINKFRTRLHKILNTYLNSRNTIKAINGFSIPILTYSFGIINWSKTDLHKLQRMINTLMTQYRKHHPRSCTQRLTLPRHEGGRGIIDIQNLHNRQITTLRSFFHTRSQHSTLHKAIAQADHKLTPLNLNDITTQNNEIITQPQQKIETWLQKSLHGRHRMDLINPNVDKAASNAWLKRGELFPETEGFLIAIQDQTIDTRNYRKHIIKDRSRTTDICRHCHSNSETIQHITGACKSIAQTDYKHRHDQVAAIVHQDLALKHKLIKEKLPYYKYKPQTVIDTTDYKLYWDRTIITDKTIHHNRPDITLHDKKNEIVYLIDIAIPNTHNLASTHTDKITKYTDLSIELKTQWKVRTVKTVPIIVSATGIIPRTLHSSLQLLDIHPLTYTLLQKAVILNTCRLTRKFLSLD

SEQ ID NO: 26407 - protein, 1252 aa, Oechydrus chersis
MNTFIMRTYYLVTNLEKDTSQYLPLLHTQFQERYPDLQVSRQRLGDQRRAIIQRGLLSKNKLEKIKDEVKTYLESQAVDMPNTFNLTLTSGRRKRWTNEENEAIIKKYYTLTNLESNRTAYRKQLYQDVIAEHPHLSVFSEQRISDQLRVIINNRMISEERLQQIRDEIKNNLQTSTLGNVISQQNYEEPYTQIDDTQTYSDSPLINDNSQLSNCSQIMRLDIAENNCPQKSNSSATINSLTNTLTPGSISEIEQCFLHTYERFKGTCPTNRPSIPKQRPSRNLAKIVTYINSKILPKHLPTDSDFQTLQTVIYCAAYTAATQNGSKIYEQSGTSSYKQSIPRWQKRLQDRIDDLRVKIGRLTEYIRGTRSERLERQVKLIKTHYKLHSKHENENTDLKQFLDTLKQKLSALSSRLRRYKTTTLRINQNKQFNNNEKRFYRTFGQCTQIPQTTNLEPPDPQCLHEFWSNIWSNSIQHNESAPWISLDKQSQTDTTDMEFDNITIDLLSKVIAKTHNWKATGSDNIHNYWYKRFTAIYPMLLIHINKFIRSPERVPQYITQGITYMLPKDPSDTKNPAKYRPITCLQSIYKIITSCLSELIYSHVESNNILAEQQKGCRKGSQGCKEQLIIDAVVSKQALTRKRNIYTMYVDYKKAFDSVPHSWLMAVLEHYKINPTLISFLKKIMSQWTTNLKINNITHSIETDSINIRRGIFQGDSLSPLWFCLALNPLSNLLNRSEKGFKIKYNNTYHLLTHLMYMDDIKLYSSNLEGLHHLAEITETFSTDIKMEFGIDKCRTQSVNRGNLQENTYLMQNGDAIEPVDRFEGYKYLGYYQTKQIHQKETKTVLLNKFKTRLHKILNTYLNSRNTIKAINGFSIPILTYSFGIINWSKTDLHKLQRTINTLMTQYRKHHPRSCTQRLTLPRHEGGRGIIDIQNLHNRQITTLRSFFHTRSQHSSLHKAIAQADHKLTPLNLNDMTTQNNEFITQPQQKIETWLQKTLHGRHRMDLINPNVDKAASNAWLTRGELFPETEGFLIAIQDQTIDTRNYRKHIIKDSRTTDICRHCHSNSETIQHITGACKSIAQTDYKHRHDQVAAIVHQDLALKHQLIKEKVPYYKYKPQTVIDTTDYKLYWDRTIITDKTIHHNRPDITFHDKKKEIVYLIDVAIPNTHNLASTHTDKITKYTDLSIELKTQWKVRTVKTVPIIVSATGIIPHTLHNSLQLLNIHPLTYTLLQKAVILNTCRLTRKFLSLD

SEQ ID NO: 26408 - protein, 1401 aa, Nerula fibrena
MTNGALVNNYAMRLRSRTIPQAGTDAERVGESRPEPAGEGCPTYSGGGTVSHQLAQVTPAASHNDSQLVKTYSEVTSSTSSTHSLDHSPSSSPQSFERRSRVFARSRSSTVSIASNESSGVVQKARAILSAPVANQTRPKKRMRWSEDINTFIMRTYYLITNLEKDTSQYLPILHTQFQEKYPDLQVNRQRLGDQRRAITQRGLLSKNKLEEIKDEVKTHLDSSAVDTSTSINVTQTSGKRKKWTNEENETIIRKYYTLTNLESNKTAYRKQLYQEVTTEHPHLSVFSEQRISDQLRVIINHRMISEERLQQIRDEIINNLQTSTPEKVLSESSSPENCEEPYTPIDSTQTYPASPLVFDNSQLSNCSRIIPLDAKENDCPQESNSNSLTDTFTPGSISEIEQCFLQTYGRFKNTFPTNRPSIPKQRPSRNLAKIVTYINSKILPKHLLTDSDFQTLQTIIYCAAYTAATQNGSKISEQPGTNTYKQTMPRWQTRLQDRIDDLRAKIGRLTEYIRGIRSKRLERQIKLIKSHYKLHSKHENENTDLNQFLDTLKQKLSALSSRLRRYKTTTLRINQNKQFNNNEKSFYRTFGQSTQTLQTTNPELPDPQNLHEFWSNIWSNPIQHNKSASWIAIDKQSQTDTRDMKFENITMDLLERVIAKTHNWKATGSDNLHNYWYKKFTSIHPILLIHINKFVHSPDTVPQYITQGITYMLPKDPSDIKNPAKYRPITCLQSIYKIITSCLSELIYSHVESNNILAEQQKGCRKGSQGCKEQLIIDAVVSKQALTRKRNIYTMYVDYKKAFDSVPHSWLVLVLKHYKINPTLVSFLEKMMSQWTTNLKINNITCAIETDAINIRRGIFQGDSLSPLWFCLALNPLSNLLNRSEKGFKIKYNNTNHLLTHLMYMDDIKLYSSNLEELHHLAEITETFSSDIKMDFGIDKCRTQSIHRGILEENTYLMQNGDAIEPVDNFEGYKYLGYYQTKQIHQRETKIVLINKFKSRLHKILNTYLNSRNTIKAINGFSIPILTYSFGIINWSKTDLHKLQRTINTLMTQYRKHHPRSCTQRLTLPRHEGGRGIIDIQNLHNRQITTLRSFFHTRSQHSSLHKAIAQADHKLTPLNLNDITTQNNEYITQPQQKIDTWLQKSLHGRHRMDLTNPNVDKEASNAWLKRGELFPETEGFLIAIQDQTIDTRNYRKYIIKDRNLTTDTCRHCYSNSETIQHITGACKSIAQTDYKHRHDQVAAIVHQDLALKHQLIKEKVPYYKYKPQTVIDTTDYKLYWDRTIITDKTIHHNRPDITLHDKKNEIVYLIDIAIPNTHNLASTYTDKITKYTDLSIELKTQWKVRTVKTVPIIVSTTGIIPRTLHNSLQLLNIHPLTYTLLQKAVILNTCRLTRKFLSLD

SEQ ID NO: 26409 - protein, 755 aa, Typhedanus ampyx
MPFDNISLDLLKFCIAKTHNWKATGSDKIHNYWYKKFTSIHSLLHTHINKFIKSPNTMPQYITKGTTYMLPKDQNDTRNPAKYRPITCLQNIYKIITSCISELIYRHAETNKIIAEQQKGCRKNSQGCKEQLTIDAVASKQALMKKRNIYTMYIDYQKAYDSVPHTWLIHILKHYKINPILINFLKSTMLNWNTVLKLNNLETETIKIRRGIFQGDALSPLWFCLALNPLSNLLDSSNKGFKVKYNGTHHTLTHLMYMDDIKLYGTNLKEIHELADITQTFSSDIHMQFGIDKCKIQSIRRGKVEQNAYQLNNGEQIDPVDINTGYKYLGYQQTRQIHHKETKTTLTQHFKSRLHKILNTHLNARNTIKAINTYAIPVLTYSFGIIKWSQTDLLKHQRTINTLMTKYRQHHPRSCTQRLTLPRNEGGRGLIDIQNLHNKQIKSLRTFFHTRAQHSPLHKSITHADEKLTPLNLKEHSSLPNEKIVQPQQKLETWLQKTLHGRHRRDLINPNVDKSASNSWLKQGEVFPETEGFMIAIQDQIIDTRNYRKFIIRDNTLQSDSCRHCHSSSETIQHITGACRSITQTDYKHRHDQVAAIIHQYLAFKHKLITEKTSYYKYKPEIVLDSTNYKLYWDRTIITDKTIHHNRPDITLHDKRNRTVYLIDIAVPNTHNLSSTHTDKLTKYTDLSIELKTQWKVQTVKTIPIIISSTGVILHTLHTSLKLLNIHPLTYKLLQKAVILNTCRIVRKFLSIDQT

SEQ ID NO: 26410 - protein, 1010 aa, Pammene fasciana
MQVEIEQAFLAALERFHNSDPTTRPSIPRQRPSRKFTSIVHFINNVIFPKYLPLDSNFNKTQNTLYCAAFAAVTQNGCKITTDSHNIHRHNVQTPTWQKRLQDRITELRAKIGRLTEFINGNPSPRLLRHVEAIKRQYKIHSRHEHENTHLPHFLDTLKQKLSALTSRLRRYKLTTLRKTQNKQFNNNEKVFYRNLENSNTHASEQNSTDESISPTAEDLHHFWSDIWSKPIEHRNAEWIDADKDSLNSVPNMAFDEISIDLLKSVIGNTHNWKAPGSDKIHNYWLKKFTYLHPILLRQINEFIVTPETLPQYVTQGLTYMLIKDKSDRTNPAKYRPITCLQTIYKVITSCISKLIYRHVESHNILAEQQKGCRQNSQGCKEQLTIDAVISKQAKSNKKDIYTLYIDYKKPFDSVPHTWLIHILKHYKIHNSIILFLEKSMLHWSTILKIFSNTTSVQTEPNNIRRGIFQGDALSPLWFCLAINPLSDLLNNSKFGFEVDSGNSSHTISHLMYMDDIKLYGKYLNDIHNLADITQSFSSDIHMEFGIDKCKIQSVRKGKIEHNSYTLNNGQQIDPVDDETGYKYLGYQQTQQIHHKATKTSLTQKFTGRLHKILNTHLNARNTIKAINTYAVPILTYSFGIIQWSQTDLCNLQRIINTLMTKYRKHHPRSCIQRLTLPKSEGGRGLIDIKNLHNKQVSSLRKFFHSRSLRSTMHQAVVNADKKYTPLNLNDRTKQKSEAILDAQHKQHAWIQKSLHGRHRLDLTNPNVDKLASNMWLKRGELFPETEGFIIAIQDQIIDTRNYRKYIIRDRNLQTDLCRRCHSASETIQHITGACRSITQTDYKHRHDQVAAIIHQYLAFKYHLINNRTPYYKYTPQIILESANYKLYWDRTIITDKTMHYNRPDITLHDKAAKTVYLIDVAIPNTHNLASTHTEKISKYTDLSIEIKTQWRVNTVKTIPLIISSTGVIPRTLHASVKSLDIHPLTYILLQKAVIMNTCRIVRKFLALEQ

SEQ ID NO: 26411 - protein, 1418 aa, Pammene fasciana
MKLRSRTLRPGPLPEGNRRGASGAVAGCHSMRSNGDAELSRRAPIEESVTAAVGPLPEGDRRGAPGAAAGCHSMRTSGDVELSRRASIEEFTTAENHPIRESSPIPSCPSSPSSSASLFSSIPSSPASYLTLSGSENTSTCTSPSNLIHTTEDVVQEASTANQPAPATVRQKVRKRWSQDMNIFILRTYFRITALETETRKYLTQLHAEFSEKFPAFEVSKQRLGDQRRAIVSNKLLSDIEIANIKKLAEDDLKDSSRPSQQTHTQNSNQRMTWSNEINESIMREYYRITQLETNVTAYRKPLHQAIISKHPQLSHVSEQRIADQRRVIINNKYLSEQRLQEIRAEISLGLALDCDNLVTINNVSPSPVTELLPTDPSETTYNELPATENSIGNPSNDEIPHCPLPIEMQVEIEQAFLAALERFHNSDPTTRPSIPRQRPSRKFTSIVHFINNVIFPKYLPLDSNFNKTQNTLYCAAFAAVTQNGCKITTDSHNIHRHNVQTPTWQKRLQDRITELRAKIGRLTEFINGNPSPRLLRHVEAIKRQYKIHSRHEHENTHLPHFLDTLKQKLSALTSRLRRYKLTTLRKTQNKQFNNNEKVFYRNLENSNTHASEQNSTDESISPTAEDLHHFWSDIWSKPIEHRNAEWIEADKDSLNSVPDMAFDEISIDLLKSVIGNTHNWKAPGSDKIHNYWLKKFTYLHPILLRQINEFIVTPETLPQYVTQGVTYMLIKDKSDRTNPAKYRPITCLQTIYKVITSCISKLIYRHVESHNILAEQQKGCRQNSQGCKEQLTIDAVISKQAKSNKKDIYTLYIDYKKAFDSVPHTWLIHILKHYKIHNSIILFLEKSMLHWSTILKIFSNTTSVQTEPINIRRGIFQGDALSPLWFCLAINPLSNLLNNSKFGFEVDSGNSSHTISHLMYMDDIKLYGKYLNDIHNLADITQSFSSDIHMEFGIDKCKIQSVRKGKIEHNSYTLNNGQQIDPVDDETGYKYLGYQQTQQIHHKATKTSLTQKFTGRLHKILNTHLNARNTIKAINTYAVPILTYSFGIIQWSQTDLCNLQRIINTLMTKYRKHHPRSCIQRLTLPKSEGGRGLIDIKNLHNKQVSSLRKFFHSRSLRSTMHQAVVNADKKYTPLNLNDRTKQKSEAILDAQHKQHAWIQKSLHGRHRLDLTNPNVDKLASNMWLKRGELFPETEGFIIAIQDQIIDTRNYRKYIIRDRNLQTDLCRRCHSASETIQHITGACRSITQTDYKHRHDQVAAIIHQYLAFKYHLINNRTPYYKYTPQIILESANYKLYWDRTIITDKTIHYNRPDITLHDKAAKTVYLIDVAIPNTHNLASTHTEKISKYTDLSIEIKTQWRVNTVKTIPLIISSTGVIPRTLHASLKSLDIHPLTYILLQKAVIMNTCRIVRKFLALEQ

SEQ ID NO: 26412 - protein, 1354 aa, Laothoe populi
MRLRNRTIPQAGTRANGDGESRPGPPSPGCPAYSGEGAVSQQPAQLHTVADQHDPPSSSCTSPTSLFSSIPSSPPSYLETVFESHSSCSSPTSSVQSSLDVVQEAISAYGTAPTKVGRRTRMTWTKEMNIFIMRHYFILTNLESNTKVYLTPLHSRFTAQFPNMQAGKQRVGDQRRAIVQRNFLSKQEIRNIKEEVRALLLQNPSPSDTNTIIEQTQCRRMRWTDSLNETIMRSYYKLTKLETDLTTYRPILHQDIISKCPSIAHLSAQRISDQRRSIVNNRLLSSERLNRIREEVQKELESVRIELPEDVNQPALVNPLPLTTKQIQTTTNHENFTLRQATHTNSTPNLSTELQNRLKQMFIETFNKFNDTYPTARPYLPKLKPSKKLASIIAYLNSDIVPNMLTPDSEFSMTQTVIYCAAYAAIKFNGTQIVEQSRFISKPRGKPRWQSRLEEKIDSLRVNIGRLTEYTRGNRSKALQKHINKIKEQYKIHAQHEAGNTDVTHYLDTLKQKLNTLASRLRRYKETTNRKRQNNEFCNNEKLFYRKLTQNEKYSSEHNAPLPTSESLQTFWSNIWSNPVKHKENQWIEEDKQKFKELPEMEFQQIHIDLLKAVISKTHNWKAAGSDNIHNFWYKKLTCTHSLLLKHINTFIHSPNLMPHYITQGITYMLPKDLTDSANPAKYRPITCLQNIYKIITSCLSKIIYKHTDEHNILAEEQKGCRKNSQGCKEQLTIDAVSSEQAVRQKRSIHTMYIDYKKAFDSVPHSWLIYILKHYKIHPAITSFLEKTMLNWSTKLRICKSDSTTETELIPIKRGIFQGDALSPLWFCLALNPLSNMLNKNNPGYKIKYDIHQISLSHLMYMDDIKLFGSTISELHTLANTVQTFSNDIHMEFGVDKCKIQSTHNGIVVPATYELTNHDVIDTVDPVEGYKYLGYYQSQQIHHKDTKLLLQQNFKTRLHRILHTHLNARNTIKAINTFAVPILTYSFGIIRWTQTDLNNLQRMINTTMTKHRKHHPRSCIQRLTLPKDEGGRGLIDITNLHNKQLTALRTFFQNCSLNSTLHKAVCQADKYTPLFLSDNTKQSKITTNQQKIDIWTQKTLHGRHRHDLTSSNVDKIASNAWLKRGELFPETEGFMQAIQDQVIDIKNYRKYIIRDSSLSSDHCRHCHKHPETIQHITGACSSITQTDYKHRHDQVAAIIHQTLAFKHQLITEKTAYYKYTPKIILESSDYKLYWDRTLLTDKTVHHNRPDITLYDKHNKTVYLIDIAIPNTHNLTTTHTNKLSKYADLTIELKTQWRVQTIKTIPIIISSTGVIPKTLHTSLKTLNIHPLTFTLLQKAVILNTCRIVRKFLSIE

SEQ ID NO: 26413 - protein, 1354 aa, Laothoe populi
MRLRNRTIPQAGTRANGDGESRPGPPSPGCPAYSGEGAVSQQPAQLHTVADQHDPPSSSCTSPTSLFSSIPSSPPSYLETVFESHSSCSSPTSSVQSSLDVVQEAISAYGTAPTKVGRRTRMTWTKEMNIFIMRHYFILTNLESNTKMYLTPLHSRFTAQFPNMQAGKQRVGDQRRAIVQRNFLSKQEIRNIKEEVRALLLQNPSPSDTNTIIEQTQCRRMRWTDNLNETIMRSYYKLTKLETDLTTYRPILHQDIISKCPSIAHLSAQRISDQRRSIVNNRLLSSERLNRIREEVQKELESVRIELPEDVNQHALVNPLPLTTKQIQTTTNHENFTLRQATHTNSTPNLSTELQNQLKQMFIETFNKFNDTYPTARPYLPKLKPSKKLTSIIAYLNSDIVPNMLTPDSEFSMTQTVIYCAAYAAIKFNGTQIVEQSRFISKPRGKPRWQSRLEEKIDSLRVNIGRLTEYTRGNRSKALQKHINKIKEQYKIHAQHEAENTDVTHYLDTLKQKLNTLASRLRRYKETTNRKRQNNEFCNNEKLFYRKLTQNEKYSSEQNAPLPTSESLQTFWSNIWSNPVKHKENQWIEEDKQKFKELPEMEFQKIHIDLLKAVISKTHNWKAAGSDNIHNFWYKKLTCTHSLLLKHINTFIHSPNLMPHYITQGITYMLPKDLTDSANPAKYRPITCLQNIYKIITSCLSKIIYKHTDEHNILAEEQKGCRKNSQGCKEQLTIDAVASEQAVRQKRSIHTMYIDYKKAFDSVPHSWLIYILKHYKIHPAITSFLEKTMLNWSTKLRICKSDSTTETELIPIKRGIFQGDALSPLWFCLALNPLSNMLNKNNPGYKIKYDIHQISLSHLMYMDDIKLFGSTISELHTLANTVQTFSNDIHMEFGVDKCKIQSTHNGIVVPATYELTNHDVIDTVDPVEGYKYLEYYQSQQIHHKDTKLLLQQNFKTRLHRILHTHLNARNTIKAINTFAFPILTYSFGIIRWTQTDLNNLQRTINTTMTKHRKHHPRSCIQRLTLPKDEGGRGLIDITNLHNKQLTALRTFFQNCSLNSTLHKAVCQADKYTPLFLSDNTKQSKITTNQQKIDIWTQKTLHGRHRHDLTSSNVDKIASNAWLKRGELFPETEGFMQAIQDQVIDTKNYRKYIIRDSSLSSDHCRHCHKHPETIQHITGACSSITQTDYKHRHDQVAAIIHQTLAFKHQLITEKTAYYKYTPKIILESSDYKLYWDRTLLTDKTVHHNRPDITLYDKHNKTVYLIDIAIPNTHNLTTTHTNKLSKYADLTIELKTQWRVQTIKTVPIIISSTGVIPKTLHTSLKTLNIHPLTFTLLQKAVILNTCRIVRKFLSIE

SEQ ID NO: 26414 - protein, 1357 aa, Spodoptera frugiperda
MRLRSRVIPQAGTEVNNDGESRPGSSSPGCPSYSGEGTVSHAAQPQAVAAQLDQVSTCSSPTSSLFSSIPSSPASYLNNHHSSSANSSPLSFHSARDVVQEAIPAEVTAPAQGGRRTRKTWTKDMNIFIMRHYFILTDLETNTRTYLTPLHTRFNSEFPQMNASKQRIGDQRRAIVQRNLLTNEEILNIKEEVALLLKNQPSTSQHTDNDHSHSRRMRWTDDLNETIMRSFYRLTNLETNLTTYRPLLHQDIISKCPSIAHLSAQRISDQRRSIVNNQLLPIHRLNQIREEVRNELASANTDNFDYTISQHTMNETVTQPTQTVTSDDPIATPGSTSTDEQNSVTAQNTINLPNEIIEQLEESYTDHYNTFKDSDPTTRPYIPKLKASRKLAAIISHLNNHTLPKTLNSETDFSTLQTSIYCAAYTAAKFNGARIKDNTGPTSHSQKVPWWQKRLERRISDLRANIGRLTEYANGTRSEALEKHICNIKQTYKTHTQHETENTDITHFLDTLKQKLNALANRLRRYKETTLRKTQNKQFCNNEKLFYRKLVQQHNTSPRTNTSPPSPESLQAFWSNIWSNPIEHRPNGWIEEDKQRWIETPEMQFDQIPLHLLQTVIARTHNWKATGSDNIHNYWYKKLTCTHTLLLKHINTFIQSPSSMPKYITQGITYMLPKDLSDTGNPAKYRPITCLQNIYKIITSCLSESIYNHTHEHNILAEEQKGCRKNSKGCKEQLTIDAVACKQVLKQKRDIVTMYIDYKKAFDSVPHSWLIYILKHYKIHPVIINFLEKIMPYWNTKLKIFNPTQTTETECIPIKRGIFQGDALSPLWFCLALNPLSNMLNKDNSIGFKIKHETQHTTLTHLMYMDDIKLFASTRDEMYTLADITQTFSNDIGMEFGIDKCKIQSIIKGIAEPIVYELGNQELVEAVDPNDGYKYLGYYQSAEIHHKDTKKLLQQNFRNRLHKILHSHLNARNTIKAINTFAIPILTYSFGIIRWTQTDLTTIQRIINTTMTKHRKHHPRSCIQRLTLPKVEGGRGLIDITNLHNNQILLLRKFFYNRSQHSPLHKAICQADTFTPLTLADHTKQITTISREQKIQTWQQKSLHGRHRLDLTNPVVDKIASNAWLKRGELFPETEGFMLAIQDQVIDTKNYRKYIIRDSTLGSDHCRHCHRQPETIQHITGACSSITQTDYKHRHDQVAAIIHQALAFKHKLITEKTAYYKYTPQIILDSPDFKMYWDRTILTDKTIHHNRPDITLHDKKNKTVYLIDIAIPNTHNLSSTHTNKLSKYADLTIELKTQWQVHTVKTIPIIISSTGVIPKTLHKSLKSLDLHPLTYTLLQKAVILNTCRIVRKFLSIE

SEQ ID NO: 26415 - protein, 875 aa, Spodoptera litura
MHIYNIKQIYKTHTHHETENTDIIHFLDTLKQKLNTLANRLRRYKETTIRKTQNKQFCNNEKLFYRKLAQQNNTSPENTTSPPSPEFLQAFWSNIWSNPIEHRQNGWIEEDIERWKDTPEMKFDQVSLHLLKTVIARAHNWKATGSDNIHNYWYKKLTCTHTLLLKHINTFIQSPNSMPKYITRGTTYLLPKDLSDTGNPAKYRPITCLQNIYKIITSCISESIYKHIQEHNILAEEQKGCRKNSQGCKEQLTIVAVACKQALKQKRDIVTMYIDYKKAFDSVPHSWLIYILKHYKIHPVIIDFLETIMPYWNTKLKIFNPNHIIETECIPIKRGTFQGDALSPLWFCLALNPLSNMLNKNNRIGFKIKYESQHTTLTHLMYMDDIKLFASNRNEIHTLADITQTFSNDICMEFGIDKCKIQSIVKGIAEPIEYELDNQELIEAVDPSEGYKYLGYYQSTEIHLKDTKKLLQEKLRNRLHKILHTHLNAKNTIKAINTFAIPILTYSFGIIRWTQTDLTTLQRIINTTMTKHRKHHPRSCIQRLTLPKIEGGRGLIDITNLHNNQIILLRKFFYNRSQHSLLHKAVCQADTFTPLSLADRTKQITTINKEQKIQAWQQKSLHGRHRLDLTNPIVDKIASNAWLKRGELFPETEGFMLAIQDQVIDTKNYRKYIIRDSILGSDHCRHCHKQPETIQHITGACSSITQTDYKHRHDQVAAIIHQTLAFKHKLIAEKTPYYKYTPQIILDSPDLKMYWDRTILTDKTIHHNRPDITLHDKKNKIVYLIDIAIPNTHNLSSTHTNKLSKYTDLTIELKSQWQVHTVKTIPIIISSTGVIPKTLHTSLKTLDLHPLTFTLLQKAVILNTCRIVRKFLSID

SEQ ID NO: 26416 - protein, 1352 aa, Spodoptera frugiperda
MRLRSRVIPQAGTEVNNDGESRPGPSSPGCPSYSGEGTVSQAAQPQAVAAQLDQVSTCSSPTSSLFSSVPSSPASYLNNHQSSSANSSPLSFHSARDVVQEAIPAEVTAPAQGGRRTRKTWTKQMNIFIMRHYFILTDLESNTRTYLTPLHARFTAEFPEMNASKQRIGDQRRAIVQRNFLTNEEISDIKAEVRLLLQHDPSASHNTDTTHTSSRRMRWTDHLNETIMRSYYRLTNLETDFTTYRTLLHEDIIAKCPSIAHLSAQRIADQRRSIVNNQLLSTDRLDQIREEVRSELAVIRSNSPDFTNIIPQQSTPETLTQHNDNIESTTPTNTNDQNTQQLAQNTVNLSPEIIEQLEQMYNETYNKFKNSDPTARPYIPKLRSSRKLAAITSCLNTHILPMTLTSDTDFNTLQTTIYCAAYTVAKFNGARIRENTQCNYQPEKVPWWQKRLERRISELRANIGRLSEYAKGVRSEVLEIHVHNIKRIYKTHTQHEAENTDTTHFLDTLKQKLNTLANRLRRYRETTIRKKQNTQFCNNEKLFYRKLTQQNNAQGNNTALPTPESLHTFWSNIWSNPVTHHQNIWIEEDKERWRDIPEMKFDQIDLQLLQTTIARTHNWKAAGSDNIHNFWYKKLTCTHTLLLKHINTFIQSPDTMPPYITQGTTYMLPKDPSDTVNPAKYRPITCLQNIYKIISSCLSESIYKHTQEQNILAEEQKGCRKNSKGCKEQLTIDAVVSKQALKQKRDIHTMYIDYKKAYDSVPHSWLIYILKHYRIHPTIIQFLEKIMPNWNTKLKIQNANQTTETEFISIKRGIFQGDALSPLWFCLALNPLSSMLNKNDFGFKIKHDSQHTRLTHLMYMDDIKLFAGTLNEIHTLADITQTFSNDICMEFGIDKCKIQSIINGTVVPTSYELRNHEIIESLDPNEGYKYLGYYQSTEIHHKNTKNTLQQNFKNRLHKILHTHLNSKNTVKAINTFAIPILTYSFGIVRWTKTDLTTLQRLINTTMTKHRKHHPRACIQRLTLPKTEGGRGLIDIANLHNNQITSLRRYFFNRSQHSPLHKAICQADTHTPLSLPDHTKQFTTISKQQKIQTWTQKSLHGRHRLDLTNPIVDKIASNAWLKRGELFPETEGFMLAIQDQVIDTKNYRKYIIRDSTLGSDHCRHCHRQPETIQHITGACSSITQTDYKHRHDQVAAIIHQALAYKHKLIPEKTPYYKYTPQIILNSPEFKMYWDRTILTDKTIHHNRPDITLHDKKNKIVYLIDIAIPNTHNLSSTHTNKLSKYADLTIELKTQWQVHTVKTVPIIISSTGVIPKTLHTSLKTLDLHPLTFTLLQKAVILNTCRIVRKFLSID

SEQ ID NO: 26417 - protein, 1399 aa, Spodoptera frugiperda
MFSPVISSTYVILLDFDTFHVFCHDFYSRPFLIKKKKKKKTTSHIYAMRLRSRVIPQAGTVVNNDGESRPGPSSPGCPSYSGEGTVSQAAQPQAVAAQHDQVSTCSSPTSSLFSSVPSSPASYLNNHQSSSANSSPLSFHSARDVVQEAIPAEVTAPAQGGRRTRKTWTKQMNIFIMRHYFILTDLESNTRTYLTPLHARFTAEFPEMNASKQRIGDQRRAIVQRNFLTNEEILNIKAEVRLLLQHDPSASHNTDTTHIVSRRMRWTDHLNETIMKSYYRLTNLETDFTTYRTLLHEDIISKCPSIAHLSAQRIADQRRSIVNNQLLSADRLNQIKEEVRNELALIRSNSPDYTNIIPQQITPTTITQHNDNIESTTSTNTNDQNTQQLAQITANLSPEIIEQLEQMYSETYNKFKNSDPTARPYIPKLRSSRKLAAITSCLNTHILPMTLTSDTDFNTLQITIYCAAYTAAKFNGAKIRENTQCNYQPEKVPWWQKRLERRISELRANIGRLSEYAKGVRSEALEIHVHNIKRIYKTHTQHEAENTDITHFLDTLKQKLNTLANRLRRYRETTIRKKQNTQFCNNEKLFYRKLSQQNNSQGNNTTLPTPESLHTFWSNIWSNPVTHHQNSWIEEDKERWRDIPEMKFDQINLQLLQTVIARTHNWKAAGSDNIHNFWYKKLTCTHTLLLKHINTFIQSPDTMPPYITQGTTYMLPKDPSDTVNPAKYRPITCLQNIYKIISSCLSESIYKHTQEHNILAEEQKGCRKNSKGCKEQLTIDAVVSKQALKQKRDIHTMYIDYKKAYDSVPHSWLIYILKHYRIHPTIIQFLEKIMPNWNTKLKIQNANQTTETEFISIKRGIFQGDALSPLWFCLALNPLSSMLNKNDLGFKIKHDTQHTRLTHLMYMDDIKLFAGTLNDIHTLADITQTFSNDICMEFGIDKCKIQSLINGTVEPTSYELRNHEIIESLDPNEGYKYLGYYQSTEIHHKNTKNTLQQNFKNRLHKILHTHLNSKNTIKAINTFAIPILTYSFGIVRWTKTDLTTLQRLINTTMTKHRKHHPRACIQRLTLPKIEGGRGLIDISNLHNNQITSLRRFFFNRSQHSSLHKAICQADTYTPLVLADHTKQLTITSKQQKIQTWTEKSLHGRHRLDLTNPIVDKIASNAWLKRGELFPETEGFMLAIQDQVIDTKNYRKYIIRDSTLGSDHCRHCHRQPETIQHITGACSSITQTDYKHRHDQVAAIIHQALAYKHRLIPEKTPYYKYTPQIILNSPEFKMYWDRTILTDKTIHHNRPDITLHDKKNKIVYLIDIAIPNTHNLSSTHTNKLSKYADLTIELKTQWQVHTVKTVPIIISSTGVIPKTLHTSLKTLDLHPLTFTLLQKAVILNTCRIVRKFLSID

SEQ ID NO: 26418 - protein, 1357 aa, Lycaena phlaeas
MRLRNRILPQAGTGASSNGESRPGPSSSGCPSYSGEGTMSHQTAQPQTVAVQHDLSSTYSSPTSSLFSSIPSSPPSYLDLHESCSSNSASSQSTLDVVQEATSAEFNAPVLGRRRKRKTWTRDMNIFILRHYFILTELESNTKSYLPSLHARFMAEFPEMEVGKQRVGDQRRAIIQRSFLTKQEISNIKNEVRDILKNQAPVTENHLNTQHTETKRIRWSNILNETIMRSYYKITKLETDLNTYRPLLYQDIISKFPSIAHVSIQRIADQRRSIVQNKLLSIDHLNRIREEVRNDLNAMNAQTLEITSHPANDNQTLSPTQNTTNVDQAAPPIEILTNEPISHQTLILHNAQTDLHKQLEEMFTVTLKKFKDTDPTLRPYLPKQKPSKRLSSIIRHLNCVILPEVLNFEAETFKTLQTIIYSAAYTASKFNGARISEQNVMTKKQQVVPWWQRRLESRISDLRASIGRLTEYFRGVRSRALDRHIEKIKEKYKIHTQYEAQNTDTAHFLDTLKQKLNTLTNRLRRYRETTIRKTQNKEFCNHEKIFYRKLLTPHQNSSLINNTAPPSSESLFAFWSNIWSNPIEHNKNQWIDEDKERLKDIPEMTFDQIDLDLLKKVIARTHNWKASGSDNIHNFWYKRFTCTHSLLHKHINAFLTTPDIMPPYITQGITYMVPKDQSDLENPAKYRPITCLQNIYKIITTCLSESIYKHTNNQNILAEEQKGCRKNSQGCKEQLTIDAIVTNQALKHKRNIHTMYIDYKKAFDSVPHSWLIYILKHYKIHPTIIRFLETIMPNWNTKLKICSPIKTTETECIYIKRGIFQGDALSPLWFCLALNPLSYLLNKDNMGFKLQHDTQQTSLTHLMYMDDIKLFANSLDEVHTLADITHTFSNDICMEFGIDKCKIQSITKGKAENVSYELLNHDVIHSVDPDTGYKYLGYYQSQVIHHKDTKNLLQQNFRSRLHKLLHTHLNAKNLTKAINSFAIPLLTYSFGVIRWTQTELKTLQRAINTTMTTHRKHHPRACIQRMTLPKDEGGRGLIDIANLHSQQITLLRKFFQDRALHSKLHYAACMADTFTPLSLAVHTKQMNIYTIQHKIDTWTQKSLHGRHRLDLTNPIVDKTASNAWLKQGELFPETEGFMLAIQDQVIDTKNYRKYIIKDSSLGSDHCRHCHKHPETIQHITGACPSITQTDYKHRHDQVAAIIHQTLAYKHKLITEKTSYYKYTPAIILDAPDYKLYWDRSILTDKTIHHNRPDIMLHDKQNKTVYLIDIAIPNTHNLDSTHTNKLTKYSDLSIELKSQWRVHTVKTIPIIISSTGVIPKTLHTSLKTIDIHPLTYILMQKAVILNTCRIVRKFLSIE

SEQ ID NO: 26419 - protein, 1245 aa, Lycaena phlaeas
MKNYLDIVISLLPAASPAFTFNNNNNNNNTKSYLPSLHARFMAEFPEMEVGKQRVGDQRRAIIQRSFLTKQEISNIKNEVRDILKNQAPVIENHLNTQHTETKRIRWSNILNETIMRSYYKITKLETDLNTYRPLLYQDIISKFPSIAHVSIQRIADQRRSIVQNKLLSIDHLNRIREEVRNDLNAIDAQTLEITSHPANDNQTLSPTQNTTNADQAAPPIEILTNEPISHQTLILHNAQTDLHKQLEEMFTVTLKKFKDTDPTLRPYLPKQKPSKRLSSIIRHLNCVILPEALNFEAETFNTLQTIIYSAAYTASKFNGARISEQNVMTKKQQVLPWWQRRLESRISDLRASIGRLTEYFRGVRSRALDRHIEKIKEKYKIHTQYEAQNTDTAHFLDTLKQKLNTLTNRLRRYRETTIRKTQNKEFCNHEKIFYRKLLTPHQNSSLINNTAPPSSESLFAFWSNIWSNPIEHNKNQWIDEDKERLKDIPEMTFDQIDLDLLKKVIARTHNWKASGSDNIHNFWYKRFTCTHSLLHKHINAFLTTPDIMPPYITQGITYMVPKDQSDLENPAKYRPITCLQNIYKIIITCLSESIYKHTNDQNILAEEQKGCRKNSQGCKEQLTIDAIVTNQALKHKRNIHTMYIDYKKAFDSVPHSWLIYILKHYKIHPTIIRFLETIMPNWNTKLKICSPIKTTETECIYIKRGIFQGDALSPLWFCLALNPLSYLLNKDNMGFKLQHDTQQTSLTHLMYMDDIKLFANSLDEVHTLADITHTFSNDICMEFGIDKCKIQSITKGKAENVSYELLNHDVIHSVDPDTGYKYLGYYQSQVIHHKDTKNLLQQNFRSRLHKLLHTHLNAKNLTKAINSFAIPLLTYSFGVIRWTQTELKTLQRAINTTMTTHRKHHPRACIQRMTLPKDEGGRGLIDIANLHSQQITLLRKFFQDRALHSKLHYAACMADTFTPLSLAVHTKQMNIYTIQHKIDTWTQKSLHGRHRLDLTNPIVDKTASNAWLKQGELFPETEGFMLAIQDQVIDTKNYRKYIIKDSSLGSDHCRHCHKHPETIQHITGACPSITQTDYKHRHDQVAAIIHQTLAYKHKLITEKTSYYKYTPAIILDSPDYKLYWDRSILTDKTIHHNRPDIMLHDKQNKTVYLIDIAIPNTHNLDSTHTNKLTKYSDLSIELKSQWRVHTVKTIPIIISSTGVIPKTLHTSLKTIDIHPLTYILMQKAVILNTCRIVRKFLSIE

SEQ ID NO: 26420 - protein, 1375 aa, Laothoe populi
MHTFLTKSPKPSFSFMESRNLRYNLRSLPGGRRGISGADAGYGSMRAVGGEALSRRTLVAEETTADLQSPASPITSSPSSLFPSISSSPLSYAGNYHQTSCLSPSSSSSLSSNNHSPKDVVQKAITANIPVPAIGGIKTRKKWSEEMNIFILRTYFIITSLESNTRHYLTPLHAKFTEKFPDMAASKQRVGDQRRAIIQKQLLSNDKIKQIKLEVENFLKQHPTNNILHIDTNRERLNWTNDINETIIRTYFRITNLESNITGYRQQLHREVITQCPSIAQVSVQRVADQRRLIINNKYISVERLDEIREEIRIELARNQENLPNPYITLNDSQEQPNISINSITSQTAITQYTSLDEISRYDRLQLTLDVQKQIQNTFAETLTEFKDTSPTFRPLIPRQKPSKRFACIVDFINSFVLPKAITDDTNFDTTQLIIYSAAYTAAKHNGTKFLNTQDQRQVTEKIPKWQENLQKRIEKLRTYIARLIEYKNGNQSQALKKKVDEIRVRFKIHSQHENPNSNLFHFLDTLKQKLSVLASRLRRYKQTTLRKSQNHLFISNEKIFYRTLAQNNTSNSTPNNITTIPTKESLQEYWAGIWSNPVQHNYSEWIEDDKNRQNNVPEMEFDSISLDLLKQIINRTHNWKATGSDKIHNYWYKKFTTIHPLLLKHINIFIQTPHMLPSYITEGTTFMLPKDPTDTGNPAKYRPITCLQTLYKIITSCIRELIYSHIDNNNILAEEQKGCRKNSQGCKEQLTIDAVACNQARSKNRNIYSMYIDYKKAYDSVPHSWLLYILKHYHIHPKITTFLETVMTRWKTILKLRDHKETIETDYIEINRGIFQGDALSPLWFCLSLNPLSILLNKTKKGFKIKFDNTHHTLSHLLYMDDIKLFATTLSEIHALADVTQKFSSDIQMDFGIDKCKILSVRRGQIERNSYKLSDDRIIEPVDEIEGYKYLGYQQTEQIKHKHTKKSLTEKFKARLHTILNTYLNSKNTVKAINTFAIPILTYSFGIIKWSQTDIKNLQRNINTTMTKYRKHHPRACVQRQTLPRIEGGRGLIDLHNLHNKQIQTLRAFFHSKSNHSQLHRATVQSDHKYTPLNLLDPTLQLDQLTNTQKIDAWTQKSLHGRHRLDLTNSNVDKIASNAWLKRGELFPETEGFMIAIQDQTIDTRNYRKYIIRDLTAQNDLCRHCHSSPETIQHITGACRSITQTDYKHRHDQVAAIVHQYLAYKYKFITEKTSYYKYTPEIILESNHYKIYWDRTIMTDKTIHHNRPDITLHDKKNKTVFLIDVAIPNTHNLQTTYTEKITKYTDLSIELKTQWRVDSVRTVPVVVSATGIVPKTLFNSLKTLDIHPLTYTLIQKAVILNTCRLVRKFLSIEP

SEQ ID NO: 26421 - protein, 1417 aa, Endotricha flammealis
MESKEFRNRLRSLPGGRRGASGADAGCHSMRTIGDEELSRRAPIESNATADTNRTRRYNLRSQQKKINTDKEEQHLDENMSSRTSTPSLFPSLPSSPPSYLDTVSPSSSPNSYRVPTSPSEDVVQEASTATLPAPAKDGKRARKKWTKDMNIFIMRTYYLLTSLETVNVRAYLSDLYDKFCEQFPEMQASRQRIGDQRRAIIRNKLLTEEKLEEIKKEVQQQIQTVPQSHTQSNTQSHTQQQSHTQQQSHTQPQPLTQPQSHTQNNIPNTHNQRMKWTDEINESIIRIYYTITALETNKTGYRQTLHRAIITQFPEISHVSEQRIADQRRVIVNNQLLSATKLQQIQDQVAHELSLESNNTNTRTQNNTQTTAHYTTPNIEEEFTQQNTTLNQENDPLQEVAVDTHPDTITQIENTFSDVLMTFRNSDSTSRPRIPKQKPSRKFASIVYTLNRHIIPKYLPTNSDFYLTQTIIYCAAYTAAKQNGAKIVDKGSYQQQKANKPRWERRLQAKIDDLRIKLGRLTEFKNGNRSQTLVKHVEAIKNQYKSHAQHENENTELPHFLDTLKQKLNAASSRLARYKQTTLRKTQNKQFNTNEKTFYRSLDQAQNSLQSPTPAPEAVQEFWSNIWSIPVEHTNNTWIDQVKEHTEHVIPMQHENITIDTLKIIIDRTHNWKATGSDNIHNYWYKKFTCTHTQILEHINEFIQNPETMPDYLTQGQTYLIPKDKSDTINPSKYRPITCLQNIYKIITSCISQLMYKHINNNNILSEEQKGCRKNSKGCKEQLIIDAIVSRKAQVRKQSIFTMYIDYQKAYDSVPHSWLVYILQHYKIHPSIITFLEKTMQNWKTKLIINSSDTPTETDFIDIRRGIFQGDALSPLWFCLALNPLSNLLNDSKNGVSLKSDNMQHTLSHLMYMDDIKLFGSTLQEIHNLAEITETFSRDINMKFGIDKCRMMSINKGRVELNTYELQNNEHIEPVDEIEGYKYLGYQQSRQIHHKETKNSLKKKFKTRLHKILNSLLNARNTIKAINSFAIPILTYSFGIIQWSKTDLKNLQRIINTLMTKYRKHHPRSCVQRLTLPKCEGGRAIIDIENLHNKQITTMRNYFHTKAQNSTLHSTIVYTDKKYTPLNLKDFTKQPNESITQPQEKLDTWLQKSLHGRHRLDLLNPNVDKVASNAWLKRGELFPETEGFMLAIQDQVIDTKNYRKHIRHDTTLQNDTCRRCHSAPETIQHITGACKAISQTDYKHRHDQVAAITHQYLAIKYNLLKDTTAYYKYTPQTILESSEFKIYWDRTIITDKTIHHNRPDITLIDKINKTVYLIDIAIPNTHNLSSTYTEKIAKYTDLAIEIKTQWRVDTVKTIPITISSTGVIPKTLHTSLKTLNIHPLTFIQIQKAVILNTTRIYANFYLYKLQHLLTFL

SEQ ID NO: 26422 - protein, 1408 aa, Endotricha flammealis
MESKEFRNRLRSLPGGRRGASGADAGCHSMRTIGDEELSRRAPIESNATADTNRTRRYNLRSQQKKINTDKEEQHLDENMSSRTSTPSLFPSLPSSPPSYLDTVSPSSSPNSYRVPTSPSEDVVQEASTATLPAPAKDGKRVRKKWTKDMNIFIMRTYYLLTSLETVNVRAYLSDLYDKFCEQFPEMQASRQRIGDQRRAIIRNKLLTEEKLVEIKKEVQQQIQTVPQSHTQSNTQSHTQQQSHTKQQSHTQPQPLTQPQSHTQNNIPNTHNQRMKWTDEINESIIRIYYTITALETNKTGYRQTLHRAIITQFPEISHVSEQRIADQRRVIVNNQLLSATKLQQIQDQVAHELSLESNNTNTRTQNNTQTTAHYTTPNIEEEFTQQNTTLNQENDPLQEVAIDTHPDTITQIENTFSDVLMTFRNSDSTSRPRIPKQKPSRKFASIVYTLNRHIIPKYLPTNSDFYLTQTIIYCAAYTAAKQNGAKIVDKGSYQQQKANKPRWERRLQAKIDDLRIKLGRLTEFKNGNRSQTLVKHVEAIKNQYKSHAQHENENTELPHFLDTLKQKLNAASSRLARYKQTTLRKTQNKQFNTNEKTFYRSLDQAQNSLQSPTPAPEAVQEFWSNIWSIPVEHTNNTWIDQVKEHTEHVIPMQHENITIDTLKIIIDRTHNWKATGSDNIHNYWYKKFTCTHTQILEHINEFIQNPETMPDYLTQGQTYLIPKDKSDTINPSKYRPITCLQNIYKIITSCISQLMYKHINNNNILSEEQKGCRKNSKGCKEQLIIDAIVSRKAQVRKQSIFTMYIDYQKAYDSVPHSWLVYILQHYKIHPSIITFLEKTMQNWKTKLIINSSDTPTETDFIDIRRGIFQGDALSPLWFCLALNPLSNLLNDSKNGVSLKSDNMQHTLSHLMYMDDIKLFGSTLQEIHNLAEITETFSRDINMKFGIDKCRMMSINKGKVELNTYELQNNEHIEPVDEIEGYKYLGYQQSRQIHHKETKNSLKKKFKTRLHKILNSLLNARNTIKAINSFAIPILTYSFGIIQWSKTDLKNLQRIINTLMTKYRKHHPRSCVQRLTLPKCEGGRAIIDIENLHNKQIITMRNYFHTKAQNSTLHSTIVYTDKKYTPLNLKDFTKQPNESITQPQEKLDTWLQKSLHGRHRLDLLNPNVDKVASNAWLKRGELFPETEGFMLAIQDQVIDTKNYRKHIRHDTTLQNDTCRRCHSAPETIQHITGACKAISQTDYKHRHDQVAAITHQYLAIKYNLLKDTTAYYKYTPQTILESSEFKIYWDRTIITDKTIHHNRPDITLIDKINKTVYLIDIAIPNTHNLSSTYTEKIAKYTDLAIEIKTQWRVDTVKTIPITISSTGVIPKTLHTSLKTLNIHPLTFIQIQKAVILNTTRIVRKFLSL

SEQ ID NO: 26423 - protein, 1408 aa, Endotricha flammealis
MESKEFRNRLRSLPGGRRGASGADAGCHSMRTIGDEELSRRAPIESNATADTNRTRRYNLRSQQKKINTDKEEQHVDENMSSRTSTPSLFPSLPSSPPSYLDIVSPSSSPNSYRVPTSPSEDVVQEASTATVPAPAKDGKRVRKKWTKDMNIFIMRTYYLLTSLENVNVRAYLSDLYDKFCEQFPEMQASRQRIGDQRRAIIRNKLLTEEKLEEIKKEVQQQIQTVPQSHTQSNTQSHTQPQSHTQQQSHTQQQSHTQPQSHTQNNIPNTHNQRMKWTDEINESIIRIYYTITALETNKTGYRQTLHRAIITQFPEISHVSEQRIADQRRVIVNNQLLSATKLQQIQDQVAHELSLESNNSNTRTQNNTQTTTHYTTPNIEEEFTQQNTTLNQENDPLQEVAIDTHPDTITQIENTFCDALMTFRNSDSTSRPRIPKQKPSRKFASIVYTLNRHIIPKYLPTNSDFYLTQTIIYCAAYTAAKQNGAKIVDKDSYQQQKAYKPRWERRLQAKIDDLRIKLGRLTEFKNGNRSQTLVKHVEAIKNQYKSHAQHENENTELPHFLDTLKQKLNAASSRLARYKQTTFRKTQNKQFNTNEKIFYRSLDQAQNSIQSPTPAPEAVQEFWSNIWSIPVEHTNNTWIDQVKEHTEHVIPMQHENITIDTLKIIIDRTHNWKATGSDNIHNYWYKKFTCTHTQILEHINEFIQNPETMPDYLTQGQTYLIPKDKSDTINPSKYRPITCLQNIYKIITSCISQLMYKHINNNNILSEEQKGCRKNSKGCKEQLIIDAIVSRKAQVRKQSIFTMYIDYQKAYDSVPHSWLVYILQHYKIHPSIITFLEKTMQNWKTKLIINSSDTPTETDFIDIRRGIFQGDALSPLWFCLALNPLSNLLNDSKNGVSLKSDNMQHTLSHLMYMDDIKLFGSTLQEIHNLAEITETFSSDINMKFGIDKCRMMSINKGRVELNTYELQNNEHIEPVDEIEGYKYLGYQQSRQIHHKETKNSLKKKFKTRLHKILNSLLNARNTIKAINSFAIPILTYSFGIIQWSKTDLKNLQRIINTLMTKYRKHHPRSCVQRLTLPKCEGGRALIDIENLHNKQITTMRNYFHTKAQNSTLHSTIVYTDKKYTPLNLKDFTKQPNESITQPQEKLDTWLQKSLHGRHRLDLLNPNVDKVASNAWLKRGELFPETEGFMLAIQDQVIDTKNYRKHIRHDTTLQNDTCRRCHSAPETIQHITGACKAISQTDYKHRHDQVAAITHQYLAIKYNLLKDTTAYYKYTPQTILESSEFKIYWDRTIITDKTIHHNRPDITLIDKINKTVYLIDIAIPNTHNLSSTYTEKIAKYTDLAIEIKTQWRVDTVKTIPITISSTGVIPKTLHTSLKALNIHPLTFIQIQKAVILNTTRIVRKFLSL

SEQ ID NO: 26424 - protein, 1406 aa, Endotricha flammealis
MESKEFRNRLRSLPGGRRGASGADAGCHSMRTIGDEELSRRAPIESNATADTNRTRRYNLRSQQKKINTDKEEQHVDENMSSRTSTPSLFPSLPSSPPSYLDIVSPSSSPNSYRVPTSPSEDVVQEASTATVPAPAKDGKRVRKKWTKDMNIFIMRTYYLLTSLETVNVRAYLSDLYDKFCEQFPEMQASRQRIGDQRRAIIRNKLLTEEKLEEIKKEVQQQIQTVPQSHTQSNTQSHTQPQSHTQQQSHTQQQSHTQPQSHTQNNIPNTHNQRMKWTDEINESIIRIYYTITALETNKTGYRQTLHRAIITQFPEISHVSEQRIADQRRVIVNNQLLSATKLQQIQDQVAHELSLESNNSNIRTQNNTQTTTHYTTPNIEEEFTQQNTTLNQENDPLQEVAIDTHPDTITQIENTFCDALMTFRNSDSTSRPRIPKQKPSRKFASIVYTLNRHIIPKYLPTNSDFYLTQTIIYCAAYTAAKQNGAKIVDKDSYQQQKAYKPRWERRLQAKIDDLRIKLGRLTEFKNGNRSQTLVKHVEAIKNQYKSHAQHENENTELPHFLDTLKQKLNAASSRLARYKQTTFRKTQNKQFNTNEKIFYRSLDQAQNSIQSPTPAPEAVQEFWSNIWSIPVEHTNNTWIDQVKEHTEHVIPMQHENITIDTLKIIIDRTHNWKATGSDNIHNYWYKKFTCTHTQILEHINEFIQNPETMPDYLTQGQTYLIPKDKSDTINPSKYRPITCLQNIYKIITSCISQLMYKHINNNNILSEEQKGCRKNSKGCKEQLIIDAIVSRKVRKQSIFTMYIDYQKAYDSVPHSWLVYILQHYKIHPSIITFLEKTMQNWKTKLIINSSDTPTETDFIDIRRGIFQGDALSPLWFCLALNPLSNLLNDSKNGVSLKSDNMQHTLSHLMYMDDIKLFGSTLQEIHNLAEITETFSSDINMKFGIDKCRMMSINKGRVELNTYELQNNEHIEPVDEIEGYKYLGYQQSRQIHHKETKNSLKKKFKTRLHKILNSLLNARNTIKAINSFAIPILTYSFGIIQWSKTDLKNLQRIINTLMTKYRKHHPRSCVQRLTLPKCEGGRALIDIENLHNKQITTMRNYFHTKAQNSTLHSTIVYTDKKYTPLNLKDFTKQPNESITQPQEKLDTWLQKSLHGRHRLDLLNPNVDKVASNAWLKRGELFPETEGFMLAIQDRVIDTKNYRKHIRHDTTLQNDTCRRCHSAPETIQHITGACKAISQTDYKHRHDQVAAITHQYLAIKYNLLKDTTAYYKYTPQTILESSEFKIYWDRTIITDKTIHHNRPDITLIDKINKTVYLIDIAIPNTHNLSSTYTEKIAKYTDLAIEIKTQWRVDTVKTIPITISSTGVIPKTLHTSLKALNIHPLTFIQIQKAVILNTTRIVRKFLSL

SEQ ID NO: 26425 - protein, 1396 aa, Endotricha flammealis
MESKEFRNRLRSLPGGRRGASGADAGCHSMRTIGDEELSRRAPIESNATADTNRTRRYNLRSQQKKINTDKEEQHVDVNMSSRTSTPSLFPSLPSSPPSYLDIVSPSSSPNSYRVPTSPSEDVVQEASTATVPAPAKDGKRVRKKWTKDMNIFIMRTYYLLTSLETVNVRAYLSDLYDKFCEQFPEMQASRQRIGDQRRAIIRNKLLTEEKLEEIKKEVQQQIQTVPQSHTQSNTQSHTQPQSHTQQQSHTQNNIPNTHNQRMKWTDEINESIIQIYYTITALETNKTGYRQTLHRAIITQFPEISHVSEQRIADQRRVIVNNQLLSATKLQQIQDQVAHELSLESNNTNTRTQNNTQTTTHYTTPNIEEEFTQQNTTLNQENDPLQEVAIDTHPDTITQIENTFCDALMTFRNSDSTSRPRIPKQKPSRKFASIVYTLNRHIIPKYLPTNSDFYLTQTIIYCAAYTAAKQNGAKIVDKGSYQQQKAYKPRWERRLQAKIDDLRIKLGRLTEFKNGNRSQTLVKHVEAIKNQYKSHAQHENENTELPHFLDTLKQKLNAASSRLARYKQTTLRKTQNKQFNTNEKIFYRSLDQAQNSIQSPTPAPEAVQEFWSNIWSIPVEHTNNTWIDQVKEHTEHVIPMQHENITIDTLKIIIDRTHNWKATGSDNIHNYWYKKFTCTHTQILEHINEFIQNPETMPDYLTQGQTYLIPKDKTDTINPSNYRPITCLQNIYKIITSCISQLMYKHINNNNILSEEQKGCRKNSKGCKEQLIIDAIVSRKAQVRKQSIFTMYIDYQKAYDSVPHSWLVYILQHYKIHPSIITFLEKTMQNWKTKLIINSSDTPTETDFIDIRRGIFQGDALSPLWFCLALNPLSNLLNDSKNGVSLKSDNMQHTLSHLMYMDDIKLFGSTLQEIHNLAEITETFSRDINMKFGIDKCRMMSINKGRVELNTYELQNNEHIEPVDEIEGYKYLGYQQSRQIHHKETKNSLKKKFKTRLHKILNSLLNARNTIKAINSFAIPILTYSFGIIQWSKTDLKNLQRIINTLMTKYRKHHPRSCVQRLTLPKCEGGRALIDIENLHNKQITTMRNYFHTKAQNSTLHSTIVYTDKKYTPLNLKDFTKQPNESITQPQEKLDTWLQKSLHGRHRLDLLNPNVDKVASNAWLKRGELFPETEGFMLAIQDQVIDTKNYRKHIRHDTTLQNDTCRRCHSAPETIQHITGACKAISQTDYKHRHDQVAAITHQYLAIKYNLLKDTTAYYKYTPQTILESSEFKIYWDRTIITDKTIHHNRPDITLIDKINKTVYLIDIAIPNTHNLSSTYTEKIAKYTDLAIEIKTQWRVDTVKTIPITISSTGVIPKTLHTSLKALNIHPLTFIQIQKAVILNTTRIVRKFLSL

SEQ ID NO: 26426 - protein, 1372 aa, Hemaris fuciformis
MPREGRTLAAFSYTLTNDQRSTSNNPNAMRLRNRTIPQAGTEANCDGESRPEPHSSGCPTYSGEGTVSHKSAQSQTVVGQHDQTRSCSSPTSSLFSSIPSSPPSYLDRLRESSPPSSLSLSPHSVEDVVQAAISAEVTAPAKNGRRKKWTKDMNVFIMRHYFILTDLESNTRQYLAPLHERFSAQYPEMQVGKQRVGDQRRAIIQRKFLSEKEINDIKDDVKKLLHNQSPTDINIHTEYKQSRMRWSTELNEAILRSYYRLTKLETDLTSYRPLLHQQITSEYPSLSHLTAQRISDQRRSIINNQLLTPEHINKILEEVRNQLNIHPTDNTTDASVTEHPPPPISLNPIEIETNQRNTSPEHNSTSKLPTHIQQELEVMFSETYNKYLNTEPTSRPNLPKQKPSKKIAVIVNHLNSDILPKFLSTDTDFNTTQAIIYCGAYTAVKFNGGRILDKNTLNNRIQRVPRWQRRLEKRINGLRIDIGRVTEYARGVRSQKLEKHINKIKQKYKIHSQHETQNTDLTHYLDTLKQKLNTLASRLRRYKETTNRKTQNKLFSNNEKLFYRKLSVQQNTPSENSHLPSPEALHLFWSDIWSKPVQHNINQWVEEDKDKFKNIPQMEFDAIHIDLLKAVISKTHNWKAPGSDNIHNFWYKKFNCTHTLLHRHINTFIQSPNTMPHYITQGITYMIPKDLTDTANPAKYRPITCLQNIYKIITSCLSESIYQHINRNHILAEEQKGCRKSSQGCKEQLTIDAVASNQAVHQKRNIYTMYIDYKKAFDSVPHSWLIYILEHYKVHPVITSFLQNTMLYWNTKLKICNSNKTTETELISIKRGIFQGDALSPLWFCLALNPLSYMLNKENIGFTIKNDFQDITLSHLMYMDDIKLFGSTIDHIHTLARITQTFSSDIQMEFGIDKCAIQSVKQGVVEPTTYKLVNHDDVIDSLDPINGYKYLGFHQSRQIHHKDMKNKLQQNFKSRIHKILHTQLNSRNTIKAINTFAVPVLTYSFGIIRWTQTDLKKLQRIINTTLTKHRKHHPRACIQRLTLPNDEGGRGLIDITNLHNKQITSLRTFFHTHANQSLLHRVIVEADSYTPLNLADRNKHIKLETNQQKIDTWTQKSLHGRHRLDLINPIVDKIASNAWLKRGELYPETEGFMLAIQDQVIDTKNYRKYIIRDSTLNSDHCRHCHKQPETIQHITGACSFITQTDYKHRHDQVAAIIHQTLAHKHNLITEKIAYYKYTPQVILESQDYKLYWDRTILTDKTVHHNRPDITLHDKHNKVVYLIDISVPNTHNLTSTHTNKLSKYTDLSIELKTQWRVKSVKTVPIIVSSTGVVPKTLHASLKALKIHPLTYTLLQKAVILNTCRIVRKFLSLD

SEQ ID NO: 26427 - protein, 1378 aa, Conopomorpha cramerella
MLTWGADSVQTKLTRPTRKWYLGEMETRARKKRLGPLPGDRRGTPGADAGCHSIRTIGGEELSRRALVGDYPEDITADNIHPPNSPSLSLSSGSSYHPQSPCHSIYSTSSVPPLSEDVAHEAFADKHVPASDSRCARIKWTRDMNEFIWRNYLILSNLESNPRGFLDTLHKRFTTQFPNIKVSRQRISDQRRTILRNNLLSKSDLDSIRQEVSTQLQSAQPNTNTLHFHNNTQELANSGRRMAWTSDLNETIMYHYFRITNLESNITGYRPMLHAAFVADYPHLSHLSEQRISDQRRVIVNNKLLTNDKLLTIRDQVAMELNIETNQVTSDSEVCNTLPLLTTSNTTEQLEHVTSQDGHSRQFLLNTVPVLSSETVTELDNIFTDTFEQFKDTDATARPRLLKQKTSKALTNIVHDINVAIIPKHINSDTDFDTCQTIIYCAAYTVASYTKQKIHTTPTNSNNTSRQPAWQVRLQKRIDELRIKIGRLTEYMRGNTSLNLKMHVNKILASHKIHAQYEPENTELDHFLDTLKQKLNALSSRMRRYKQTTLRKIQNNNFNHNEKLFYRNLTTKSMHQIPSNTQPPDPTQLQEFWSNIWSKPVNHDYDNWMDPENEIFRCVPEMDFSEITIDVLTNVIKKTHNWKAAGSDGIYNYWYKKLTSTHEVLLKHINRFINHPEILPVYIVQGTTYMIPKDPTDIANPSKYRPITCLQNIYKIITSCINHLIYQHADTNNIFAEQQKGCRKQSQGCKEQLTIDAVISNQACRKKRNLHTMFIDYKKAFDSVPHSWLIKILQLYKIHPTIVNFLTNTMRHWNTTLKLYVNATNIVIDSIPIRRGIFQGDSLSPVWFCLALNPLSYLLNNSNKGFKIKNDNTHHIISHLLYMDDIKLYGTNKNEINTLATITEKFSSHIKMEFGIDKCKIQSINRGKTEQNTYYQLTNGQQIETVDEAEGYKYLGYQQTKQIHHTETKTALTNKFKQRLHNILNTQLNARNTVKAINSFAIPILTYSFGVIFWSQSDLVKLQRIINTHLTKYRKHHPRSCYQRLTLPKHEGGRGIIDIKNLHNKLITSLRSFFHAQTQRSQLHDAVVKADTKLTPLNLANHNTLKCETITTTAQKIDTWTQKSLHGRHRLDLINPNVDRVASNAWLKRGELFPETEGFMVSIQDQVIDTKNYRKHIIKDTSMSSDLCRHCHRSSETIQHITGACSSITQTDYKHRHDQVAAIIHQYLAFKHKLIQEKTAYYKYTPQTVLDSTTHKLYWDRTIITDRTIHYNRPDITLLDKLNKTVYLIDIAVPNTHNLTSTHSQKITKYTDLSIEIKTQWQVDTVKTVPIVLSSTGVIPTTLRSSLTTLGIHPLTYILLQKAVILNTCRIVRKFLST

SEQ ID NO: 26428 - protein, 1353 aa, Ephestia elutella
MNMDNRRYNLRSLPGGRRGALGADAECHSIRTIGDGGLSRRAPLEQLTTADNHPSPSSSPSSLFPSMPSSPASYLNRGTSPTSSISQPSWDVVQEANLAKSPAPATTGPRVRKKWTNEMNIFIMRTYLTITALETINRRNYLIPLYEKFIEQFPEMNVSKQRIGDQRRAIVRNRFLSDDEISHIREEVEGQLQITSQTNAQQSQSTNHPSQGERMKWSDEVNETIMTAYYTITELETNKTGYRQSLHQTVISKHPEISHVSEQRISDQRRVIVNNRLISTEKLQEIRDQVAINMAAVASFDLFHPITNTPTEESHINHSQEDIGNTEEIIVTTQQGEIQNTSDSPNTLPPETESCIEQEFQNCLESYTGTDPTKRPRIPKQRASKKLAAIVSTLNNRIFPKYVTNETDFPTLQTVIYCGALTTAKMNGSKIIDTNSIRNKTPYKPSWEKRLEDKIKDLRVKAGRLTEYLNGNRGRELERQVDIIKQQYQIHSQHENENTDLTQFLDTIKQKINVAANRLRRYKETTERKRQNKQFNNNEKVFYRDLAQAQNSNNTDTPQTEALHAFWSDIWSNPVTHKENSWIEQDKELTRDIPNMQFQNISIDMLQTVIAKTHNWKATGSDNIHNFWYKKFTSIHTLLLTHINNFIQSPETVPLYFTQGLTYMLPKDATDTANPAKYRPITCLQTIYKIITSCINESIYSHIVDHKILAEEQKGCRRNSRGCKEQLIIDAVATKQAHIKKRNIYSMYIDYQKAYDSVPHTWLIYILEHYKIHPTLINFLKNLMLNWNTKLILNNKNTNVETDFIKIRRGIFQGDALSPLWFCLALNPLSNLLKNSGKGFKIKSENTCHILSHLMYMDDIKLFGQSLEEINTLADITETFSADINMKFGIDKCKIQSVHKGKTENNTYILRNEEIIEPVDQAIGYKYLGYHQSQQIHHKEIKQKLTNEFRTRLHRILNTHLNARNTIKAINSFAIPILTYSFGIINWSQTDLKNLQRNINTLMTKYRKHHPRSCIQRLTLPKYEGGRGLIDIQNLHNKQISMLRLFFHKHSQQSPLHTATTQADNKYTPLNLKDNSKQKKEEITTIQEKLQAWIQKSLHGRHRLDLTNPNVDKAASNAWLKRGELFPETEGFMLAIQDQVIETKNYRKHIIRDINTQNDSCRHCHSSPETIQHITGACRSITQTDYKHRHDQVASIVHQYLANKYKLITEKSAYYKYVPQVILDSPDYKLYWDRTILTDRTVHHNRPDITLHDKKKKTVYLIDIAVPNTHNLASTHTEKITKYTDLAIELKSQWRVDSVKTVPIIISSTGVIPKLLHTSLKMLEIHPLTFILMQKAVILNTCRTVRKFLSSDS

SEQ ID NO: 26429 - protein, 1060 aa, Ephestia elutella
MAAVASFDLFHPITNTPTEQSHINHSQEDIGNTEEIIVTTQQGEIQNTSDSPNTLPPETESCIEQEFQNCLESYTGTDPTKRPRIPKQRASKKLAVIVSTLNNRIFPKYVTTETDFPTLQTVIYCGALTTAKMNGSKIIDTNSIRNKTPYKPSWEKRLEDKIKDLRVKAGRLTEYLNGNRGRELERQVDIIKQQYQIHSQHENENTDLTQFLDTIKQKINVAANRLRRYKETTERKRQNKQFNNNEKVFYRGLAQAQNSNNTDTPQTEALHAFWSDIWSNPVTHKENSWIEQDKELTRDIPNMQFQNISIDMLQTVIAKTHNWKATGSDNIHNFWYKKFTSIHTLLLTHINNFIQSPEIVPLYFTQGLTYMLPKDATDTANPAKYRPITCLQTIYKIITSCINESIYSHIVDHKILAEEQKGSRRNSRGCKEQLIIDAVATKQAHIKKRNIYSMYIDYQKAYDSVPHTWLIYILEHYKIHPTLINFLKNLMLNWNTKLILNNKNTNVETDFIKIRRGIFQGDALSPLWFCLALNPLSNLLKNSGKGFKIKSENTCHILSHLMYMDDIKLFGQSLEEINTLADITETFSADINMKFGIDKCKIQSVHKGKTENNTYILRNEEIIEPVDQAIGYKYLGYHQSQQIHHKEIKQKLTNEFRTRLHRILNTHLNARNTIKAINSFAIPILTYSFGIINWSQTDLKNLQRNINTLMTKYRKHHPRSCIQRLTLPKYEGGRGLIDIQNLHNKQISMLRLFFHKHSQQSPLHTATTQADNKYTPLNLKDNSKQKKEEITTTQEKLQAWIQKSLHGRHRLDLTNPNVDKAASNAWLKRGELFPETEGFMLAIQDQVIETKNYRKHIIRDINTQNDSCRHCHSSPETIQHITGACRSITQTDYKHRHDQVASIVHQYLANKYKLITEKSAYYKYVPQVILDSPDYKLYWDRTILTDRTVHHNRPDITLHDKKKKTVYLIDIAVPNTHNLASTHTEKITKYTDLAIELKSQWRVDSVKTVPIIISSTGVIPKLLHTSLKMLEIHPLTFILMQKAIILNTCRTVRKFLSSDS

SEQ ID NO: 26430 - protein, 1476 aa, Tuta absoluta
MEESYQRRYNLRSLPGGRRGTPGAGAGCSSMRTTGGGGLNRRVPPEKSMTADIISNPESLPTTNSNFSSPASSAYRTEGIKPFKSPNSSTESFYQTPNSSPYSFTNTPYSRSSTLSPMMPVGGEQEAQSANNNNFLIPSTHHHPEMQPEPRLTPTSLMPVDVESEAPADFLTPATSTTSRARKHWSDNMNRFIWRTYLLITNMERKKKKYLDQIQQLFTDRFPEMTVTKQRVGDQIRAIVRNKMLSDEVLNEIKKDVTQVLATQTTDQIIQNILIDNIHASAKLETQQGDNLINSNTEAEPSNGIRKNSDVLINIKPMTTKAGKPRQRLQWTEEINRHLLKSYYTVTNNETNLTGWRPQLHKKFAEMHPELQFLSEQRLSDQIRIIIKCNRILPEERELLKISPNSQSEDISEYNSMTSITIPMSPSCSQTQNDDDLTETVQTTIQQPPPPSQHNLLLSPPTTIATEDQNDKTENMIQHTDTTPLPIEIQNQIEDTLLETIDKFKNTEPTSRPAIPKQKTSKRFASIVCFLNEYAIPKLLELETDFYQTQLIIYSAAYTAAYYNGTKFNYTDPQKQPKDRVPKWQKHLEKRVADIRASIARLNEYMKGNRSETLQRKVKLIMDKYKIHAQFENPNTELLQFMDTLKQKLGVLASRLRRYKTTTKRKTQNKMFNNNEKLFYRTLTQNNLNTENTNNKPVPSKENLTGFWSRIWSNPVQHNNSRWIEEDKENLKELPEMEFDDISLDLLKKVIARTHNWKATGSDKIHNYWYKKFSSTHSLLLTHINTFIQSPHTLPDYITQGITYMLPKDDTDTANPAKYRPITCLQNIYKIITSCISEILYQHINDNSIMAEEQKGCRRHSQGCKEQLTIDAVISQQAKLKKRNIYTMYIDYKKAYDSVPHSWLVFILQHYKIHPTITQFLKTTMNKWNTVLKLKNSSESIETGPINIRRGIFQGDALSPLWFCLALNPLSKLLNNSSKGFKIKFDNEHQIISHLMYMDDIKLFSTTLSEIDKLAEITQTFSTDIQMQFGIDKCKMQSIRKGQIEQNYYELQTGETIDALDQTEGYKYLGYQQTQQIQQKETKITLIKRFKARLHKILHTHLNSRNTVKAINGYAVPILTYSFGIIRWSKSDLTKLQRAINTHMTQHRKHHPRACVQRQTLPRSEGGRGLIDIQNLHVRQIKSLRSYFHSKTQQSSIHHAVVQADNKLTPLNLKNTMLNLTETTKEHKIDAWKQKSLHGRHRLDLTNSIVDKVASNAWLKQGELFPETEGFMIAIQDQTKDTKNYRKYIIRDSTMQNDLCRHCHSSPETIQHITGACKSIAQTDYKHRHDQVAAIIHQYLAFKYKLISETVSYYKYIPQIILDSNDYKLYWDRTIMTDKTIHCNRPDITLHDKKNKIVFLIDIAVPNTHNLQSTYTEKITKYADLSIEIKTQWKVETVKTIPIVISSTGVIPHTLHVSNPYKYTQTPICRCKKQLC

SEQ ID NO: 26431 - protein, 888 aa, Tuta absoluta
MKGNRSETLQRKVKLIMDKYKIHAQFENPNTELLQFMDTLKQKLGVLASRLRRYKTTTKRKTQNKMFNNNEKLFYRTLTQNNLNTENTNNKPVPSKENLTGFWSRIWSNPVQHNNSRWIEEDKENLKELPEMEFDDISLDLLKKVIARTHNWKATGSDKIHNYWYKKFSSTHSLLLTHINTFIQSPHTLPDYITQGITYMLPKDETDTANPAKYRPITCLQNIYKIITSCISEILYQHINDNSIMAEEQKGCRRHSQGCKEQLTIDAVISQQAKLKKRNIYTMYIDYKKAYDSVPHSWLVFILQHYKIHPTVTQFLKTTMNKWNTVLKLKNSSESIETGPINIRRGIFQGDALSPLWFCLALNPLSKLLNNSSKGFKIKFDNEHQIISHLMYMDDIKLFGTTLSEIDKLAEITQTFSTDIQMQFGIDKCKMQSIRKGQIEQNYYELQTGETIDALDQTEGYKYLGYQQTQQIQQKETKITLIKRFKARLHKILHTHLNSRNTVKAINGYAVPILTYSFGIIRWSKSDLTKLQRAINTHMTQHRKHHPRACVQRQTLPRSEGGRGLIDIQNLHVRQIKSLRSYFHSKTQQSSIHHAVVQADNKLTPLNLKNTMLNLTETTKEHKIDAWKQKSLHGRHRLDLTNSIVDKVASNAWLKQGELFPETEGFMIAIQDQTIDTKNYRKYIIRDSTMQNDLCRHCHSSPETIQHITGACKSIAQTDYKHRHDQVAAIIHQYLAYKYKLISETVSYYKYIPQIILDSNDYKLYWDRTIMTDKTIHCNRPDITLHDKKNKTVFLIDIAVPNTHNLQSTYTEKITKYADLSIEIKTQWKVETVKTIPIVISSTGVIPHTLHVSLKSLQIHPNTYMQMQKAVVLNTCRIVRKFLSTSTQ

SEQ ID NO: 26432 - protein, 1275 aa, Eueides isabella
MDNISASAAVVSRTGKKWSVEMNIFIVRTYFILTALETKNINSYLTPLHAKFTKKFPNMQVSKQRISDQRRAIMYRNLLSTHKIKEIREDIRLLLEKEIQAGISYETSQNKTQIKRRIWPNEINETIMKSFYKITNLEKNMTAYRIQLHQEVISKHPTISDVSVQRIADQRRAIVNNKLITPQRLLEIRKEIQLQFDDNIISITENETKSPITSRSLITIEPNLYSIDEVNTGNQSEILNNNSKKQQPINHNETNKNNILIYQLTDEDKGSIDNTFDKCYTEFSLISPTQRPFIPKQKCTKKFCAIVNFINLTVLPKHLRTDTDFGTIHTFLYCSAYTAAVHNGTKINTGQERVQGNRNVPRWQMRLEDRIKDLRAKIGRITEFIHGNRNHRLQLHINKIKLNYKIHTQHEIENIQLSEFLDTLKQKLSALTNRLRRYTKARQRKVQNKQFIANEKQFYKSLSEGNSSNDQSTSNNSNKNQSPTASELHNFWSSIWSVPVEHTQNGWIDEQNNLCEQLPLMEFDTVDEKLLKFVISKIHNWKATGTDRIHNYWYKKLTSTHTLLLNHINNFIKSPNTLPHFLTQGITYMLAKDKNDTRNPAKYRPITCLQTLYKIITSCIAELIYSHINTNSILAEQQKGCRRHSQGCKEQLIIDLVTSKQALAKRKNIYTMYIDYKKAFDSVPHSWLLFILKLYKINPVITEFLRCNMQKWTTKLKLNNKSETIETETISIRRGIFQGDSLSPLWFCLSINPLSDMLNKTGKGYNIKHKDIQFTLSHLIYMDDIKLYSSNIQDIIKLADITQMFSKDIKMELGIDKCKMQSIRRGKKENNTYELQTGEEIGEIDSDNGYRYLGYQQTRQIHQKETKTELNQKFKQRLIAILKTNLNSRNTVKAINTFVVPILTYSFGIIRWSQSDLQKLQRTINTQMTKFRKHHPRSCIQRLTVPKYEGGRGLIDIKNLHNKQITSLRKFFHDRAQLSVFHKAVVESDCNYTPLNLQNEQKQYNEKNTTLEQKLKIWQAKSLHGRHRDDLLSPIVDKAASNAWLKKGQLFPETEGFMLAIQDQVIETRNYKKHIIHDIQIDLCRHCHSASETIQHITGACKSIAQTDYKHRHDQVACIIHQYLAKKLNLINETVPYYKYKPQTVIDNAEYKLYWDRTIITDKTVHYNRPDITLHIKKHKTIYLIDIAIPNTHNLSSTYTDKITKYTDLSIELKSQWQANIVKTIPIVLSSTGVIPVTLHACLKQLDLHPLLYIQLQKAVILNTCRIVRKFLSLE

SEQ ID NO: 26433 - protein, 1384 aa, Fabriciana adippe
MGGTKIIKQNFSFVLPPNQRSQNQPTMNSTHKRYHLRPLPGGRRGASGANAGCYSMRSVGDLELNRRTPVEEFATAELSSSSDHHTVSSTSLFQSSSCSLSSSPPSSSSFTSSFHSTEDVVQIANLADIPAPATVSSRTRKKWSIEMNIFIVRTYFILTSLETETKTYLTPLHAKFIEQFPDMQVSKQRIGDQRRAIMQKNLLSVHKIQEIKKEVSQLLQSQNHSQILTQSTLTATQSQRRRWTDEINETIMRCYYKITNLEKDMSSYRTQLHKEVTEKCPTIADVSVQRIADQRRVIVNNKLITSEKLTEIKKEIEQLINSSRTTGASQAKTTEPETPIISLINTAESIQSPVNVIPQSQNENLNGETRQHNVQYRLTEENKNSIDVTFSNSYTDFINTCPTQRPYIPKQKCTRKFNAIVNFINSTILPKYINLNDDFQKLHTILYCAAFTAAVHNGLKISNNQGRSIEPHKTPKWQSRLEDKVKDLRVKIGRLTEYINGNRSNKIRFYINIIKANHKIHSQHESENTELAEFLDTLKQKLSAIVSRLRRYKLAAQRKSQNKQFISNEKQFYKNLSQLNLNNKSTNKNELPTESELHNFWSSVWSTPAEHKQNHWIEEQNYLNEQIPQMKFSPIDIDLLKSVIAKTHSWKATGTDRIHNYWYKKFTSPHTFLLTHINNFIQSPTILPSFITQGITYMIPKDQTDRRDPAKYRPITCLQTIYKIITSCITELIYRHIDSNNILTEQQKGCRRYSQGCKEQLIIDSVTSKQALKKKRNIYNIYIDYKKAFDSVPHTWLIYVLHLYKIHPTIIEFLKTNMLKWTTQLKLNNVSSSIETQPIPIRRGIFQGDSLSPLWFCLSLNPLSDMLNNSGKGYKITYEHTHYKLSHLMYMDDIKLYASNLTDIHKLADITQMFSTDIQMEFGIDKCKMQSVRRGQKEHNFYELDSGEQIQPIDDENGYTYLGYQQSRQIHQKQTKIEIIKKFKLRLHKILNTALNARNTIKAINTYAVPIITYSFGIITWSQSDLLKLQRTINTLMTKYRKHHPRSCIQRLTIPKHEGGRGLIDIKNLHNKQITSLRKFFQNRSQYSELHKAVTKSDCKFTPLNLHDQQLQPKEHITQVQHKLDTWLAKSLHGRHRSDLLNPIVDKVASNAWLKKGELFPETEGFMIAIQDQIIETRNYKKHIIHDTQIDLCRHCHSASETIQHITEACKSIAQTDYKHRHDQVASIIHQYLAKKHNLIKEHVAYYKYKPQSVLESSDHKLYWDRTIITDRTVHHNRPDITLYDKKHKTVYLIDIAIPNTHNLSSTHSDKITKYIDLSIELKTQWQVHTVRTIPIILSTTGVIPLTLHASLKQLDIHPLLYIQLQKAVILNTCRIVRKFLSMQ

SEQ ID NO: 26434 - protein, 1039 aa, Plutella xylostella
MIDNSNEIPEPSHPECNPEIDATFQNALDFFINTEPTERPYIARQKTSKKFAKIVEYINERTLPVYVKPDIEFSLFQTIVYCAAWTAAKCNGTKLTLPPTDTSNRNNSNKKPKWQIRLEHRVEDLRSKIGKLTHYIAGNRNRKLVKNVEDIQKNYQTHSIHEDPNTQLTHFLDTLKQKLIVTASRLKRYKACTLRKTQNAQFTNNEKQFYRNLRNTTENKTPSQPQHNDTPTPGELQQFWAKIWENPVVHNTEADWIREEETKHAEIPSMEFEFVSIDTFQDVLKSLHNWKAPGTDHIHNYFYKKFTYIHPLLFNFVNNFIKNPNMLPEYITTGITYMLPKDPEDLSNPAKFRPITCLQTIYKIITSCLTRIIYLHSENNKILVEQQKGCRKYSQGCKEQLTIDAIILKIVQKKKQDLYSMYIDYKKAYDSVPHSWLLKVLTIYKIHPEIISFLNFIMNRWTTKLKLNNDTSEPIKIQRGIFQGDGFSPLWFCLALNPLSNVLNDTRTGFHFQNCDTKLNHLMYMDDIKLYANNESDLNILAETTDRLSKDMCMDFGIDKCRINSVKEGKSFEHHFETMSGDIITPLTENETYKYLGYSQNKQIQYKETKIKLIQQFKHRLNSILKTQLNSANTVKAINTYAIPILTYSFGIINWSKTELKNLQRIVNTTMTKFRKHHPRACIQRQTLPRSEGGRGIIDIRNLHNKQIQSLRHYFHEKAKTSTIYKEIVNTDSKLTPLNLKDYESQPNEEQLEKDDKLREWSGKSLHGRHPHDLSQPNVDKLASHEWLRRGELFPETEGFIIAIQDQVIETKNYQKHIMKLPGSQNDKCRKCNSAPETIQHITGACKSIVQTEYKHRHDQVANIIHQQLAIKYSLLPQPAIPYYKYVPEVVLESNTHKLYFDRAILTDRTTHFNRPDITIIHKQQKTAQIIDIAIPNTHNLQSTISEKLSKYTDLKDEVTRMWRLKSASIVPIVLSTTGVIPKQLDQSLKALDLPTHTYTILQKAAILNTCRIVRKFLQTDQPSQRQTSTTLENDAHLA

SEQ ID NO: 26435 - protein, 1212 aa, Plutella xylostella
MEKFPHMQVSRQRVGDQRRTIVNNKILPIETINTIKDEVATELRMTNTQVETTNSEKSQPSNTQTQRMRWTTEYNETIIRAYFRITNLETDITAYRPQLHQSFIETFPHLSHLSEQRIADQRRVIMNNKLLTQERLDHIRQEIEAELIVPTNEVQQPEQPNEPVFLNDIQSDCMIDNSNEIPEPRHPECNPEIDTTFQNALDFFINTEPTERPYIARQKTSKKFAKIVEYINERTLPVYVKPDIEFSLFQTIVYCAAWTAAKCNGTKLTLPPTDTSNRNNSNKKPKWQIRLEHRVEDLRSKIGKLTHYIAGNRNRKLVKNVEDIQKNYQTHSIHEDPNTQLTHFLDTLKQKLIVTASRLKRYKACTLRKTQNAQFTNNEKQFYRNLRNTTENKTPSQPQHNDTPTPGELQQFWAKIWENPVVHNTEADWIREEETKHAEIPSMEFEFVSIDTFQDVLKSLHNWKAPGTDHIHNYFYKKFTHIHPLLFNFVNNFIKNPNMLPEYITTGITYMLPKDPEDLSNPAKFRPITCLQTIYKIITSCLTRIIYLHSENNKILVEQQKGCRKYSQGCKEQLTIDAIILKIVQKKKQDLYSMYIDYKKAYDSVPHSWLLKVLTIYKIHPEIISFLNFIMNRWTTKLKLNNDTSEPIKIQRGIFQGDGLSPLWFCLALNPLSNVLNDTRTGFHFQNSDTKLNHLMYMDDIKLYANNESDLNILAETTDRLSKDMCMDFGIDKCRINSVKEGKSFEHHFETMSGDIITLLTENETYKYLGCSQNKQIQYKETKTKLIQQFKHRLNSILKTQLNSANTVKAINTYAIPILTYSFGIINWSKTELKNLQRIVNTTMTKFRKHHPRACIQRQTLPRSEGGRGIIDIRNLHNKQIQSLRHYFHEKAKTSTIYKEIVNTDSKLTPLNLKDYESQPNEEQLEKDDKLREWSGKSLHGRHPHDLSQPNVDKLASQEWLRRGELFPETEGFIIAIQDQVIETKNYQKHIMKLPGSQNDKCRKCNSAPETIQHITGACKSIVQTEYKHRHDQVANIIHQQLAIKYSLLPQPAIPYYKYVPEVVLESNTHKLYFDRAILTDRTTHFNRPDITIIHKQQKTAQIIDIAIPNTHNLQSTISEKLSKYTDLKDEVTRMWRLKSASIVPIVLSTTGVIPKQLDQSLKALDLPTHTYTILQKAAILNTCRIVRKFLQTDQPSQRQTSTTLENDAHLA

SEQ ID NO: 26436 - protein, 1439 aa, Plutella xylostella
MVAERKTKLPQAGPSVNSAGQSRTGPRGSGCPSYSGGGNVPLIRVTRSNSRSSPPAEETQNSTDNTAPTTRTRRYNLRSLPGGRRGASGASAGCDSMRTIGDAELSRRAPAEQFVTAEQFDPELEPYTLSSTSSDPSYRASPSLSTSSSFSILPVDVAQETTPVCESEPTTGKPSKRRKWTTEMNEFILRTYFQLTFVETDLSVYLPPLHTKFLEKFPNMQVSRQRVGDQRRAIIRNLLLPAETIEQIRNEVATELGNIPTQAAPHHASTQLHTSQPTNTQTPTQTQRIRWTPEYNEFIIREYFRMTDLETNSTAYRPQLHQAFINRFPQLNHLSEQRIADQRRVIINNQLVTQERIDQIRQEVDEELLSTINSTTAHNTTEETNETNFLNDIQHDCLTNSNSPSAPDIIPEINREIEETFQSALIYFLNTDPTERPYIPRQKPSKKLAKIIEYIDQQILPKNIKQDTQYNLFQAVLYSAAWTAAKLNGSKLTLSLDSSNTQNSKRKPKWQIRLERKISDLRAKISRLTHYIAGNRNRKLVLKVEEILKQYQTHSVHEDPNTQLAHFLDTLKQKLTVASNRLKRYNSCTLRKTQNIQFTNNQKQFYRNLQNSTTNNNTNSNPDMPPTHELHNFWSKIWENPVEHNKDAEWIKEEEIKISEIPQMEFENISIEIFQDVLKCLHNWKAPGSDHIHNYWYKKFTHIHPFLFNFINDFIKNPLLLPEYITQGITYMLPKDTEDMKNPAKYRPITCLQTIYKILTSCLTRIIYLHSENHNILAEQQKGCRKYSHGCKEQLTIDAVILKLVQKKKKDLFTMYIDYKKAYDSVPHSWLLKVLTLYKIHPDIITFLDFIMNQWSTKLKLSDKETDTIKIQRGIFQGDALSPLWFCLALNPLSNTLNNTNTGFRILKSDNSDFKLNHLLYMDDIKLYANTQTDLNLLAKTTDRLSKDIKMDFGIDKCRTNSVKAGKTFEHEYETIDGNHVEHLKEGESYKYLGYNQSKQIQTKETKTRLITQFKHRLNSILKTQLNATNTIKAINTYAIPILTYSFGIINWSKTELKNLQRIINTSMTKSRKHHPRACVQRQTLPRGEGGRGLIDILNLHNKQIQTLRHYFHEKAKTSEIHNAIVHTDNKLTPLNLQDHNPQTNEKQTEEAVKISEWTQKSLHGRHPHDLSQPNVDKLASHEWLRRGELFPETEGFMVAIQDQVIETKNYQKHIMKLPGSQNDKCRKCNSAPETIQHITGACKSIVQTDYKHRHDQVANIIHQKLAIKYNLLPQPPVPYYKYAPEVVLENNTHKLYFDRAILTDRTTHFNRPDITIIHKQLKTAQIIDIAIPNTHNLQSTISEKLAKYTDLRDEVTRMWHLESASIIPIVLSTTGVIPKQLHQSLRSLQLPAYTYITLQKAAILNTCRIVRKFLQNDPTQHNNPSLPSTTSQHDAHLA

SEQ ID NO: 26437 - protein, 1177 aa, Bursaphelenchus xylophilus
MEILWEDLRLKIEDRYGVTLPQRSASSLKNQYPKVILRGLPDSGLPWAGVQVNDTGQVVVVDHAEAATLRGSSPAAVDGEAEEPVVPPLPAAEVVESAADAAVPDPQSEIVADQGVETRPVENPPANSRETETEPVEVEPYLEGQYKFFVSKILGKSMWRKPIKYPRRVPETLWRQANELIERSIRQGEVSIQSLNCMVYAAGCAVKSSLDKKDQEAKRRESEWYACRKAEIKALERYLNFIDLELKRRSASRPLTSRQRQNLGVLITKYGRARVRSGVRLSELQAMLRDALVGIRKCMAKRSADKKRKQGKFVPIQRYLEPSSAEPRLSPDTVRAYWNDIVGSSQQSTSDSTIQDWSSNLSVPSQELNASKIMGWWRAAVSKSKPNKAAGPDGIPGVLWKRFRSASEWVCTWLYRLLQKRRIITPRWLSVGRVVLLPKKGPLEDPANYRPIACLNTVYKLITSVVEMAVREQIQACPGLVPYEQIANRKGVWGCTHASIVDRMITGASREGKGGGFPDLRVLFYDCKKAFDSVNRDHMFAVLRVANVNVKVVHLLHTLSQQWCVRYELRRNNRVERSSPLRVKRGLLQGDTLSPTWFCLCMAPISASIKTLNPGPTLRPNMGNGRNRGQVAIQVSHVFYMDDLKVYCPRVADQRRMEQNIPQLFGEIGLSINASKSAAAAAVGRYVESELPVLGTKDEYKYLGIESGFVVNEVAALDRMQAVLLNRVEAILSVKEHTVGQRRDAIRAKAIPGGAYILGHIILSDLDPRGAAERMRRLDIEIRRLVKSAGILHDKCSTARIHLSCEQGGLAWPSMERAYYVAVAYSASYLLTSQDETISRARDYFVSGRLSNKFTVYKHLTSIVDSLGLSVELPDPNGLPTGQPSVLARTIARAIDAKLEAQWKETLLTYQRAGRVERADPTVVDHANSYHWLRKAWINEKAYQHAVSVMEGTLLEGVNPHGVLTMCRACKAPSASIAHIITGCAELRKSHMKVRHDGVTRWLYNALTEVDGSLPKFHYTQQIPAEMRGERLTVRYDSDIVTPNKPRHNRPDLVVFDSTRKVIYIVEVSVTWLSVLQKQYDNKLNRYAVNSNHEFSESIPYPPGVNLANEIRVLYPQFTGGVKVFPMIISPTGEVHMQFVPHLAELLENPNIPRILEKIQRSVVLGTDYIIRSYFAM

SEQ ID NO: 26438 - protein, 1137 aa, Poecilobdella manillensis
MMMKNENKINDDVKCVNKRRQKWTNEQYKDVIWSYYFAMESNNGNVTIATYNIWRSRNPEIFPGMNPNNLSNHRRYILKEKKLSEFDLAEIDEDVKRKLRGSDLDVEQICGSEVCQGEDDSNSQQENLIYKQHQADSGQESLLTREFKSEEMIEAENKLISKFNQIKMIKIHERKNLNKITSPRQAEETIKLANQILLKVSTEMTLDLTKINELVYTVASLIAGEKFERKRVAVRFKVANWKMRIQKTINRYRKQLSMIKEFKNGNLDHKKQMGMNTMSLNQINELEQDVTMKLQAKAQRLRRYSKRSEQYHQNRMFRNDTKKFYRSISSKQIEIVDAPKLNTVDTFWRNILEKETHYNSDAEWIKYEEEIHANLNAYEWRDFQVEEISGIINQSHNWKSPGIDKIHNFWFKKLTALHKHLTDAYNEIMKEPSKIPTWLTEGITYLLPKSQETSKAKNYRPITCLPTTYKILTAAISKRIYNHFQSNSILPEEQKGCRKGSRGCKDQLLISQMVVQNSQKFKKNLNIAWIDYRKAFDSIPHSWIIRALQIYHVNDVIVQFIAQSMLKWKTRMTLRHNGGDIETTTIGINRGIFQGDSLSPLLFCIALIPLSNLINRTGLGYRIHKEQISHLFYMDDLKLFTSEHEDMQKVIRVVEIFSKDICMEFGIEKCATIEIKHGQPVVTKGIELMDDGKEEIKSLEIQEMYKYLGMEERDGLNNKLMKEKVKREYYSRIRKILKTQLSAKNKSTAINSFAVPVFAYGFGIIPWVKSEIEKCDRKTRKILTMNGMHHPGADIDRLYVKRNNGGRGIIELLSAYQQSILNLGEYIAAADGRLIQLVRKWDESRKKFSLQTETSKIKLKYKLNVTKELGKEFKNALETEKLKRITGKPLHGQFIKNLHNANIDNESSVQWLRKSDLKAETESLIIAAQDQALQTKYFKKMILHQGADGLCRMCHQHIESISHLISGCSMLAATEYLERHNRVARYIHWRIGRECGIPLTTTWYEHTPNGITKFDHGVLMWDYPIITDRTVPANRPDLIYHDKERRNCLIIDIAVPDDVNVPRKEMEKLTKYKDLQIEIQRMWGVRSQVIPVVIGALGMTSKKFKDYLDLIPGNPSPLEAQKIALCGTAHILRRILN

SEQ ID NO: 26439 - protein, 1138 aa, Poecilobdella manillensis
MMMKNENKINDDVKCVNKRRQKWTNEQYKDVIWSYYFAKESNNGNVTIATYNIWRSRNPEIFPGMNPNNLSNHRRYILKEKKLSEFDLAEIDEDVKRKLRGSDLDVEQICGSEVCQSEDDSNSQQENLIYKQHQADSGQESLLTRELKSEEMIEAENKLISKFNQIKMIKMHERKNLNKITSPRQADETIKLANQILLKVSTEMTLDLTKINELVYTVASLIAGEKFERKRVAVRFKVANWKMRIQKTINRCRKQLSMIKEVKNGNLDHKKQMGMNTMSLNQINELEQDVTMKLQAKAQRLRRYSKRSEQYHQNRMFRNDTKKFYRSISSKQIEIVDAPKLNTVDTFWRNILEKETHYNSDAEWIKYEEEIYANLNAYEWRDFHVEEISGIINQSHNWKSPGIDKIHNFWFKKLTALHKHLTDAYNEIMKEPSKIPTWLTEGITYLLPKSQETSKAKNYRPITCLPTTYKILTAAISKRIYNHFQSNSILPEEQKGCRKGSRGCKDQLLISQMIVQNSQKFKKNLNIAWIDYRKAFDSIPHSWIIRALQIYHVNDVIVQFIAQSMLKWKTRMTLRHNGGDIETTTIGINRGIFQGDSLSPLLFCIALIPLSNLINRTGLGYRINKEQISHLFYMDDLKLFTSEHEDMQKVIRVVEIFSKDICMEFGTEKCATIEIKHGQPVVTKGIELMDDGKEEIKSLEIQEMYKYLGMEERDGLNNKLMKEKVKREYYSRLRKILKTQLSAKNKTTAINSFAVPVFAYGFGIIPWVKSEIEKCDRKTRKILTMNGMHHPGADIDRLYVKRNNGGRGIIELLSAYQQSILNLGEYIAATDGRLIQLVRKWDESRKKFSLQTETSKIKLKYKLNVTKEHLGKELKNALEIEKLKRITGKPLHGQYIKNLHNANIDNESSTQWLRKSDLKAETESLIIAAQDQALQTKYFKKMILHQDADGLCRMCHQHIESISHLISGCSMLAATEYLERHNRVARYVHWRIGRECGIPLTTKWYEHTPNGITKFDHGVLMWDYPIITDRTVPANRPDLIYHDKKRRKCLIIDIAVPDDVNVPRKEMEKLTKYKDLQIEIQRMWGVRSQVIPVVVGALGMTSKKFKDYLDLIPGNPSPLEAQKIALCGTAHILRRILN

SEQ ID NO: 26440 - protein, 1138 aa, Poecilobdella manillensis
MMMKNENKINDDVKCVNKRRQKWTNEQYKDVIWSYYFAKESNNGNVTIATYNIWRSRNPEIFPGMNPNNLSNHRRYILKEKKLSEFDLVEIDEDVKRKLRGSDLDVEQICGSEVCQGEDDSNSQQENLIYRQHQADSGQESLLTREFKSEEMIEAENKLISKFNQIKMIKIHERKNLNKITSPRQAEETIKLANQILLKVSTEMTLDLTKINELVYTVASLIAGEKFERKRVAARFKVANWKMRIQKTINRYRKQLSMIKEFNNGNLDHKKQMGMNTMSLNQINELEQDVTMKLQAKAQRLRRYSKRSEQYHQNRMFRNDTKKFYRSISSKQIEIVDAPKLNTVDTFWRNILEKETHYNSDAEWIKYEEEIHANLNAYEWRDFQVEEISGIINQSHNWKSPGIDKIHNFWFKKLTALHKHLTDAYNEIMKEPSKIPPWLTEGITYLLPKSQETSKAKNYRPITCLPTTYKILTAAISKRIYNHFQSNSILPEEQKGCRKGSRGCKDQLLISQMVVQNSQKFKKNLNIAWIDYRKAFDSIPHSWIIRALQIYHVNDVIVQFIAQSMLKWKTRMTLRHNGGDIETTTIGINRGIFQGDSLSPLLFCIALIPLSNLINRTGLGYRIHKEQISHLFYMDDLKLFTSEHEDMQKVIRVVEIFSKDICMEFGIEKCATIEIKHGQPVVTKGIELMDDGKEEIKSLEIQEMYKYLGMEERDGLNNKLMKEKVKREYYSRIRKILKTQLSAKNKTTAINSFAVPVFAYGFGIIPWVKSEVEKCDRKTRKILTMNGMHHPGADIDRLYVKRNNGGRGIIELLSAYQQSILNLGEYIAAADGRLIQLVRKWDESRKKFSLQTETSKIKLKYKLNVTKGHLGKEFKNALETEKLKRITGKPLHGQFIKNLHNANIDSESSVQWLRKSDLKAETESLIIAAQDQALQTKYFKKMILHQDADGLCRMCHQHIESISHLVSGCSMLAATEYLERHNRVARYIHWRIGRECGIPLTTTWYEHTPNGITKLDHGVLMWDYPIITDRTVPANRPDLIYHDKKRRNCLIIDIAVPDDVNVPRKEMEKLTKYKDLQIEIQRMWGVRSQVIPVVIGALGMTSKKFKDYLDLIPGNPSPLEAQKIALCGTAHILRRILN

SEQ ID NO: 26441 - protein, 905 aa, Poecilobdella manillensis
MRFKVANWKMRIQKTINRYRKQLSMIKEFKNGNLDHKKQMGMNTMSLNQINELEQDVTMKLQAKAQRLRRYSKRSEQYHQNRMFRNDTKKFYRSISSKQIEIVDAPKLNTVDTFWRNILEKETHYNSDAEWIKYEEEIHANLNAYEWRDFQVEEISGIINQSHNWKSPGIDKIHNFWFKKLTALHKHLTDAYNEIMKEPSKIPTWLTEGITYLLPKSQETSKAKNYRPITCLPTTYKILTAAISKRIYNHFQSNSILPEEQKGCRKGSRGCKDQLLISQMVVQNSQKFKKNLNITWIDYRKAFDSIPHSWIIRALQIYHVNDVIVQFIAQSMLKWKTRMTLRHNGGDIETTTIGINRGIFQGDSLSPLLFCIALIPLSNLINRTGLGYRIHKEQISHLFYMDDLKLFTSEHEDMQKVIRVVEIFSKDISMEFGIEKCATIEIKHGQPVVTKGIELMDDGKEEIKSLEIQEMYKYLGMEERDGLNNKLMKEKVKREYYSRIRKILKTQLSAKNKTTAINSFAVPVFAYGFGIIPWVKSEIEKCDRKTRKILTMNGMHHPGADIDRLYVKRNNGGRGIIELLSAYQQSILNLGEYIAAADGRLIQLVRKWDESRKKFSLQTETSKIKLKYKLNVTKGHLGKEFKNALETEKLKRITGKPLHGQFIKNLHNANIDHESSVQWLRKSDLKAETESLIIAAQDQALQTKYFKKMILHQDADGLCRMCHQHIESISHLISGCSMLAATEYLERHNRVARYIHWRIGRECGIPLTTTWYEHTPNGITKFDHGVLMWDYPIITDRTVPANRPDLIYHDKKRRNCLIIDIAVPDDVNVPRKEMEKLTKYKDLQIEIQRMWGVRSQVIPVVIGALGMTSKKFKDYLDLIPGNPSPLEAQKIALCGTAHILRRILN

SEQ ID NO: 26442 - protein, 1138 aa, Poecilobdella manillensis
MMMKNENKINDDVKCVNKRRQKWTNEQYKDVIWSYYFAKESNNGNVTIATYNIWRSRNPEIFPGMNPNNLSNHRRYILKEKKLSEFDLAEIDEDVKRKLRGSDLDVEQICGSEVCQSEDDSNSQQENLIYKQHQADSGQESLLTRELKSEEMIEAENKLISKFNQIRMIKMHERKNLNKITSPRQADETIKLANQILLKVSTEMTLDLTKINELVYTVASLIAGEKFERKRVAVRFKVANWKMRIQKTINRCRKQLSMIKEFKNGNLDHKKQMGMNTMSLNQINELEQDVTMKLQAKAQRLRRYSKRSEQYHQNRMFRNDTKKFYRSISSKQIEIVDAPKLNTVDTFWRNILEKETHYNSDAEWIKYEEEIYANLNAYEWRDFQVEEISGIINQSHNWKSPGIDKIHNFWFKKLTALHKHLTDAYNEIMKEPSKIPTWLTEGITYLLPKSQETSKAKNYRPITCLPTTYKILTAAISKRIYNHFQSNSILPEEQKGCRKGSRGCKDQLLISQMIVQNSQKFKKNLNIAWIDYRKAFDSVPHSWIIRALQIYHVNDVIVQFIAQSMLKWKTRMTLRHNGGDIETTTIGINRGIFQGDSLSPLLFCIALIPLSNLINRTGLGYRIHKEQISHLFYMDDLKLFTSEHEDMQKVIRVVEIFSKDICMEFGTEKCATIEIKHGQPVVTKGIELMDDGKEEIKSLEIQEMYKYLGMEERDGLNNKLMKEKVKREYYSRLRKILKTQLSAKNKTTAINSFAVPVFAYGFGIIPWVKSEIEKCDRKTRKILTMNGMHHPGADIDRLYVKRNNGGRGIIELLSAYQQSILNLGEYIAATDGRLIQLVRKWDESRKKFSLQTETSKIKLKYKLNVTKEHLGKELKNALEIEKLKRITGKPLHGQYIKNLHNANIDNESSTQWLIKSDLKAETESLIIAAQDQALQTKYFKKMILHQDADGLCRMCHQHIESISHLISGCSMLAATEYLERHNRVARYVHWRIGRECGIPLTTKWYEHTPNGITKFDHGVLMWDYPIITDRTVPANRPDLIYHDKKRRKCLIIDIAVPDDVNVPRKEMEKLTKYKDLQIEIQRMWGVRSQVIPVVVGALGMTSKKFKDYLDLIPGNPSPLEAQKIALCGTAHILRRILN

SEQ ID NO: 26443 - protein, 1138 aa, Poecilobdella manillensis
MMMKNENKINDDVKCVNKRRQKWTNEQYKDVIWSYYFAKESNNGNVTIATYNIWRSRNPEIFPGMNPNNLSNHRRYILKEKKLSEFDLAEIDEDVKRKLRGSDLDVEQICGSEECQGEDDSNSQQENLIYKQHQADSGQESLLTREFKSEEMIEAENKLISKFNQIKMIKIHERKNLNKITSPRQAEETIKLANQILLKVSTEMTLDLTKINELVYTVASLIAGEKFERKRVAVRFKVANWKMRIQKTINRYRKQLSMIKEFKNGNLDHKKQMGMNTMSLNQINELEQDVTMKLQAKAQRLRRYSKRSEQYHQNRMFRNDTKKFYRSISSKQIEIVDAPKLNTVDTFWRNILEKETHYNSDAEWIKYEEEIHANLNAYEWRDFQVEEISGIINQSHNWKSPGIDKIHNFWFKKLTALHKHLTDAYNEIMKEPSKIPTWLTEGITYLLPKSQETSKAKNYRPITCLPTTYKILTAAISKRIYNHFQSNSILPEEQKGCRKGSRGYKDQLLISQMVVQNSQKFKKNLNIAWIDYRKAFDSVPHSWIIRALQIYHVNDVIVQFIAQSMLKWKTRMTLRHNGGDIETTTIGINRGIFQGDSLSPLLFCIALIPLSNLINRTGLGYRIHKEQISHLFYMDDLKLFTSEHEDMQKVIRVVEIFSKDICMEFGIEKCATIEIKHGQPVVTKGIELMDDGKEEIKSLEIQEMYKYLGMEERDGLNNKLMKEKVKREYYSRIRKILKTQLSAKNKTTAINSFAVPVFAYGFGIIPWVKSEIEKCDRKTRKILTMNGMHHPGADIDRLYVKRNNGGRGIIELLSAYQQSILNLGEYIAAADGRLIQLVRKWDESRKKFSLQTETSKIKLKYNLNVTKEHLGKEFKNALETEKLKRITGKPLHGQFIKNLHNANIDNESSVQWLRKSDLKAETESLIIAAQDQALQTKYFKKMILHQEADGLCRMCHQHIESISHLISGCSMLAATEYLERHNRVARYVHWRIGRECGIPLTTTWYEHTPNGITKFDHGVLMWDYPIITDRTVPANRPDLIYHDKKRRNCLIIDIAVPDDVNVPRKEMEKLTKYKDLQIEIQRMWGVRSQVIPVVVGALGMTSKKFKDYLDLIPGNPSPLEAQKIALCGTAHILRRILN

SEQ ID NO: 26444 - protein, 1134 aa, Poecilobdella manillensis
MMMKNENKINDDVKCVNKRRQKWTNEQYKDVIWSYYFAKESNNGNVTIATYNIWRSRNPEIFPGMNPNNLSNHRRYILKEKKLSEFDLAEIDEDVKRKLRGSDLDVEQICGSEVCQSEDDSNSQQENLIYKQHQADSGQESLLTREFKSEEMIEAENKLISKFNQIKMIKIHERKNLNKITSPRQAEETIKLANQILLKVSTEMTLDLTKINELVYTVASLIAGEKFERKRVAVRFKVANWKMRIQKTINRYRKQLSMIKEFKNGNLDHKKQMGMNTMSLNQINELEQDVTMKLQAKAQRLRRYSKRSEQYHQNRMFRNDTKKFYRSISSKQIEIVDAPKLNTVDTFWRNILEKETHYNSDAEWIKYEEEIYANLNAYEWRDFQVEEISGIINQSHNWKSPGIDKIHNFWFKKLTALHKHLTDAYNEIMKEPSKIPTWLTEGITYLLPKSQETSKAKNYRPITCLPTTYKILTAAISKRIYNHFQSNSILPEEQKGCRKGSRGCKDQLLISQMIVQNSQKFKKNLNIAWIDYRKAFDSIPHSWIIRALQIYHVNDVIVQFIAQSMLKWKTRMTLRHNGGDIETTTIGIFQGDSLSPLLFCIALIPLSNLINRTGLGYRIHKEQISHLFYMDDLKLFTSEHEDMQKVIRVVEIFSKDICMEFGTEKCATIEIKHGQPVVTKGIELMDDGKEEIKSLEIQEMYKYLGMEERDGLNNKLMKEKVKREYYSRLRKILKTQLSAKNKTTAINSFAVPVFAYGFGIIPWVKSEIEKCDRKTRKILTMNGMHHPGADIDRLYVKRNNGGRGIIELLSAYQQSILNLGEYIAATDGRLIQLVRKWDESRKKFSLQTETSKIKLKYNLNVTKEHLGKELKNALEIEKLKRITGKPLHGQYIKNLHNANIDNESSTQWLRKSDLKAETESLIIAAQDQALQTKYFKKMILHQDADGLCRMCHQHIESISHLISGCSMLAATEYLERHNRVARYIHWRIGRECGIPLTTKWYEHTPNGITKFDHGVLMWDYPIITDRTVPANRPDLTYHDKKRRKCLIIDIAVPDDVNVPRKEMEKLTKYKDLQIEIQRMWGVRSQVIPVVVGALGMTSKKFKDYLDLIPGNPSPLEAQKIALCGTAHILRRILN

SEQ ID NO: 26445 - protein, 1138 aa, Poecilobdella manillensis
MMMKNENKINDDVKCVNKRRQKWTNEQYKDVIWSYYFAKESNNGNVTIATYNIWRSRNPEIFPGMNPNNLSNHRRYILKEKKLSEFDLVEIDEDVKRKLRGSDLDVEQICGSEVCQGEDDSNSQQENLIYRQHQADSGQESLLTREFKSEEMIEAENKLISKLNQIKMIKIHERKNLNKITSPRQAEETIKLANQILLKVSTEMTLDLTKINELVYTVASLIAGEKFERKRVAARFKVANWKMRIQKTINRYRKQLSMIKEFKNGNLDHKKQMGMNTISLNQINELEQDVTMKLQAKAQRLRRYSKRSEQYHQNRMFRNDTKKFYRSISSKQIEIVDAPKLNTVDTFWRNILEKETHYNSDAEWIKYEEEIHANLNAYEWRDFQVEEISGVINQSHNWKSPGIDKIHNFWFKKLTALHKHLTDAYNEIMKEPSKIPPWLTEGITYLLPKSQETSKAKNYRPITCLPTTYKILTAAISKRIYNHFQSNSILPEEQKGCRKGSRGCKDQLLISQMVVQNSQKFKKNLNIAWIDYRKAFDSIPHSWIIRALQIYHVNDVIVQFIAQSMLKWKTRMTLRHNGGDIETTTIGINRGIFQGDSLSPLLFCIALIPLSNLINRTGLGYRIHKEQISHLFYMDDLKLFTSEHEDMQKVIRVVEIFSKDICMEFGIEKCATIEIKHGQPVVTKGIELMDDGKEEIKSLEIQEMYKYLGMEERDGLNNKLMKEKVKREYYSRIRKILKTQLSAKNKTTAINSFAVPVFAYGFGIIPWVKSEVEKCDRKTRKILTMNGMHHPGADIDRLYVKRNNGGRGIIELLSAYQQSILNLGEYIAAADGRLIQLVRKWDESRKKFSLQTETSKIKLKYKLNVTKGHLGKEFKNALETEKLKRITGKPLHGQFIKNLHNANIDSESSVQWLRKSDLKAETESLIIAAQDRALQTKYFKKMILHQDADGLCRMCHQHIESISHLVSGCSMLAATEYLERHNRVARYIHWRIGRECGIPLTTTWYEHTPNGITKLDHGVLMWDYPIITDRTVPANRPDLIYHDKKRRNCLIIDIAVPDDVNVPRKEMEKLTKYKDLQIEIQRMWGVRSQVIPVVIGALGMTSKKFKDYLDLIPGNPSPLEAQKIALCGTAHILRRILN

SEQ ID NO: 26446 - protein, 1138 aa, Poecilobdella manillensis
MMMKNENKINDDVKCVNKRRQKWTNEQYKDVIWSYYFAKESNNGNVTIATYNIWRSRNPEIFPGMNPNNLSNHRRYILKEKKLSEFDLAEIDEDVKRKLRGSDLDVEQICGSEVCQSEDDSNSQQENLIYKQHQADSGQESLLTRELKSEEMIEAENKLISKFNQIKMIKMHERKNLNKITSPRQADETIKLANQILLKVSTEMTLDLTKINELVYTVASLIAGEKFERKRVAVRFKVANWKMRIQKTINRYRKQLSMIKEFKNGNLDHKKQMGMNTMSLNQINELEQDVTMKLQAKAQRLRRYSKRSEQYHQNRMFRNDTKKFYRSISSKQIEIVDAPKLNTVDTFWRNILEKETHYNSDAEWIKYEEEIYANLNAYEWRDFQVEEISGIINQSHNWKSPGIDKIHNFWFKKLTALHKHLTDAYNEIMKEPSKIPTWLTEGITYLLPKSQETSKAKNYRPITCLPTTYKILTAAISKRIYNHFQSNSILPEEQKGCRKGSRGCKDQLLISQMIVQNSQKFKKNLNIAWIDYRKAFDSIPHSWIIRALQIYHVNDVIVQFIAQSMLKWKTRMTLRHNGGDIETTTIGINRGIFQGDSLSPLLFCIALIPLSNLINRTGLGYRIHKEQISHLFYMDDLKLFTSEHEDMQKVIRVVEIFSKDICMEFGTEKCATIEIKHGQPVVTKGIELMDDGKEEIKSLEIQEMYKYLGMEERDGLNNKLMKEKVKREYYSRLRKILKTQLSAKNKTTAINSFAVPVFAYGFGIIPWVKSEIEKCDRKTRKILTMNGMHHPGADIDRLYVKRNNGGRGIIELLSAYQQSILNLGEYIAATDGRLIQLVRKWDESRKKFSLQTETSKIKLKYKLNVTKEHLGKELKNALEIEKLKRITGKPLHGQYIKNLHNANIDNESSTQWLRKSDLKAETESLIIAAQDQALQTKYFKKMILHQDADGLCRMCHQHIESISHLISGCSMLAATEYLERHNRVARYVHWRIGRECGIPLTTKWYEHTPNGITKFDHGVLMWDYPIITDRTVPANRPDLTYHDKKRRKCLIIDIAVPDDVNVPRKEMEKLTKYKDLQIEIQRMWGVRSQVIPVVVGALGMTSKKFKDYLDLIPGNPSPLEAQKIALCGTAHILRRILN

SEQ ID NO: 26447 - protein, 1138 aa, Poecilobdella manillensis
MMMKNENKINDDVKCVNKRRRKWTNEQYKDVIWSYYFAKESNNGNVTIATYNIWRSRNPEIFPGMNPNNLSSHRRYILKEKKLSEFDLAEIDEDVKRKLRGSDLDVEQICGSEVCQGEDDSNSQQENLIYKQHQADSGQESLLTREFKSEEMIEAENKLISKFNQIKMIKIHERKNLNKITSPRQAEETIKLANQILLKVSTEMTLDLTKINELVYTVASLIAGEKFERKRVAVRFKVANWKMRIQKTINRYRKQLSMIKEFKNGNLDHKKQMGMNTMSLNQINELEQDVTMKLQAKAQRLRRYSKRSEQYHQNRMFRNDTKKFYRSISSKQIEIVDAPKLITVDTFWRNILEKETHYNSDAEWIKYEEEIHANLNAYEWRDFQVEEISGIINQSHNWKSPGIDKIHNFWFKKLTALHKHLTDAYNEIMKEPSKIPTWLTEGITYLLPKSQETSKAKNYRPITCLPTTYKILTAAISKRIYNHFQSNSILPEEQKGCRKGSRGCKDQLLISQMVVQNSQKFKKNLNIAWIDYRKAFDSVPHSWIIRALQIYHVNDVIVQFIAQSMLKWKTRMTLRHNGGDIETTTIGINRGIFQGDSLSPLLFCIALIPLSNLINRTGLGYRIHKEQISHLFYMDDLKLFTSEHEDMQKVIRVVEIFSKDICMEFGIEKCATIEIKHGQPVVTKGIELMDDGKEEIKSLEIQEMYKYLGMEERDGLNNKLMKEKVKREYYSRIRKILKTQLSAKNKTTAINSFAVPVFAYGFGIIPWVKSEIEKCDRKTRKILTMNGMHHPGADIDRLYVKRNNGGRGIIELLSAYQQSILNLGEYIAAADGRLIQLVRKWDESRKKFSLQTETSKIKLKYNLNVTKEHLGKEFKNALETEKLKRITGKPLHGQFIKNLHNANIDNESSVQWLRKSDLKAETESLIIAAQDQALQTKYFKKMILHQDADGLCRMCHQHIESISHLISGCSMLAATEYLERHNRVARYVHWRIGRECGIPLTTTWYEHTPNGITKFDHGVLMWDYPIITDRTVPANRPDLIYHDKKRRNCLIIDIAVPDDVNVPRKEMEKLTKYKDLQIEIQRMWGVRSQVIPVVVGALGITSKKFKDYLDLIPGNPSPLEAQKIALCGTAHILRRILN

SEQ ID NO: 26448 - protein, 1138 aa, Poecilobdella manillensis
MMMKNENKINDDVKCVNKRRQKWTNEQYKDVIWSYYFAKESNNGNVTIATYNIWRSRNPEIFPGMNPNNLSNHRRYILKEKKLSEFDLAEIDEDVKRKLRGSDLDVEQICGSEVCQSEDDSNSQQENLIYKQHQADSGQESLLTRELKSEEMIEAENKLISKFNQIKMIKMHERKNLNKITSPRQADETIKLANQILLKVSTEMTLDLTKINELVYTVASLIAGEKFERKRVAVRFKVANWKMRIQKTINRCRKQLSMIKEFKNGNLDHKKQMGMNTMSLNQINELEQDVTMKLQAKAQRLRRYSKRSEQYHQNRMFRNDTKKFYRSISSKQIEIVDAPKLNTVDTFWRNILEKETHYNSDAEWIKYEEEIYANLNAYEWRDFQVEEISGIINQSHNWKSPGIDKIHNFWFKKLTALHKHLTDAYNEIMKEPSKIPTWLTEGITYLLPKSQETSKAKNYRPITCLPTTYKILTAAISKRIYNHFQSNSILPEEQKGCRKGSRGCKDQLLISQMIVQNSQKFKKNLNIAWIDYRKAFDSIPHSWIIRALQIYHVNDVIVQFIAQSMLKWKTRMTLRHNGGDIETTTIGINRGIFQGDSLSPLLFCIALIPLSNLINRTGLGYRINKEQISHLFYMDDLKLFTSEHEDMQKVIRVVEIFSKDICMEFGTEKCATIEIKHGQPVVTKGIELMDDGKEEIKSLEIQEMYKYLGMEERDGLNNKLMKEKVKREYYSRLRKILKTQLSAKNKTTAINSFAVPVFAYGFGIIPWVKSEIEKCDRKTRKILTMNGMHHPGADIDRLYVKRNNGGRGIIELLSAYQQSILNLGEYIAATDGRLIQLVRKWDESRKKFSLQTETSKIKLKYKLNVTKEHLGKELKNALEIEKLKRITGKPLHGQYIKNLHNANIDNESSTQWLRKSDLKAETESLIIAAQDQALQTKYFKKMILHQDADGLCRMCHQHIESISHLISGCSMLAATEYLERHNRVARYVHWRIGRECGIPLTTKWYEHTPNGITKFDHGVLMWDYPIITDRTIPANRPDLIYHDKKRRKCLIIDIAVPDDVNVPRKEMEKLTKYKDLQIEIQRMWGVRSQVIPVVVGALGMTSKKFKDYLDLIPGNPSPLEAQKIALCGTAHILRRILN

SEQ ID NO: 26449 - protein, 987 aa, Poecilobdella manillensis
MIEAENKLISKFNQIKMIKMHERKNFNKITSPRQADETIKLANQILLKVSTEMTLDLTKINELVYTVASLIAGEKFERKRGAVRFKVANWKMRIQKTINRYRKQLSMIKEFKNGNLDHKKQMGMNTMSLNQINELEQDLTMKLQAKAQRLRRYSKRSEQYHQNRMFRNDTKKFYRSISSKQIEIVDAPKLNTVDTFWRNILEKETHYNSDAEWIKYEEEIYANLNAYEWRDFQVEEISGIINQSHNWKSPGIDEIHNFWFKKLTALHKHLTDAYNEIMKEPSKIPTWLTEGITYLVPKSQETSKAKNYRPITCLPTTYKILTAAISKRIYNHFQSNSILPEEQKGCRKGSRGCKDQLLISQMVVQNSQKFKKNLNIAWIDYRKAFDSIPHSWITRALQIYHVNDVIVQFIAQSMLKWKTRMTLRHNGGDIETTTIGINRGIFQGDSLSPLLFCIALIPLSNLINRTGLGYRIHKEQISHLFYMDDLKLFTSEHEDMQKVIRVVEIFSKDICMEFGIEKCATIEIKHGQPVVAKGIELMDDGKEEIKSLEIQEMYKYLGMEERDGLNNKLMKEKVKREYYSRIRKILKTQLSAKNKTTAINSFAIPVFAYGFGIIPWVKSEIEKCDRKTRKILTMNGMHHPGADIDRLYVKRNNGGRGIIELLSAYQQSILNLGEYIAAADGRLIQLVRKWDESRKKFSLQTETSKIKLKYKLDVTKEHLGKELENALETEKLKRITGKPLHGQFIKNVHNANIDNESSVQWLRKSDSKAETESLIIAAQDQALQTKYFKKMILHQDADGLCRMCHRHIESISHLISGCSMLAATEYLERHNRIARYVHWRIGRECGIPLTTKWYEHTPNGITKFDHGVLMWDYPIITDRTVPANRPDLIYHDKKRRNCLIIDIAVPDDVNVPRKEMEKLTKYKDLQIEIQRMWGVRSQVIPVVVGALGMTSKKFKDYLDLIPGNPSPLEAQKIALCGTAHILRRILN

SEQ ID NO: 26450 - protein, 1113 aa, Poecilobdella manillensis
MIIIIIIIIIIIIIIMIIMMMIIIIIIIWRSRNPEIFPGMNPNNLSNHRRYILKEKKLSEFDLVEIDEDVKRKLRGSDLDVEQICGSEVCQGEDDSNSQQENLIYRQHQADSGQESLLTREFKSEEMIEAENKLISKFNQIKMIKIHERKNLNKITSPRQAEETIKLANQILLKVSTEMTLDLTKINELVYTVASLIAGEKFERKRVAARFKVANWKMRIQKTINRYRKQLSMIKEFKNGNLDHKKQMGMNTMSLNQINELEQDVTMKLQAKAQRLRRYSKRSEQYHQNRMFRNDTKKFYRSISSKQIEIVDAPKLNTVDTFWRNILEKETHYNSDAEWIKYEEEIHANLNAYEWRDFQVEEISGIINQSHNWKSPGIDKIHNFWFKKLTALHKHLTDAYNEIMKEPSKIPPWLTEGITYLLPKSQETSKAKNYRPITCLPTTYKILTAAISKRIYNHFQSNSILPEEQKGCRKGSRGCKDQLLISQMVVQNSQKFKKNLNIAWIDYRKAFDSIPHSWIIRALQIYHVNDVIVQFIAQSMLKWRTRMTLRHNGGDIETTIIGINRGIFQGDSLSPLLFCIALIPLSNLINRTGLGYRIHKEQISHLFYMDDLKLFTSEHEDMQKVIRVVEIFSKDICMEFGIEKCATIEIKHGQPVVTKGIELMDDGKEEIKSLEIQEMYKYLGMEERDGLNNKLMKEKVKREYYSRIRKILKTQLSAKNKTTAINSFAVPVFAYGFGIIPWVKSEVEKCDRKTRKILTMNGMHHPGADIDRLYVKRNNGGRGIIELLSAYQQSILNLGEYIAAADGRLIQLVRKWDESRKKFSLQTETSKIKLKYKLNVTKGHLGKEFKNALETEKLKRITGKPLHGQFIKNLHNANIDSESSVQWLRKSDLKAETESLIIAAQDRALQTKYFKKMILHQDADGLCRMCRQHIESISHLVSGCSMLAATEYLERHNRVARYIHWRIGRECGIPLTTTWYEHTPNGITKLDHGVLMWDYPIITDRTVPANRPDLIYHDKKRRNCLIIDIAVPDDVNVPRKEMEKLTKYKDLQIEIQRMWGVRSQVIPVVIGALGMTSKKFKDYLDLIPGNPSPLEAQKIALCGTAHILRRILN

SEQ ID NO: 26451 - protein, 896 aa, Poecilobdella manillensis
MRIQKTINRYRKQLSMIKEFKNGNLDHKKQMGMNTMSLNQINELEQDVTMKLQAKAQRLRRYSKRSEQYHQNRMFRNDTKKFYRSISSKQIEIVDAPKLNTVDTFWRNILEKETHYNSDAEWIKYEEEIYANLNAYEWRDFQVEEISGIINQSHNWKSPGIDKIHNFWFKKLTALHKHLTDVYNEIMKEPSKIPTWLTEGITYLLPKSQETSKAKNYRPITCLPTTYKILTAAISKRIYNHFQSNSILPEEQKGCRKGSRGCKDQLLISQMIVQNSQKFKKNLNIAWIDYRKAFDSIPHSWIIRALQIYHVNDVIVQFIAQSMLKWKTRMTLRHNGGDIETTTIRINRGIFQGDSLSPLLFCIALIPLSNLINRTGLGYRIHKEQISHLFYMDDLKLFTSEHEDMQKVIRVVEIFSKDICMEFGTEKCATIEIKHGQPVVTKGIELMDDGKEEIKSLEIQEMYKYLGMEERDGLNNKLMKEKVKREYYSRLRKILKTQLSAKNKTTAINSFAVPVFAYGFGIIPWVKSEIEKCDRKTRKILTMNGMHHPGADIDRLYVKRNNGGRGIIELLSAYQQSILNLGEYIAATDGRLIQFVRKWDESRKKFSLQTETSKIKSKYKLNVTKEHLGKELKNALEIEKLKRITGKPLHGQYIKNLHNANIDNESSTQWLRKSDLKAETESLIIAAQDQALQTKYFKKMILHQDADGLCRMCHQHIESISHLISGCSMLAATEYLERHNRVARYVHWRIGRECGIPLTTKWYEHTPNGITKFDHGVLMWDYPIITDRTVPANRPDLTYHDKKRRKCLIIDIAVPDDVNVPRKEMEKLTKYKDLQIEIQRMWGVRSQVIPVVVGALGMTSKKFKDYLDLIPGNPSPLEAQKIALCGTAHILRRILN

SEQ ID NO: 26452 - protein, 896 aa, Poecilobdella manillensis
MRIQKTINRYRKQLSMIKEFKNGNLDHKKQMGMNTMSLNQINELEQDVTMKLQAKAQRLRRYSKRSEQYHQNRMFRNDTKKFYRSISSKQIEIVDAPKLNTVDTFWRNILEKETHYNSDAEWIKYEEEIHANLNAYEWRDFQVEEISGIINQSHNWKSPGIDKIHNFWFKKLTALHKHLTDAYNEIMKEPSKIPPWLTEGITYLLPKSQETSKAKNYRPITCLPTTYKILTAAISKRIYNHFQSNSILPEEQKGCRKGSRGCKDQLLISQMVVQNSQKFKKNLNIAWIDYRKAFDSIPHSWIIRALQIYHVNDVIVQFIAQSMLKWKTRMTLRHNGGDIETTTIGINRGIFQGDSLSPLLFCIALIPLSNLINRTGLGYRIHKEQISHLFYMDDLKLFTSEHEDMQKVIRVVEIFSKDICMEFGIEKCATIEIKHGQPVVTKGIELMDDGKEEIKSLEIQEMYNYLGMEERDGLNNKLMKEKVKREYYSRIRKILKTQLSAKNKTTAINSFAVPVFAYGFGIIPWVKSEVEKCDRKTRKILTMNGMHHPGADIDRLYVKRNNGGRGIIELLSAYQQSILNLGEYIAAADGRLIQLVRKWDESRKKFSLQTETSKIKLKYKLNVTKGHLGKEFKNALETEKLKRITGKPLHGQFIKNLHNANIDSESSVQWLRKSDLKAETESLIIAAQDQALQTKYFKKMILHQDADGLCRMCHQHIESISHLVSGCSMLAATEYLERHNRVARYIHWRIGRECGIPLTTTWYEHTPNGITKLDHGVLMWDYPIITDRTVPANRPDLIYHDKKRRNCLIIDIAVPDDVNVPRKEMEKLTKYKDLQIEIQRMWGVRSQVIPVVIGALGMTSKKFKDYLDLIPGNPSPLEAQKIALCGTAHILRRILN

SEQ ID NO: 26453 - protein, 1138 aa, Poecilobdella manillensis
MMMKNENKINDDVKCVNKRRQKWTNEQYKDVIWSYYFAKESNNGNVTIATYNIWRSRNPEIFPGMNPNNLSNHRRYILKEKKLSEFDLAEIDEDVKQKLRGSDLDVEQICGSEVCQSEDDSNSQQENLIYKQHQADSGQESLLTREFKSEEMIEAENKLISKFNQIKMIKIHERKNLNKITSPRQAEETIKLANQILLKVSTEMTLDLTKINELVYTVASLIAGEKFERKRVAVRFKVANWKMRIQKTINRYRKQLSMIKEFKNGNLDHKKQMGMNTMSLNQINELEQDVTMKLQAKAQRLRRYSKRSEQYHQNRMFRNDTKKFYRSISSKQIEIVDAPKLNTVDTFWRNILEKETHYNSDAEWIKYEEEIYANLNAYEWRDFQVEEISGIINQSHNWKSPGIDKIHNFWFKKLTALHKHLTDAYNEIMKEPSKIPTWLTEGITYLLPKSQETSKAKNYRPITCLPTTYKILTAAISKRIYNHFQSNSILPEEQKGCRKGSRGCKDQLLISQMIVQNSQKFKKNLNIAWIDYRKAFDSIPHSWIIRALQIYHVNDVIVQFIAQSMLKWKTRMTLRHNGGDIETTTIGINRGIFQGDSLSPLLFCIALIPLSNLINRTGLGYRIHKEQISHLFYMDDLKLFTSEHEDMQKVIRVVEIFSKDICMEFGTEKCATIEIKYGQPVVAKGIELMDDGKEEIKSLEIQEMYKYLGMEERDGLNNKLMKEKVKREYYSRLRKILKTQLSAKNKTTAINSFAVPVFAYGFGIIPWVKSEIEKCDRKTRKILTMNGMHHPGADIDRLYVKRNNGGRGIIELLSAYQQSILNLGEYIAATDGRLIQLVRKWDESRKKFSLQTETSKIKLKYNLNVTKEHLGKELKNALEIEKLKRITGKPLHGQYIKNLHNANIDNESSTQWLRKSDLKAETESLIIAAQDQALQTKYFKKMILHQDADGLCRMCHQHIESISHLISGCSMLAATEYLERHNRVARYIHWRIGRECGIPLTTKWYEHTPNGITKFDHGVLMWDYPIITDRTIPANRPDLTYHDKKRRKCLIIDIAVPDDVNVPRKEMEKLTKYKDLQIEIQRMWGVRSQVVPVVVGALGMTSKKFKDYLDLIPGNPSPLEAQKIALCGTAHILRRILN

SEQ ID NO: 26454 - protein, 1138 aa, Poecilobdella manillensis
MMMKNENKINDDVKCVNKRRQKWTNEQYKDVIWSYYFAKESNNGNVTIATYNIWRSRNPEIFPGMNPNNLSNHRRYILKEKKLSEFDLAEIDEDVKRKLRGSDLDVEHICGSEVCQGEDDSNSQQENLIYKQHQADSGQESLLTREFKSEEMIEAENKLISKFNQIKMIKIHERKNLNKITSPRQVEETIKLANQILLKVSTEMTLDLTKINELVYTVASLIAGEKFERKRVAVRFKVANWKMRIQKTINRYRKQLSMIKEFKNGNLDHKKQMGMNTMSLNQINELEQDVTMKLQARAQRLRRYSKRSEQYHQNRMFRNDTKKFYRSISSKQIEIVDAPKLNTVDTFWRNILEKETHYNSDAEWIKYEEEIHANLNAYEWRDFQVEEISGIINQSHNWKSPGIDKIHNFWFKKLTALHKHLTDAYNEIMKEPSKIPTWLTEGITYLLPKSQETSKAKNYRPITCLPTTYKILTAAISKRIYNHFQSNSILPEEQKGCRKGSRGCKDQLLISQMVVQNSQKFKKNLNIAWIDYRKAFDSIPHSWIIRALQIYHVNDVIVQFIAQSMLKWKTRMTLRHNGGDIETTTIGINRGIFQGDSLSPLLFCIALIPLSNLINRTGLGYRIHKEQISHLFYMDDLKLFTSEHEDMQKVIRVVEIFSKDICMEFGIEKCATIEIKHGQPVVTKGIELMDDGKEKIKSLEIQEMYKYLGMEERDGLNNKLMKEKVKREYYSRIRKILKTQLSAKNKTTAINSFAVPVFAYGFGIIPWVKSEIEKCDRRTRKLLTMNGMHHPGADIDRLYVKRNNGGRGIIELLSAYQQSILNLGEYIAAADGRLIQLVRKWDESRKKFSLQTETSKIKLKYKLNVTKEHLGKEFKNALETEKLKRITGKPLHGQFIKNLHNANIDNQSSVQWLSKSDLKAETESLIIAAQDQALQTKYFKKMILHQDADGLCRMCHQHIESISHLISGCSMLAATEYLERHNRVARYVHWRIGRECGIPLTTTWYEHTPNGITKFDHGVLMWDYPIITDRTVPANRPDLIYHDKKRRNCLIIDIAVPDDVNVPRKEMEKLTKYKDLQIEIQRMWGVRSQVIPVVVGALGMTSKKFKDYLDLIPGNPSPLEAQKIALCGTAHILRRILN

SEQ ID NO: 26455 - protein, 1447 aa, Lytechinus pictus
MYIVSHKTRHYRKRMKETWLKNNGDPSVGEQALADMKQSILRTQYFSEIELERIKQEAHILCREVNNAGNDDTIDDHGDAKDSDHDNAGTGDTNNGPDDNADVVDANDGHGDSDDKKADDDVIEDHNDADDKNTDDDDAYEIYGHSDYNSANGDEAKVGKSMILDTQSLHNKVRRKGEKKLWSNKEKENLMTCFYFATDVSHKTRHYRKRMRETWLVNNGDPSVGEEGLVDMKQSIISTQYFSDIELERIKENAQSLCRERKRNATKNQDDSGKRITDKVDKLHDTNNDKERSGKGKNSVITNTEKVRNSIHDEGSTVSGNTVNIFLDEGIIFNNQQDVRTQSDRGLRDGEHNQRISQEQRMNRLDMDSAQKKKKDDYIAQFGACSLSLLQKLDEIETVDTQIEAEYQRGAHFFQYCDTSDNKPAGGEGKGSTMNRRKNSSYKTGFSSHVDIHQHLQQPKVKYRTLRVTAIEKAKKRQEITETEHGDDVAHFLCGGEPHIQQDKEYERNVSGNIISSVPERDAIVSQDSTNEDRDSDQRLLSALRSNFEYVKGISISDRPQIPKIDTRCCTTRSVIDKVDKMLEKVQSSPSSLLEINCLIWAGAKTVTEHMGLKLHSSNHSTNHKKKAPEWKKRLQTKIAELHKDVAQLGEVDKGNIKSNRMKSNTKRLQKKYRIDDKTRTRTTVIETLKMKINALKHRVKRYTKSNNFKRQNKLFHGNRKKFFRELDSKMTETKDVPSADDMKNYWKELWDNDITHEETPWIQSEADKWSNVPAQQLVDLTLPELHNIIRNTQNWKSPGPDGVQNFWIKKFGSTHTNLLKIINDIIKGNRTIEKWLPIGRTYLLYKGKDPKQPKNYRPITCLNTMYKLLTSTLAMHIERHIDDHDIMEVTQKGCRKGKKGCKDHLMTNKAILGNARQRQTNLSMAWIDYRKAFDSVPHSWIIKVLEMYHINPQIVKCISAGMKQWSTTLSHTIGTRSMTVEGVRIKRGIFQGDSLSPLLFCLALNPVCSLLHATSYGYRYKGQDVSTTINHLIYMDDIKLFAKNDDELHKMITVVKHFSDDIKMSFGIDKCAKVTLVRGRGVNTGDMFVQDEETSIKELTNDSTYKYLGIAENDVISHNTMKEKATSEYKRRLRLILKSELNAKNKIEAINTLAIPVLRYSFGIVNWRQADICGLDVMTRKQLTIHRLHHPKAAIERLYLPRDLGGRGLQQIEMVWNMEATNLANYLSNPPDILTSISLDYDKCQAIYSINKQASILMAQHRLTLPYGEKEKARLKCSFHKKLQEQLKSKRLHGHHEKQTHREFVDQKDTHQWLKSAGLRGETEGFVYAIQDQVVRTRAYEKSILRRDTDDTCRMCGKETETIMHLVSACSTLAGTEYITRHDNIAKVIHWQLLKDRGKMTCDHAWEHQPQTITTINNSTIYWNCGILTDRTINCNKPDIIVRTTT

SEQ ID NO: 26456 - protein, 1439 aa, Tuta absoluta
MEDSTNMKRYSLRPLPGGRRGTPGAGAGCLSMRTTGGGGLTRRVPPEQNATADTTHTPSDISSNNSLSSSPISSPYRIEMPSRSTTASPMSEDVAQEAIAINPVPTTDKTSTRKRWPEEINKFIWRTYLIVTKLDTNRQRYLDSLYSEFVKQYPDFQTTKQRLGDQRRAIVNNKLLSQSTLNEIKKDVANLLLSVNQPTEYNNQVVFNNQNTSDSPTTSAALDVSQGIAVTSQFATTKAGKPRVRKVWSNEINTFIMRTYYYITNLENDRTMYSKKLYDGFKAQFPEWDVSEHRVADQKRAIIRNKLLSDSVIHQIRAEVAEQIRSEADLDLANNSDTINILSPIQIPPTSRTLTTNISPFTLSPSHTQNVEYSPIENYTYADIVRNSLSPTFSRVPSQSSTSDHITHTTQNTTRHNNGANDMPSPETYVQETSHQLELLIAQYRDIDPATRPRLPRLKDNKMLYELIHVFNHQILPQFCLTVSDVSMVHTLIYCSALIISQQLGYKIKLDNVNNNKRDNKNIPKWQSRLEKDIKNLRADIGRLTRYMNGIRTSRLVEKVEIIFQNLKVHSTHENENSRPEDYLDTLKQKLALKSHRLTRYKKSLMRKKDNKLFTSNEKAFYRSINSSGENGDNLSNIPTECDLKNYWGKIWETRTQHNETADWINDEAQQWNEVEEMEFTDITKIDIQEVTQRMKNWKAPGPDMIHNFWLKKFTFLHEKLAKIITGLINGQIPLPSFVTKGVTYMLPKSKNTSDPSQYRPITCLPTFYKLITSCLTKKISCHLESHNILSEEQKGCRRNHMGCKEQLVIDSIILKHANKYSKNLNLTYIDYKKAFDSVPHSWLIHILQIYKINPTIITFLKDAMASWKTTLNLKTSTCTIETGEVQIRNGIFQGDSLSPLWFCLALNPLSRLLAQPKSGYQLTHNTAITHLMYMDDIKLFGKSDRDMEKLIKITTEFSKDIRMNFGLNKCKTIHIYRGKLKEGDFILNEEECISAMKEGEQYKYLGILQGRIVNHSDLKGKLMTEFTKRVRQICKRKLNSRNLIKALNTFAIPVLTYSFGILKWSRTDINNLEIKTRTILTKFNYHHPKSAIERISTKRHQGGRGLIDLKILWEDQLVSLRKFFYTKAEASPMHQAAVETDANFTPLNLKESTIQYKTSIEREKEKIETWKKKELHGRHIRDLEQSHIDKDASNKWLKLGYLFPETEGFAIAIQDQIINTRNYKKHILKESLVADTCRKCHRQSETIQHITGACSSLAQTDYTHRHNQVTHYIHQKLAFKYKLITDNHKTPYYQYTPSPVLENPSTKLYYDRAVLTDRTIHFNRPDIILIDKTNKTAYLIDVTIPNTHNILKSITEKINKYAELKEEVLRIWNLDKVFVIPLVLSTTGIIPHHLHKSIKILDLPPNTFITMQKAAILNTCRIVRKFLSTDVEIDPANP

SEQ ID NO: 26457 - protein, 997 aa, Popillia japonica
MNVYLYRCYLRITKMETIRTQYSAELYKRMCDAFPELRNKTLQNILDQRRQLFKNNRIPQPVIAKVREEVQKELGMITTTNADEDKQTPADVETQSPDDKYTATLCRNLMLYKGTDPTKRPKLMRLRMKLDTNATMGYVNERMAHHVSQCKNIEELQTVVYAAATSVLELNSQTRRPQTQQPSTKKKTASWERRLTNKINTLREQIGRVTGAVRDTIKNERTKREVRTIIEKYKSAENPNMTDVLDLLKQRLAVLSNRLRRYRVSRLRRQQNQQFAVNQKQFYRDLESQEVTNRENNVYDIDAMRTFWDTIWSVPETHNRKAGWIEEEERRMRNTTIMRPVHVSKEDLQAAISKTANWKAPGVDGIHNFWYKKLDKAHDKMAELFNEVVTSPTKMPRFMTCGITYLLPKTTPPAPDPAMYRPITCLPTIYKILTAIIATKITEHLTDNDVMAEEQKGSRQRSRGCKEQLLIDAIVTGNAKKARADLCTAYIDYRKAFDSIPHTWLLHALEIYKIDPVIVNVLETIMNAWNTTLILNGNIKSSPIKIRRGIFQGDALSPLWFCLALNPLSFQLNKNQYGYQLKNRDHNISHLFYMDDLKLYSNNNTNMQKLLRRTETFSKDIRMEFGLDKCGIHSMHRGKWKKEPDYTLTRTNKNGTPQVIKNMEEDEAYKYLGMEQNRGINKSKVKDKLKTETKRRIVKVLKTKLSARNICTAVNTFAIPVLVYSFGVIHWTPTELDQLNRDIRVLFTKHRAHHPRASIERFHLPRQHGGRGVIDVKNMYYRQVSNLRGYFIGKATTSKLHKAMTLADTSITPLNLASADYDPALQITSNDMKIDQWKAKELHGRFAHRLEDEHIDRTASLQWLTYGNIFPETEGFAIAIQDQVIPTRSYKKYILKDQSVPSTLCRICQNQNETIEHLLCSCTPLANTDYMRRHNNVAKILHQAIARLYDDDADFTPYYNYTPPNVIDTDEIKLYWDRTVLTDRTVAHNRPDITLTL

SEQ ID NO: 26458 - protein, 969 aa, Popillia japonica
MKLDTNATMGYVNERMAHHVSQCKNIEELQTVVYAAATSVLELNSQTRRPQTQQPSTKKKTASWERRLTNKINTLREQIGRVTGAVRDTIKNERTKREVRTIIEKYKSAENPNMTDVLDLLKQRLAVLSNRLRRYRVSKLRRQQNQQFAVNQKQFYRDLESQEVTNRENNVYDIDAMRTFWDTIWSVPETHNRKAGWIEEEERRMRNTTIMRPVHVSKEDLQAAISKTANWKAPGVDGIHNFWYKKLDKAHDKMAELFNEVVTSPTKMPRFMTCGITYLLPKTTPPAPDPAMYRPITCLPTIYKILTAIIATKITEHLTNNDVMAEEQKGSRQRSRGCKEQLLIDAIVTGNAKKARADLCTAYIDYRKAFDSIPHTWLLHALEIYKIDPVIVNVLETIMNAWNTTLILNGNIKSSPIKIRRGIFQGDALSPLWFCLALNPLSFQLNKNQYGYQLKNRDHNISHLFYMDDLKLYSNNNTNMQKLLRRTETFSKDIRMEFGLDKCGIHSMHRGKWKKEPDYTLTRTNKNGTPQVIKNMEEDEAYKYLGMEQNRGINKSKVKDKLKTETKRRIVKVLKTKLSARNICTAVNTFAIPVLVYSFGVIHWTPTELDQLNRDIRVLFTKHRAHHPRASIERLHLPRQHGGRGVIDVKNMYYRQVSNLRGYFIGKATTSKLHKAMTLADTSITPLNLASADYDPALQITSNDMKIDQWKAKELHGRFAHRLEDEHIDRTASLQWLTYGNIFPETEGFAIAIQDQVIPTRSYKKYILKDQSVPSTLCRICQNQNETIEHLLCSCTPLANTDYMRRHNNVAKILHQAIARLYDDDADFTPYYNYTPPNVIDTDEIKLYWDRTVLTDRTVAHNRPDITLTLKKKKTTYLVDVAVPAPANVKMKYNEKIQKYLPLSQDIRNTWQQEVVSVIPVIVGATGEIPKSLHEALKQLGLPQQLYKQLQKTVILEACHIMRKTLNEA

SEQ ID NO: 26459 - protein, 899 aa, Mesochordaeus erythrocephalus
MNKQNNKYMDLYNPDIVRVFGPGNELDHFPTLREWVRGKVDGSDRSIQSELIKHFRRGYRNRRTKQPVKSDVNAKFRKNPSGTVRSLGKAVANHTLPEIGEILSFYKELYADQERDIVVEAINLNVENFERDEVKGAIARISNSACGLDRITAQSVRGRKECNTTITVLTTFFNMCLKEGIPSWLKAARVRLIPKVPHAKEIGEFRPIAITSHLYRAFMGLVAGRLEREIMPQIHKAQSGYRKSVNGSAKNLAIVRSIIADSGVNRRSLALASVDISKAFDTIKHSKVIEALEKLGASPSMVAVVSDSLSDSAMEFAGIGGHGRIVPQRGIPQGNPISGLLFIAAMNDIVDYVAENSAYVSSNGVKIGGVSMVDDLVMCTTTRSQLQYKFRTVIRMLAERGWALNVSKSFGFARKRVKRGMVTEEKPIRTIEGTELRWNCGEFKYLGLQIGASVQLSSNFGSMLIDVRRSLNEVEKSGLSISNKLTAISKCIIPKYIYKLSNVSIKGVWTVKRSNDGERRINTPRTYLNIDKEVMKTVKRIMRIPENGVSMDYAYLPIGSGGMGLPKLALMVPRMRIMSFVKMGLVGRTRGLVERFAFNDVKLQREILLTQGIVNVGERSWKQQKVKAIARSVRERVSTRSAFIPSQGEGICPLSKRIDGSGPGFTGKRLQRAFRLRIGAMPTNSYKFRRKTVRSPVCRLCHVSPETAEHLLCNEECANHSFRLNRHDRVRDKVEAYLRRGSLTGVMIITEVIFKGVDRWYRPDIIVVESGFITIIDIACAWEIKLGKSRLSEVANGKVIKYSTPDAKATISKACQEFGASRDAKFSVSPFVVGARGGYKVPSDAFVSLLKRLKLGSYKTIYHRCAETSMAMSAKELSKVICGEGEFGTTRYSGEGREQ

SEQ ID NO: 26460 - protein, 899 aa, Bathochordaeus stygius
MKRKVTKNMDVVNTAIARVFKPYDELDHFPTLRKWVSGEVDKSNRSIQAELIKHFRRGFRSRKGKKSAKTDVNEKFRNNPSGTVRSLGKPIANHTLPAIGEILGFYRKLYADEEREMSVEAINLSIKNFEREEVKGAMAKISNSACGLDRISAQSIRERRECDTTIGVLTIFFNMCMKDGIPSWLKASRMRLIPKVSHAKEIGEFRPIAITSHLYRAFMGLVARRLESEIMPQIHNAQSGYRMGVNGSAKNLAIIRSVIADSGVNRRSLALASVDISKAFDTVKHSKVIEALEKLGASPSMVAVVSDSLSDSVMEFAGVGGHGTVIPQRGIPQGNPISGLLFIATMNDIVDYVAENAAYVSSNSVKVGGVSMVDDLVMCTTTRSQLQYKFRTVIRMLADKGWTLNVAKSFGFAKRRAKNGMVTETKAIRTIEGMELRWNCGEFKYLGLQIGASVQLSSNFGSMLIDVRRSLNEIEKSGLSISNKLAAISRCIIPKYIYKLSNVSIKGVWAVKRSNDGERKVNTPRTYVNIDKEILRSVKRIMRIPENGVSMDYVYLPIGSGGMGLPKLALMVPRMRIMSFVKMKLVGRTRGMVERFAFNDIKLQREILLAQGIINVGEKGWKKEKVKAIARSVKEKVSTSSAFIPSQGEGICPLIKRIDGSGPGFTGKRLQRAFRLRIGAMPTNSYKFRRKVIRSPVCRLCHISPETAEHLMCNEECSSKSFWINRHDRVRDKVEAYLRRGNVTGVTIITEVEFKGADRRYRPDIVTVEDGFITVIDIACAWETKAGVHRLSEVADGKVTKYSTPDAKAAISKACLEFGASNAAKFSVSPFVVGVRGGYKMPGEAFVSLLKRLNLGSYKTIFQRCAETSMALSAKEVSKVICGEGVFGTTRYNGEGREQ

SEQ ID NO: 26461 - protein, 960 aa, Ceratina australensis
MHKDWYDRREVENIDSRRAPWSAEEVALLARQEARFTLDGVRFMNQALLPFFPHRTLEAIKGQRKNQAYKDRVAQYLHQLESEREEAASESPHTPHEDLMASERDSLISSVEILLTEAPLTCTSFQAERLSRICQNLSSWSADRLLSELELYLKAVLPPTNRPQRATKSVDFVSTKRQARRAEYARTQRLWRKNPCKCIKTILTGKTIDNPPDKRTMTSFWRNIMTDGDNSSPGISHQRPPLASLWKPITLDEIKDAFPERSTCPGPDGLTVRQLRAIPLPILLRVFNIIIVCGKLPEYLLRAKTTLIPKKDGAKEPGDYRPITVNSVLTRTVHKVLARRLTLGVELDRRQKAFVPVDGCAENIFDLDMVLKYHRQYFKPLFLASMDLAKAFDSVSHATIKDTLFVMGLPNPMINYIMDTYARGSTQLSCNGWESERFRPTCGVKQGDPLSPIIFNFVIDRLLKLIPPEIGIKIGEQHFSAFAFADDLIFIASTTQGLQMLIDISTDFLAKCGLKINATKSFTIAMRNVPHQKKVVVDASTVFTCQGRPLPALRRSEEWKYLGVPFTPEGRTSVKPENDLQITLDKLTKAPLKPQQRLFALRVVVLPSLYHLLTLGNTTLSRLKRIDAVTRAAARKWLNLPHDVVNAYFHASVKDGGLSIPSTRWLMPLRRKERLEKYIANTSEVNQFINQEVQRAARRLSESGQTYGKTEEIIQRWANKLHSSIDGKGLKDSREIPQQHQWVIEGTKFLSGKDYMNSHKLRILALPTRSRMQRGRIGDRSCRAGCNAVETLNHVLQQCHRTHRARIERHDAVAKYIKRALLGKYETVLEEPQFTTQEGLRKPDLLAKQGTEALIIDAQVVGENIDLQQAHDNKVAKYRQLTNVIREKYAVERVSFTTVTLSYRGVWSATSASELVRRGLLKKQELKILSTRVLIGGLSGFWRFNRTTASRRPTTREGVG

SEQ ID NO: 26462 - protein, 1227 aa, Argopecten irradians
MEEITNSKQTRAKPSYKRPVNPERLGRVDNVITGLTGRVGPISPERGSLQTQDKTNAKRRLLPTMIFNREGIVFVNNRRVMAQELPTELAHDPEDTPIITVDPIDMEDILIEGTYTIVYPFQTHRCGSCWEMFISPKELIKHIETKHEGLHRLACAHCNKPFTGLHGVQVHFGLCKGRKAGQNAANPVILDDPPITNSEHEFKCENCKASFKSNIGLGQHIRHRHPDVANTRRIQAIQKDIERKRIARSKASEQQEATAEINETTENAKPRTKGTKSKVFSEEEDQLIRKWSTADSWATGPELAKLMTNKTDVQIRSRRRALNLLKGKVFAAAPKKTRSNPIAKPPTAPVKRVTNELRRDQFAEAVQTQGSERYVGTSGELLARAAAGENVDDEMTNLIALLKAENDENRSTRRTGRPKSNRRRRKRGKKRGNACDKKREEYSLQQSLFEKDQKSLARLILDCKGTDEKCNISPEIVQETYMERFGGISQEVDLSEYPTPEPVDKGVLIEPISPEEVQKAFRRANKNTSPGPDQIDLKFVIKVNPNGKFLANVFNTWLCTGRVPASVKENRSILLPKGSEGLDNINNWRPLTISSVLLRLYTSILAKRVLKSFKLNERQRGFIDAPGCAENTYLIQQIIEDAKKNRNELCVTFLDLAKAFDTVSHKHLVAGLERFGVDQHFIDIVSDLYRDVSTVFKTEEGETGRIPMTRGVKQGDPLSPLLFNIAMDPLLCKISEQSNGYKFGPEESDKIEALAYADDNALTTGSPADMHNNCDLVQTFCLDTGMRLNVKKSAAFYVKPGSKNSWLVNQYPTTPTIGGEEIPLIGPEDCTKYLGSNVNPWTTIRRKNLDEQCEVMLKRIGKSRLKPRQKLHMLKQYALPRLTFPLSMNEYSKTSLKKLDGMIRNHVKEWLKLPMSAPNPLLYSRPGAGGVGLPQLERSVPAMRINALRSVLFSNDSKIQRIAEVMQTQLKIEKLGKAIGIKIPNREKGKATWHKLVENDWEKLACARKGRGATKQPEANSWLGKQYFSEADYITALQLRGDTYPCRVTLARGKRNVDVRCRRCGQTYETVGHISGACSKVKDYRIRRHNMIVNCLAEKCKSAGWTVSYEPKLSVNDQVLKPDLVLVRRNQAVVLDPTIVYENNDALGVANNAKVRKYQPLVNTIKAKYTVDDVIVKGLAIGARGGWCKKNSTTLNLMGVCDKGFEQHLCRLALKGTINLLRLFMDA

SEQ ID NO: 26463 - protein, 1225 aa, Argopecten irradians
MRNFNKKIHKNGGDKPSYKRPAKPTQEGRRGKSLSCRDSTRMRAPTSTEGQRPSDSEMTTTKPLVFPTMFFMRQGIVFVNGSRVRAKDLPTEIAHDLEEPPVDLVILEDITNEGTCTIAYPFKTHKCEDCWEVFISPGDLIKHIHEVHNDTTRFACQICNRSFAALRSVQVHYGICRKRPRRDPAEQPSLTEAEEQVVAAPEEFKCDHCPSSYKSKIGLGQHIRHRHPDVANQRRLQALSDDITRKREERLKTKVASGLEINTNIPRNRVAPSKIFTEEEDELIREWSTVDKWATGPELAKKLNNKTDVQVRSRRKTLKLLKATVFKNAQKDQTGGSTNRPVPKPAYQGVNVKQDALFREAVQTKGSERFVGTSGTLLAQAAAGEYDEEGMTQLLNLLKTENDVWRGNRSQKSTSKRKSKKKKGKNRWRSREVKRDEYANQQFLFEKNQKSLAKLLLDGKSDSEKCEISPEVVEETYKERFGGVSQEVDLSGYPMPEPVDKEQLVSPITLEEVQGAIRRSNKNTAAGPDQIDLKFVIKVNPEGQFLANLFNTWLCVGKVPVSVKENRSILLPKGSEGLDNINNWRPLTISSVLLRLYTSILAKRVLKGFKLNPRQRGFIDSSGCTENNYLLLKIMEDAKKHGKPLCVTFLDLAKAFDTVSHKHLVAGLERFQADNHFIGIVKDLYQGASTVFKTGGEITGHIPMTRGVKQGDPLSPLLFNIAMDPLLCKISEQKNGYRFGPETDDNIEALCYADDNALTTGDPAAMQHNCGLVNDFCQETGMRLNVKKSAAFYIKPATKGTYTVNTYEVPPTIGGEPIPLVGPEDCTKYLGTSINPWTTTRRRDLGAQCAKMLQGIDKSRLKPRQKLHMLRQYAMPRLMFPLTMQKYPKGTLKQLDGMIRKQVKSWLKLPECTPNPILYAKSAEGGIGLPQLERSVPALRINALRSVIFSNDPKIRRMAEVMETQQEIQEIGDEVGIKVPTKRKGKAKWNKLVEADWSKLTCSSKGREATRRSVCNSWLGKKYFSEADFITGLQLRAETFPCRTTLARGRGQMNVLCRRCGLVPETIGHISGACHHESVKKYRIRRHNLIASALSDKCKSKGWAVSHEPRLVVEGRVFIPDLIVTKNKQAVVLDPTIVYENGNALGKANEAKVRKYFPLVETIKEKYSVDDVIVRGFAIGARGGWVPKNTNTLHSMGICDPGFEQHLCRLALKGTINLVRLFMDV

SEQ ID NO: 26464 - protein, 1151 aa, Alatina alata
MDRHADKSERRLTCKERLLTTGKTVDTRKDERDPLGLQPRVWTSIATSQKRRACPQVCQGPPGEDKWPKSDLMENGLGTKTDTIFGHTNSQICSERDDEQRETVGERTVDGAGVGYLRQSRGKPRQTSRASPAPDTNHSGTTGEAVDDIEIEKRDKIRWPRANEQKAYLDFEKNVIERLKRSPTQHTTIAEELNQLADEIYQVGAESFGTVVKQSKGSGGLSRANRKMQWLRREKRRLRRAWEQAEWDCRQKLAEERDQVLAKIRAEARKERKRKRRREKRKCRQLFLKNPYKYAKDLFEEGKSGKLECSKADLEESLRTTYTDNSKSIPLGEMHGIPRPTEPGHQFRMSDFTFEEVKNFVKKARAKSAPGSDGVPYKVYKRCPRLVRWLFLCLRKAWRHKYICQRWARTEGIYLPKEQNSSLLNQFRHISLGNTDGKIFFGVLAKRVLSFLTLNGYIDIAVQKAGIPGSSGCMEHAAMIWDEIQVAKREKKDLSVVWLDLANAFGSVPHKFLDFAMEHFWIPVEVRDLMRTYYSKFVLRFSTESYTTGWQRLEIGIAAGCTISPIWFILAMELILRATDCEGVSRQICSPKKAFMDDITILTRKKDLTIKILQRLDELICWAGMKFNAKKSRSLYLLRGVQKEVKFVIAGEMMPTVKEQPVKSLGRLYHGTLNDRSEGKRIQADAEVGLDKIEQSFLPGVFKVWCLQFVLMLKLLWPLAMYEVAITRVNIIQQKINVKIRRWLGLPKMFATAALYRNGGPLQLPFPSVVDLYKCGKLRHVLTFRDSPDSNIRYSPPDLRTGRKWKAEEEVDRIIEVLQHADVMGAVQTSRAGLGTSNFKAFSCMSSREKRTAIVERAKMEEEKVRYTQLVTFAQQGQCTAWQDAVEKREIKWSQLFKWNSSRTSFLLKSVYDMLPTPVNLCKWKISADDKCKCGEKGTLFHIMSNCPLALSRRYFWRHNQVLQVIADAVKLKLDAINSGKKPQIPDKRRPIRFHKEGQPAVRGAERTIDNPEWQGKWTLKVDLCGEGFTLPVETGQKPDMVVYCEERKKMKFFELTVCWEAGMEKAKLRKESRYAELILHCREQGWETTCLSIEVGVRGFIGNRTMGMLQQLGFSKAEMKELIAIIQESVEQASRFIWNHRNDENVALTN

SEQ ID NO: 26465 - protein, 1151 aa, Alatina alata
MDRHADKSERRLTCKERLLTTGKTVDTRKDERDPLGLQPRVWTSIATSQKRRACPQVCQGPPGEDKWPKSDLMENGLGTKTDTIFGHTNSQICSERDDEQRETVGERTVDGAGVGYLRQSRGKPRQTSRASPAPDTNHSGITGEAVDDIEIEKRDKIKWPRANEQKAYLDFEKNVIERLKRSPTQHTTIAEELNQLADEIYQVGAESFGTVVKQSKGSGGLSRANRKMQWLRREKRRLRRAWEQAEWDCRQKLAEERDQVLAKIRAEARKERKRKRRREKRKCRQLFLKNPYKYAKDLFEEGKSGKLECSKADLEESLRTTYTDNSKSIPLGEMHGIPRPTEPGHQFRMSDFTFEEVKNFVKKARAKSAPGSDGVPYKVYKRCPRLVRWLFLCLRKAWRHKYICQRWARTEGIYLPKEQNSSLLNQFRHISLGNTDGKIFFGVLAKRVLRFLTLNGYIDIAVQKAGIPGSSGCMEHAAMIWDEIQVAKREKKDLSVVWLDLANAFGSVPHKFLDFAMEHFWIPVEVRDLMRTYYSKFVMRFSTESYTTGWQRLEIGIAAGCTISPIWFILAMELILRATDCEGVSRQICSPKKAFMDDITILTRKKDLTIKILQRLDELICWAGMKFNAKKSRSLYLLRGVQKEVKFVIAGEMMPTVKEQPVKSLGRLYHGTLNDRSEGKRIQADAEVGLDKIEQSFLPGVFKVWCLQFVLMLKLLWPLAIYEVAITRVNIIQQKINVKIRRWLGLPKMFATAALYRNGGPLQLPFPSVVDLYKCGKLRHVLTFRDSPDSNIRYSPPDLRTGRKWKAEEEVDRIIEVLQHADVMGAVQTSRAGLGTSNFKAFSCMSSREKRTAIVERAKMEEEKVRYTQLVTFAQQGQCTAWQDAVEKREIKWSQLFKWNSSRTSFLLKSVYDMLPTPVNLCKWKISADDKCKCGEKGTLFHIMSNCPLALSRRYFWRHNQVLQVIADAVKLKLDDINGGKKPQIPDKRRPIRFHKEGRPAVRGAERTIDNPEWQGKWTLKVDLCGEGFTLPVETGQKPDMVVYCEERKKMKFFELTVCWEAGMEKAKLRKESRYAELILHCREQGWETTCLSIEVGVRGFIGNRTMGMLQQLGFSKAEMKELIAIIQESVEQASRFIWNHRNDENVALTN

SEQ ID NO: 26466 - protein, 756 aa, Tomocerus qinae
MLDSYAKVDFNVQRYLDMNYEVTISKEEIQDCINNISYDSSPGPDHILTPTIKYLSCSEVLATLATIMMKWNIVPSQFKEARTILIYKNGDENDCSNWRPISICSVLRRIIEKVVDKKLRSFIDFSQHQRGFTQKPGTLINCEILSKCLMKAKKDKKDILILFLDVTKAFDQIGHQHLINVLKSCKIPSLLRNFIISLCNENWTRIETQFGRSGKILFDRGVFQGSPISPTLFNLSIDFILRSLSENEISTKYGFQLHDSSPNVSVLGFADDTTLIGNSILSACELFSIAQNLFSQIGLSLNIGKCKAILLQKGKIIYKDIDINSSTIIPGICKNENIRYLGVPFKDELQFDENAVMATFHADMEILVSSPLLNSHQKLTILNQYIWPRLIYPFQNAPLKKLTLNFLHNVDKIIRSCVKEIINLPADTPSSMLYCSRSDRGLQIIHAEREAFIQKYGSYQLLIKSNCEYLQPFHEIYGCESNSCLTHLGVTNPREIQLSKHYKNKNLTMLQKMRACLRDNSFEEWKNLKQKGQGVVTFQDYGKGNKLILSKNGLSNSEWTSILKMSCNVAAVKVIPGRTFPNTFQCRFGCIEPETLSHVLGKCPKGELLRNNRHNQIRSLIANSFDKEIWDVKEELHCIFEDGSTGRIDILAIHKQNRKAYILDPTIRMEIDLNQALNVHNEKKEKYSPAIKFFEENFHARNIEIFGLLVGARGTIFSFFLDFIKKFNLRKSLIEEIIISVIRGSVNILHNHIHNY

SEQ ID NO: 26467 - protein, 959 aa, Tomocerus qinae
MDLDNIIENVTATSTDKSKRRDPDTPCPHCGFLCRGPIGVATHTRSRHPAENRKAKASLHTQSTDSLPILTDDLDNSIDKDDPREKLNQALLNINNLLKNVIDIQHTSEELDIVVQKLIDIFVEGNDNLPGPKHPAKKYYDARKSKNFTQNDRKYSETTNPQRKTKRERQRRREKYRYDHIQYLYYNQRRKCVRNILSSDSKTCKINLDSLHQSFTARWSTENNNLLDSYAKVDFNVQRYLDMNYEVTISKEDIQDCINNISYDSSPGPDHILTRTIKYLSCSEVLATLATIMMKWNIVPSQFKEARTILIYKNGDENDCSNWRPISICSVLRRIIEKVVDKKLRSFIDFSQHQRGFTQKPGTLINCEILSKCLMKDKKDISILFLDVTKAFDQIGHQHLTNVLKSCEIPSLLRNFIISLCNENWTRIETQFGRSGKILFDRGVFQGSPISPTLFNLSIDFILRSLSENEISTKYGFQLHDSSPNVSVLGFADDTTLIGNSILSACELFSIAQNLFSQIGLSLNIGKCKAILLQKGKIIYKDIDINSSTIIPGICKNENVRYLGVPFKDELQFDENAVMATFHADMEILVSSPLLNSHQKLTILNQYIWPRLIYPFQNAPLKKLTLNFLHNVDKIIRSCVKEIINLPADTPSSMLYCSRSDRGLQIIHAEREAFIQKYGSYQLLIKSNCEYLQPFHEIYRCESNSCLTHLGVSNPREIQLSKHYKNKNLTMLQKMRACLRDNSFEEWKNLKQKGQGVVTFQDYGKGNKLILSKNGLSNSEWTSILKMSCNVAAVKVIPGRTFPNTFQCRFGCIEPETLSHVLGKCPKGELLRNNRHNQIRSLIANSFDKEIWDVKEELHCILEDGSTGRIDILAIHKQNRKAYILDPTIRMEIDLNQALNVHNEKKEKYSLKYFSSKKSFLRKTSTQEILKSLDYLLVPEERYSHSFWILLKSLVYESL

SEQ ID NO: 26468 - protein, 981 aa, Tomocerus qinae
MDPISTIGNTTASSTENSKRRDPDTPCPHCGFLCRGPIGVATHTRSRHPAESRKAKASLHTQSTDSSPVVNDDLDCPNDKDESRRKLNHALLNINNLLKSVIDIQPTLEELDVVVGKLIDILTKGNDNLPGPKHPAKKYYNARKGNNFTQNERKYSETTNPQRKSKRDRQRRREKYRYDHIQYLYYNQRRKCVRNILSSDSKKCNINLDSLHQSFTARWTTENNNFLDSYAKVDCNTQHYLDMNFDVTISKEEIQESINSISYDSSPGPDRILTRTVKYLSCSQVLATLATIMIKWNIVPSQFKEARTVLIYKSGNEEDCSNWRPISICSVLRRIIEKVIDKKLRSFIDFSQHQRGFTNKPGTLLNCEILSKCLTKAKKDKKDISVLFLDVTKAFDQIGHLHLINVLKSCEIPSLLRNFIISLCRENWTRIETQFGRSGKISFERGVFQGSPISPTLFNLSIDFILRSLSENEISAKYGFQLHENSPNVSVLGFADDTTLVGNSILSASELFIIAQDLFLQIGLSLNIGKCKAILLQKGKIVYDDIKMNSSTVIPGITKNEHVRYLGVPFKEELQFDEKSVMATFHADMETLVSSPLLNSHQKLTILNQYIWPRLIYPFQNASLKKLTLNFLRNVDKIIRSCVKEIINLPTDTPSSMLYCSRSDRGLQIINAEWEAFIQKYGSYQLLFKSNCEYLQPFHELYERESNSCLEHLGIFNPREIQLSKHYKNKNLTILQRMRAHLRDISFDDWKNLKQKGQGVDTFQDYGKGNKFILSKSGLSDLEWTSILKMSCNVAAVKVIPGRTLTNTYQCRFGCIEPETLSHVLGKCPRGELLRNNRHNQVRSLIAESFDKENWDIKEELHCILDNGSTGRIDILVINRKSRKGYILDPTVRMEIDKNQAMTVHNEKCEKYTPAIKFFQDNFQTQNIEIIGLLIGARGTIFSFFLDFVNKFKLSKSLIDDIIITVIRGFVNILHNHIHNN

SEQ ID NO: 26469 - protein, 1040 aa, Strongyloides papillosus
MNKQENSNLMVESQPDTTSTPTSQIVEKITNLSKSKNISKIKLFPLGETTLAEKIIISKYNTALGSLLEFESDCPNFEKQFLLIKTCAYLLQQEIDDNRKQINKNNKRKVNRKKSQLELYKAIVKSLNTNNNSRNTKDRVRIRRAQKNFRIHKLTDLLNYLSHEIEELELEMNRLTKKIEYAKLLTEFNNKPSLRTIRKLTSTNTPNNTELDSNEALDFYSNLYSPINTNETLKIDNVLTEFLDVAKDELDNIPKILTPTRDEIDFLIDKKANWKAVGPDGIHSMWYKLLPAAKKVVADWIINIWEGNTNILNTNDTEGNLHLIFKEGDPTDPSNYRPITCLNHKYKLLTASIYEKLGPLLTDTLIFPIEQKALKRGRQGCTDALVKDALIILNDKINNRLRTKNELHVTWIDFKKAFDSIDHRWLIKIINILPLPESTINSLSSLTKSWKSTIIFNKKRIGSFKIGRGVPQGDSLSPLLFCMSIAGIGYGLNKVEGFKSTLPLTSNHQWYMDDLKMYANSAEYQKLQINTLTRLSNNIGLDINNKKCATYNNVNINSPILDFPLITKNETYKYLGITQNDLTDLTTLETKLTNKVLTFLNEVISKNLPLRLTTKLIANTLKPAIEYLATNMIFTGSRNQGINIGKQLDKLIRRRLTQSHDISLTSLISRLYLPRNLGGRGLTKLEDVFTNGMINLGLYAYSSTDPETNKIAHYLANKYDPLTQDNRLRTPIGDAIAQLTNLGITTNVERQSNRIRITINNEEVTLRKVKDLVKNKLLNNNMKALTNSKYYEITNRYKLSKLSNKFLTTNTNSSLEQLICHAQERQLFFDTKHCRFGCTNRETLEHVLTSCIHKDTIGRVRHDNVLKIITNVILTRIGERKLSYNEKLYSVPSKNLYIDWPWKESQVKSHKPDLVYLPENATKPLILLDVAIANIDNITNQEKWKEVKYCTNSNIEYTDNWELTDNNLANYLQNKFNRKVEFVSVVIGPLGEILEDSINNINKKLELNTKEANKLWTNINISVTRDSYRLLKQHFGKNNH

SEQ ID NO: 26470 - protein, 1351 aa, Strongyloides papillosus
MTDLIEKIPNIKITNAINNPKNKITRGSFLITDWKKVCEELKIPLTLSENVRSYAKRKLNYSQTNKMIEYDNVRRSKIISKTRDSTNTLANTPTNYSSENNINKPKLSINKIINSEVSNGKPCGLRKPVEAKINLDKARITINNSNMSKNINENKIEKVDEIENGKIIVNTITSKLGNMNSMTKKVTEAGKNEVKIDKVVIEDKELIVDSVNINKLKLDDEYLGIRYESSLHRDLLLPLAYKNRKKHGKVTQTNWLAVCRDLKISTTENRIVSREAGKLGYKPSLTLVEINKLLENVGKDSIIVNENDSGIMNKQENSNLMVESQPDTTSTPTSQIVEKITNLSKSKNISKIKLFPLGETTLAEKIIISKYNTALGSLLEFESDCPNFEKQFLLIKTCAYLLQQEIDDNRKQINKNNKRKVNRKKSQLELYKAIVKSLNTNNNSRNTKDRVRIRRAQKNFRIHKLTDLLNYLSHEIEELELEMNRLTKKIEYAKLLTEFNNKPSLRTIRKLTSTNTPNNTELDSNEALDFYSNLYSPINTNETLKIDNVLTEFLDVAKDELDNIPKILTPTRDEIDFLIDKKANWKAVGPDGIHSMWYKLLPAAKKVVADWIINIWEGNTNILNTNDTEGNLHLIFKEGDPTDPSNYRPITCLNHKYKLLTASIYEKLGPLLTDTLIFPIEQKALKRGRQGCTDALVKDALIILNDKINNRLRTKNELHVTWIDFKKAFDSIDHRWLIKIINILPLPESTINSLSSLTKSWKSTIIFNKKRIGSFKIGRGVPQGDSLSPLLFCMSIAGIGYGLNKVEGFKSTLPLTSNHQWYMDDLKMYANSAEYQKLQINTLTRLSNNIGLDINNKKCATYNNVNINSPILDFPLITKNETYKYLGITQNDLTDLTTLETKLTNKVLTFLNEVISKNLPLRLTTKLIANTLKPAIEYLATNMIFTGSRNQGINIGKQLDKLIRRRLTQSHDISLTSLISRLYLPRNLGGRGLTKLEDVFTNGMINLGLYAYSSTDPETNKIAHYLANKYDPLTQDNRLRTPIGDAIAQLTNLGITTNVERQSNRIRITINNEEVTLRKVKDLVKNKLLNNNMKALTNSKYYEITNRYKLSKLSNKFLTTNTNSSLEQLICHAQERQLFFDTKHCRFGCTNRETLEHVLTSCIHKDTIGRVRHDNVLKIITNVILTRIGERKLSYNEKLYSVPSKNLYIDWPWKESQVKSHKPDLVYLPENATKPLILLDVAIANIDNITNQEKWKEVKYCTNSNIEYTDNWELTDNNLANYLQNKFNRKVEFVSVVIGPLGEILEDSINNINKKLELNTKEANKLWTNINISVTRDSYRLLKQHFGKNNH

SEQ ID NO: 26471 - protein, 1241 aa, Chelonus insularis
MSQQPDRSLVGDPPSVININSRHTHTRMAESRDDSPRRVPTIANCRSLSSFSSASAIRNNKNTTSAMEVSSDLPQDSTASSTTSVVHSATSVRTATTTNTTAIARASSKVRWADDELRMMALVELNAPAWAMGAINDYIRGAVNFGSPRGIEAIKSVRRRDKYRKIIAELRTEGVPASEVQRDPLVAPETPLVSVSPDSAVLQFSAHSPVTPIPSSPVVVQINTFSSMCERSFPTLRSLSQHNRHAHPANNLGRTSGEDVVIPQFQCGYCERSFASPIGLGQHKRQAHPTDANDEIELASQNVRWHDEDLKRLIAAELQAPAEYSRKMNLYLFSLGLVSRDVTAITQIRNSKKYKDLRTELQAMRSVQEQSEDVYEDDIGSSVDDDLRMEFRDWLLDSRSSISDLATSNPAIGHLIHAIDAVVEGNNPELFLLQWFDALFPDVRGYTPHKPKTCATSMPVSQSHLRRREYARIQTLWRKNRTKAANLVLDGDGSDCSSTISLQEQEAFWKPIFESRNSEEDPPLDSFESVCIVKEFCGPIQLSEVQRIKPKLQSAPGLDGLTPRDWLSQVDAKSAATIMNIMLLWGHVPPSWRDSRTVLIPKKLDAKDPASFRPISISLVILRHMHRILADRVISMNIFNPKQRGFIHADGTAENVAVLVSVLDKAQKDKRTIHVVSIDAQKAFDTVKHQAIDRVLGKRGFSNLFRTYFRNLYKESYTRLEVGGEMSSSIHPTRGVRQGDPFSSVAFNLIMDEILNGIDPNVGFDLNGVLINALSFADDLDLISSTKDGMQSLLNYVSNTMAENGLTPAPTKCAAVSLVLAGKVGKMKVISEPMFTINSYPVRQIGIEESWRHLGVSFTIKGPCSPVVDLEHFLERITRAPLKPQQRLIILRTYLIPRFIHSLVLGKISYGLLERLDRLVRQHVRKWTKLPNDVTCAFFHSPVPEGGLGVFCFATRIPELVLERLNRLEGSRFDGAQKACVSKWADARRNWVSGQKFPHREWASRLHQSVDGQELKECKASPLSSSWIYAGGGIPAKDWLAYLKVRINALPSAMRTSRGFRSLHTNRQCRAHCMSTETSAHIIQQCHRTHGGRILRHDAIVKYLASLLRERNYDVWIEPHFRTTIGLRKPDLVIRRDGNTYIIDAQVVSGSGSLVQSHIRKRDYYATNIDLLSSVAELTQVPRSRIRSLGLSKRKLSGITTRVILGSFLNFVRFNKMTTVANHNLWPCRWRDRAVRANTLP

SEQ ID NO: 26472 - protein, 2037 aa, Araneus ventricosus
MCDQREMLPMISLLEPPAPSHINSVIVSPPRTSLIVTTPVHTTAPLVNSVISPPCELSNGTPVTKNCSVSIQDILVSPSPICRRTRNQLRLRQTANLYSSPELSATLGTGPPASQSVHSQIQSVSPDQCILPLDLSPSGAPLCQGPSASHSVTLSTRVGCQLLDPSNSVQANQDCALDSSTSTSSLQCMLPLAPSDDTSGEAFESRTKNSVGKFSEGMLSLSQRRSDDHVHSPLAPSPQSQANLSCHLCSFTADKKSGLRLHLKRTHDTWKVPKQSVTDSPRSPLKPSTHANSVKHVLTTSALQEDNSPVCTDSNSSSGQICDNASAPKELSKAEIEVLRNMKTEKLSMTPPPSGHSSAPEGISSPSLDEQLKLTPSPGQRSPVLLLFEVDTTPVKMRQVEYFPFSLRCAYCDLDMSSPTSFADHILEVHSGFSEAQKNDVRTFAKSNQPAKDCDIVSSDEEMSYQCTKCNEAFPSEAHLLQHACSPSPSRTWKCVLCSHVARKRSGLRFHMRAKHNTWKIVTDRSGLPKPNILKPPAVKRLQFSPPSSPDVVPAAQGAPLISFPISPPGNTLSLLDPICSQSQQAGEPRFQCQNCSFFASSASILEVHLGNSHSPKFALTSSSSTAMAASIQCPECRAPCANSTELLAHDCRPTDLATHPPSSSPVRNCPACGFLVTVPDDKVEDVLLYHINKRHTCKLCDFVEIKRGDLGDHMKSHRRLQIKNKPHAVRNLEPSLALNQKNPPTTPLTTLALPSVRPPTNDPPPPAYVCSGCGTGFTFAFFLDVHCARCPQFLALSDNSFPSQTRMPLFKCNACPFVGKDASNLTKHLAVKHKVVMSFDIDFSNTPASQDSGHLDDPPRQESSPIGNPKPDSSPTSGLASKQQIHKTAAPSEMPPEHCRMGNTLNLIFPMLGGLKCTEKDCPFEYHTKGWTSTKNSLIRHLYREHKIDITTSYLWCSKCRSRTSNKPSSHPCLKDSPLADQPGNSHKWKCNICSFSSPSETGLNNHLLAHKKKRLLAAGPQKVTKTYRKTPRRGKVVPIIESEDEKIDAPGTSSAPVSSNLPLTPPPSRAEMDNSLLGTYIKDLESLLASDPTDEAFLYFCNTIDQAVAETYSFTAGTPPPERRDGPVKRRKIDILDARTIQVLYGKNRKRAVREIWEDTSEFCTIPPAALETHFSEAWGPNQAEQNFYNPSNSPRSELLSTPFSAAEVGKKLSKAENTSAGPDGVTYLQWRSVEYSANFLAAAFNACLHFRRIPPKWKESSTILLPKSGDLSSPSNWRPIALSSTIYKILTKCLAARLSDWCEKYNILSPCQKGFTPFDGVVEHNYVLQQRKGLASSKKKDLCIAWLDVTNAFGALPHTAIFEALGALGTGQLFVDLVSDIYTDSSSKILASEGATRQIPILSGVKQGCPISGLLFNICIDPIIRTLQGDSTSHKVLAFADDVCILAESPGELQLQLNTIFSQFAKIGLALNPRKSVSMHFSGATPAGTRNTSFKINNTPIRALKEGEFHKFLGKPVGYNPCPDYRKLEEFYDLAMAVLQSKLAPWQRIDALLCFVFPALQFAMRTGQFMKTEWDEFDRALRKGIKDTLGLPDNACNDYLYGHRKFGCIGIPITAEDSDLYRIDTAFKLLTSKDEKLALMALQDLQRTVRLRFGIASPSDRDLENYMSGCQFQDRDNCHSNEWTVARLASSRLSIRWEFDEGIPRLKFEDTTIRSFQRRRVIHSLRDMKKTIRANNLLLLPKQGKAMECVAQSPASSHFVANGTYTRFCDWAFVHSARLDLLKLNGTQPWKVNAQKRCRWCSKGTLETLPHVLCHCEVHSRAWQLRHDSVGDRVVTAISPRGHIVAKNQTVGPKGLKPDIVFQKGKKMFVIDITIPFENRLDSFAAARQRKLDKYDHLIEFYNNMGFQTSIIPIVVGALGSWDKGNDAFLSRFMSKSYLKKFQQLCVSDVIKWSRDIFVEHVTGVRQYTDPNTSRPNPISRQVGSSSAASASNAPTNDVPLGQLVVLPESQPIDGVSQGLEDPLDLSPDRSLRD

SEQ ID NO: 26473 - protein, 970 aa, Menidia beryllina
MGSLIYQYGVERFGVKEQRSRAQVPVVVTSRRQQEIKCLVQERRKLKKLWRKSTDVEKEGINALQVGIKTRLTSLRKAETLRKRRRKKERTRTRFYKDPYAFLKGLFSSEKSGSLKTTKTDLEDHFRSIHSDPKRHEHLTIPSDIPPISPPEHQCDDGPPTWKEMERVVHRARTASAPGPNGIPYKLYKNTPDVLRFLWKLMRTIWQKKIIPKVWRRAAGVLIPKEKEAETISQFRPISLLNVEGKIFFSVVAQRISAYLINNHYIDTSVQKAGISGFPGCLEHSSMIWHQIQTAKAKKDDLYVVFLDLANAFGSVPHELLWSAFNFFSIPGHITALVKSYFQDLQFCFTTTEFTTAWQCLEVGIMAGCTVSPLAFTMGMEVIIRASKWVVGGQRLNPNSRLPPLRAYMDDITTLTTTVPCTRRLLRKLQENISWARMKIKPSKSRSISIVKGVLSDLKFFIGEEPIPSVYERPVKSLGRWFDASLRDKDQVLQLQKDVSSGIQAIENTELPGKLKIWCLQFGLLPRVLWPLTLYEVPISTVERMEKGITNHIKKWLGVPRSLTSTAIYGECLLRLPLTSLTEEFKCAKTRLQVMLTESKDLMVRENAPAITAGRKWRPAQAVEEAVTALRHADIVGHVQHGRGGLGLTAQRPAWSKASAAERRRMIVEEVKNQEEGIRRAKVVALGKQGKWTKWESVEGRKVSWKDLWRMESRRLSFIIRATYDVLPTPMNLQQWRGEDPGCALCSRPASLRHILTGCKVSLAQGRYTWRHNQVLKELAATLEQRRIAANSATPATRISLPAVTFVREGAKASHSASTTAKHCQLHTAGDWKMLADVGQRLAFPPEIAITTLRPDLVLWSPSAKKVFIVELTVPWEESVEEAYERKRLRYADLAAEARQRGWRTEVRPVEVGCRGFVASSTTRLLKELGVRGQSLRHAIRALSEAAEGSSQWLWLKHKDTSWASRGSQE

SEQ ID NO: 26474 - protein, 1120 aa, Menidia menidia
MPPNTATAATTGHKLQRCVCGWSKVTSYLGLRIHQGKKGCARQEPQRPRVGYFLRNWPSQSDEAQQRDANHSVQCISTSTAQDVTSNTEIALVNPIPSTQPARPPVERKMVGRKPQVKWPGAAERKLWETVNTDLAKSLERLKGTAEKKLESMGSLIYQYGVERFGVKEQRSRAQVPVVVTSRRQQEIKRLVQERRKLKKLWRKSTDVEKEGINALQVGIKTRLTSLRKAETLRKRRRKKERTRTRFYKDPYAFLKGLFSSEKSGSLKTTKTDLEDHFRSIHSDPKRHEHLTIPSDIPPISPPEHQCDDGPPTWKEMERVVHRARTASAPGPNGIPYKLYKNTPDVLRFLWKLMRTIWQKKIIPKVWRRAAGVLIPKEKEAKTISQFRPISLLNVEGKIFFSVVAQRISAYLINNHYIDTSVQKAGISGFPGCLEHSSMIWHQIQTAKAKKDDLYVVFLDLANAFGSVPHELLWSAFNFFSISGHITELVKSYFQDLQFCFTTTEFTTAWQCLEVGIMAGCTVSPLAFTMAMEVIIRASKWVVGGQRLNSRLPPLRAYMDDITTLTTTVPCTRRLLRKLQENISWARMKIKPSKSRSISIVKGVLSDLKFFIGEEPIPSVSERPVKSLGRWFDASLRDKDQVLQLQKDVSSGIQAIENTELPGKLKIWCLQFGLLPRVLWPLTLYEVPISTVEKMEKGITNHIKKWLGVPRCLTSTAIYGECLLRLPLTSLTEEFKCAKTRLQVMLTESKDLMVRENAPAITAGRKWRPAQAVEEAVTALKHADIVGHVQHGRGGLGLTAQRPAWSKASAAERRRMIVEELKNQEEGIRRAKVVALGKQGKWTKWESVEGRKVSWKDLWSMESRRLSFIIRATYDVLPTPMNLQQWRGEDPGCALCSRPASLRHILTGCKVSLAQGRYTWRHNQVLKELAATLEQRRIAANSATPATLISLPAVTFVREGAKASHSASTAAKHCQLHTACDWKMLADVGQRLAFPPEIVITTLRPDLVLWSPSAKKVFIVELTVPWEESVEEAYERKHLRYADLAAEARQRGWRTEVRPVEVGCRGFVASSTTRLLKELGVRGQSLRHAIRALSEAAEGSSQWLWLKHKDTSWASRGSQE

SEQ ID NO: 26475 - protein, 1120 aa, Menidia menidia
MPPNTATAATTGHKLQRCVCGWSKVTSYLGLRIHQGKKGCARQEPQRPRVGYFLRNWPSQSDEAQQRDANHSVQCISTSTAQDVTSNTEIALVNPIPSTQPARPPVERKMVGRKPQVKWPGAAERKLWETVNTDLAKSLERLKGTAEKKLESMGSLIYQYGVERFGVKEQRSRAQVPVVVTSRRQQEIKRLVQERRKLKKLWRKSTDVEKEGINALQVGIKTRLTSLRKAETLRKRRRKKERTRTRFYKDPYAFLKGLFSSEKSGSLKTTKTDLEDHFRSIHSDPKRHEHLTIPSDIPPISPPEHQCDDGPPTWKEMERVVHRARTASAPGPNGIPYKLYKNTPDVLRFLWKLMRTIWQKKIIPKVWRRAAGVLIPKEKEAKTISQFRPISLLNVEGKIFFSVVAQRISAYLINNHYIDTSVQKAGISGFPGCLEHSSMIWHQIQTAKAKKDDLYVVFLDLANAFGSVPHELLWSAFNFFSISGHITELVKSYFQDLQFCFTTTEFTTAWQCLEVGIMAGCTVSPLAFTMAMEVIIRASKWVVGGQRLNSRLPPLRAYMDDITTLTTTVPCTRRLLRKLQENISWARMKIKPSKSRSISIVKGVLSDLKFFIGEEPIPSVSERPVKSLGRWFDASLRDKDQVLQLQKDVSSGIQAIENTELPGKLKIWCLQFGLLPRVLWPLTLYEVPISTVEKMEKGITNHIKKWLGVPRCLTSTAIYGECLLRLPLTSLTEEFKCAKTRLQVMLTESKDLMVRENAPAITAGRKWRPAQAVEGAVTALKHADIVGHVQHGRGGLGLTAQRPAWSKASAAERRRMIVEELKNQEEGIRRAKVVALGKQGKWTKWESVEGRKVSWKDLWSMESRRLSFIIRATYDVLPTPMNLQQWRGEDPGCALCSRPASLRHILTGCKVSLAQGRYTWRHNQVLKELAATLEQRRIAANSATPATLISLPAVTFVREGAKASHSASTAAKHCQLHTACDWKMLADVGQRLAFPPEIVITTLRPDLVLWSPSAKKVFIVELTVPWEESVEEAYERKHLRYADLAAEARQRGWRTEVRPVEVGCRGFVASSTTRLLKELGVRGQSLRHAIRALSEAAEGSSQWLWLKHKDTSWASRGSQE

SEQ ID NO: 26476 - protein, 968 aa, Menidia menidia
MGSLIYQYGVERFGVKEQRSRAQVPVVVTSRRQQEIKRLVQERRKLNKLWRKSTDVEKEGINALQVGIKTRLTSLRKAETLRKRRRKKERTRTRFYKDPYAFLKGLFSSEKSGSLKTTKTDLEDHFRSIDSDPKRHEHLTIPSDILPISPPEHQCDDGPPTCKEMERVVHRARTASAPGPNGIPYKLYKNTPDVLRFLWKLMRTIWQKKIIPKVWRRAAGVLIPKEKEAETISQFRPISLLNVEGKIFFSVVAQRISAYLINNHYIDTSRQKAGISGFPGCLEHSSMIWHQIQTAKAKKDDLYVVFLDLANAFGSVPHELLWSAFNFFSIPGHITELVKSYFQDLQFCFTTTEFTTAWQCLEVGIMAGCTVSPLAFTMAMEVIIRASKWVVGGQRLNSRLPPLRAYMDDITTLTTTVPCTRRLLRKLQENISWARMKIKPSKSRSISIVKGVLSDLKFFIGEEPIPSVSERPVKSLGRWFDASLRDKDQVLQLQKDVSSGIQAIENTELPGKLKIWCLQFGLLPRVLWPLILYEVPISTVEKMEKGITNHIKKWLGVPRCLTSTAIYGECLLRLPLTSLTEKFKCAKTRLQVMLTESKDLMVRENAPAITAGRKWRPAQAVEGAVTALKHADIVGHVQHGRGGLGLTAQRPAWSKASAAERRRMIVEEVKNQEEGIRRAKVVALGKQGKWTKWESVEGRKVSWKDLWSMESRRLSFIIRATYDVLPTPMNLQQWRGEDPGCALCSRPASLRHILTGCKVSLAQGRYTWRHNQVLKELAATLEQRRIAANSATPATLISLPAVTFVREGAKASHSASTAAKHCQLHTACDWKMLADVGQRLAFPPEIVITTLRPDLVLWSPSAKKVFIVELTVPWEESVEEAYERKHLRYADLAAEARQRGWRTELRPVEVGCRGFVASSTTRLLKELGVRGQSLRHAIRALSEAAEGSSQWLWLKHKDTSWASRGSQE

SEQ ID NO: 26477 - protein, 1218 aa, Menidia beryllina
MYKTFVKILQRDKLNGRVDTPWRAHLGLSDSVGPEWRALYKPPLIKRVADLQWRFLHGIVAVNAFISIIEDSSAGTMASDPGPETTMRHNAVQESIMPPNTATAATTGHKLQRCVCGWSKVTSHLGLRIHQGKKGCARQEPQRPRVGYFLRNWSSQSDEAQQRDANHSVQCIGTSTAQDVTSNTENALVNPIPSTQPARPPVERKMAGRKPQVKWPGAAERKLWETVNTDLAKSLEQLKGTAEKKLESMGSLIYQYGVERFGVKEQRSRAQVPVVVTSRRQQEIKRLVQERRKLKKLWRKSTDVEKEGINALQVGIKTRLTSLRKAETLRKRRRKKERTRTRFYKDPYAFLKGLFSSEKSGSLKTTKSDLEDHFRSIHSDPMRHEHLTIPSDIPPISPPEHQCDDGPPTWKEMERVVHRARTASAPGPNGIPYKLYKNTPDVLRFLWKLMRTIWQKKIIPKVWRRAAGVLIPKEKEAETISQFRPVSLLNVEAKIFFSVVAQRISAYLINNHYIDTSVRKAGISGFPGCLEHSSMIWHQIQTAKAKKDDLYVVFLDLANAFGSVPHELLWSAFNFFSIPGHITELVKSYFQDLQFCFTTTEFTTAWQCLEVGIMAGCTVSPLAFTMAMEVIIRASKWVVGGQRLNPNSRLPPLRAYMDDITTLTTTVPCTRRLLRKLQENISWARMKIKPSKLRSISIVKGVLSDLKFFIGEEPIPSVSERPVKSLGRWFDASLRDKDQVLQLQKDVSSGIQAIENTELPGKLKIWCLQFGLLPRVLWPLTLYEVPISTVERMEKGITNHIKKWLGVPRCLTSTAIYGECLLRLPLTSLTEEFKCGKTRLRVMLTESKDLMVRENAPAITAGRKWRPAQAVEEAVTALKHTDIVGHVQHGRGGLGLTAQRPAWSKASAAERRRMIVEEVKNQEEGIRRAKVVALGKQGKWTKWESVEGRKVSWKDLWSMESRRLSFIIRATYDVLPTPMNLQQWRGEDPGCALCSRPASLRHILTGCKVSLAQGRYTWRHNQVLKELAATLEQRRIAANSATPATLISLPAVTFVREGAKASHSASTAAKHCQLHTACDWKMLADVGQRLAFPPEIAITTLRPDFVLWSPSAKKVFIVELTVPWEESVEEAYERKHLRYADLAAEARQRGWRTEVRPVEVGCRGFVASSTTRLLKELGVRGQSLRHAIRALSEAAEGSSQWLWLKHKDTSWASRGSQE

SEQ ID NO: 26478 - protein, 1040 aa, Hirundichthys speculiger
MEEVNSSTELAVEQTSAVEPPQTRRPAVERSLPGYKLRVKWPSAAEKKLWEMVNNDLTPSLKQLRGTVEKKLEKMGNIIYEYGAERFGVLQPKGKSQVATPPVSRRQQEIKRLVQERRQLRKLWKKASDVEKKGISTLQDDIKTRLESLRRAENSRKRRRKKEQTRTRFYKDPFKFLKTLFTKEKSGVLKTTKNDLEEHLRATHSDPKRHERLAIPPDIPPINPPEHQFKTGPPTWKEVQKIVHRARTASAPGPNGIPYKVYKNAPDVCKFLWSLMRTVWQKRSIPKAWRRAGGILIPKEKDSAHISQFRPIALLNVEGKIFFGVIAKRMGEYLHRNEYVDTSVQKAGISGFSGCLEHTSMIWHQIQMAKREKKDIHAIFLDLANAFGSVPHELLWTTFKFFNIPDTITTLVKDYFQDLQFCFSTPEFTTSWQHLEVGIMAGCTVSPLAFTMAMEIIIRASKWVVGGQRFGPSRRLPPLRAYMDDITTLTTTVPCTRRLLRKLEENISWARMKIKPSKSRSISVVKGVLADLQFFIGDDPIPTVSEQPVKSLGRQYDASLKDTDQVKQLRKDIDAGLLAIDNTQLPGKLKSWCFQFGLLPRVLWPLAVYEVPISVVEKLERRVTVHIKKWLGVPRCLTTIGLYGDSVLKLPFTSLTEEFKCAKTRLQMTLNESKDPAVRENAPTLATGRKWTPARAVEEATAALKHADVVGNVQQGRGGLGLTTSRPTWRNATAPARRKMVVEEVRRQEEVARGAKAVTLGKQGMWTRWEGVERRRLSWRDVWAMDARCLSFAIRATYDVLPTPTNLHQWVGEDPACVLCAKPASLRHILTGCKTSLTQGRYTWRHNQVLKSLASTLEGKRSSINALLLPTPNTSWGTAFVREGATATRSNSTPSERSQLCPARDWKMLADVGKQLVFPPEIATTTLRPDLVLWSPSLKKVYIVELTVPWEDSMEEAYERKHLRYSELATEARHRGWNAEVRPVEVGCRGFVGTSTTRLLRDLGVRGQSQRTAIKAASEAAERSSQWLWLKRNDPSWAPK

SEQ ID NO: 26479 - protein, 1182 aa, Holocentrus rufus
MPVVSHACSMSETPTVATKSQRKRIPPESARAGVEEDSLADNMVMTGPETTMSNESTMQENTTAIVKATDATAGHTLQVCPCGWRKITSHRGLRIQQGKKRCLRKERQGPCIDYLLCKGSNQSSEAQQPDTNHSLQCISTNVMEDENLSTESVMEQTSVMEPAQRPRPAVERRLPGCRLHVKWPSAADKKLWETVNTDQAQTLEQLRGTVEKKLEKMGDIIYQYGAERFGVKEVKDAKKVPTPPLSRRQQEIKRLIQERRQLRKQWKKASEGEKEGIDALQADIKTRLASLRRAENLRKRRRKKEHTRTQFYKDPFKFLKTLFTKEKSGALQTTRDDLEEHLRTTHSDPRRYEHLAIPSDIPPIAPPEHQFEIGPPTWKEVESIVHRARTASAPGPNGIPYKVYKNAPDVLRFLWRLMRTVWQKKTIPKVWRRAGGVLIPKEKDAKNISQFRPIALLNVEGKVFFSVIAQRMAEYLRRNEYINTTIQKAGVLGFAGCLEHSSMIWHQIQVAKLEKKDLHVIFLDLANAFGSVPHELLWSTFRFFHIPSTITALVKAYFQDLQFCFSTPEFTTSWQCLEVGIMAGCTVSPLAFTMAMEIIFRASKWVVGGQRVGSCLRLPPIRAYMDDITTLTTTIPCTRRLLRKLEENISWARMKIKLSKSRRISVVKGVLADLKFFIGDDPIPTVTEQPIKSLGRCYDASLKDRYQVKQLRKDISAGLQSIDNTQLPGKLKIWCLQFGLLPRVLCPLAVYEVPISTVEKLERGVTAYIKKWLGLPRCLTNIGLYGDGVLKLPLTSLTEEFKCTKTRLQMALNESKDKVVRNNAPTLATGRKWTPATAVEEATSALKHADIVGNVQHGRGGLGLKTCHPAWSKATAPTRRKMAVEEVRRQEEAAQWAKAVSLGKQGQWTRWDNVERRRLSWRDVWAMEAQSLRFIIRATYDILPTPANLHQWFGKDPACTLCSRPATLRHILTGCKASLTQGWYTCRHNQVLKSLAAALEDKRTAINSLPPPISNPPWATAFVGEGAKTARSSAAPSERGQLCLARDWAMLVDIGQQLTFPPEIATTTLRPDLVLWSRSLKKAYIIELTIPWEDSIDEANERKHLRYAELAVEAQHCGWNTEVCPVEVGCRGFVATSTTKLLGDLGVRGQSQRAAIKAASESAERSSQWLWLKKNDTSWAPK

SEQ ID NO: 26480 - protein, 990 aa, Hirundichthys speculiger
MVNNDLTPSLKQLRGTVEKKLEKMGNIIYEYGAERFGVLQPKGKSQVATPPVSRRQQEIKRLVQERRQLRKLWKKALDVEKKGISTLQDDIKTRLESLRRAENSRKRRRKKEQTRTRFYKDPFKFLKTLFTKDKSGVLKTTKNDLEEHLRATHSDPKRHERLAIPPDIPPINPPEHQFKTGPPTWKEVQKIVHRARKKLQLLGQTEIPFKVYKNAPDVCKFLWSLMRTVGGRRGPFPKHGVRAGGILIPKEKDSAHISQFRPIALLNVEGKIFFGVIAKRMGEYLHRNEYVDTSVQKAGISGFSGCLEHTSMIWHQIQMAKWEKKDIHAIFLDLANAFGSVPHELLWTTFKFFNILDTITTLVKDYFQDLQFCFSTPEFTTSWQHLEVGIMAGCTVSPLAFTMAMEIIIRASKWFVGGQRFGPSRRLPPLRAYMDDITTLTTTVPCTRRLHRKLEENISWARMKIKPSKSRSISMVKGVLADLQFFIGDDPIPTVSEQPVKSLGRQYDASLKDTDQVKQLRKDIDAGLLAIDNTQLPGKLKSWCFQFGLLPRVLWPLAVYEVPISVVEKLERRVTVHIKKWLGVPRCLTTIGLYGDSVLKLPFTSLTEEFKCAKTHLQMTLNESKDPAVRENAPTLAIGRKWTPARAVEEATAALKHADVVGNVQQGRGGLGLTTSRPTWRNATAPARRKMVVEEVRRQEEVARGAKAVTLGKQGMWTRWEGVERRRLSWRDVWAMDARCLSFAIRATYDVLPTLTNLHQWVGEDPACVLCAKPASLQHILTGCKTSLTQGRYTWRHNQVLKSLASTLEGKRSSTNALLLPTPKHLMGNCLCPGRGHSYQEQLSTPSERSQLCPARDWKMLADVGKQLVFPPEIATTTLRPDLVLWSPSLKKEYIVELTVPWEDSMEEAYERKHLRYSELATEARHRGWNAKVRPVEVGCRGFVGTSTTRLQRDLGVRGQSQRTAIKAASEAAERSSLWLKRNDPSWAPK

SEQ ID NO: 26481 - protein, 921 aa, Pao palembangensis
MGNIIYQYGVEHFGVVQPKAAKQVPTPLVSRRQQEMKCLVQERRQLRKIWKKASEVEKERLSTLQADIKTRLASLRRAESLRKRRRLKEQTRTRFYKDPFKFLKALFTKEKSGVLKTTKNELEEYLRATHSDPRRHEHLAIPPDIPPVDPPEHQFEAGPPTWKEVEKIVHRARTASAPGPNGVPYKVYKNTPDICKFLWSLMRTVWQKRSIPKAWRRAGGILIPKEKDAASISQFRPIALLNVEGKIFFGVLAQRMAEYLQRNKYVDTSVQKAGIAGFSGCLEHASMIWHQIQKAKLEKGELHVIFLDLAKAFGSVPHELLWTAFKFFNIPDTITALVKDYFQDLQFCFSTPEFNTSWQHLEVGIMAGCTISPLAFTMAMEVIIRASKWVVGGQKLGSCRRLPPLRAYMDDITILTTTVPCTRRLLRKLEENISWARMRIKPSKSRSISVVKGVLADLQFFIGDDPIPRVSEQPVKSLGRCYDASLKDKDQVKQLCKDINSGLLAIDSTQLPGKLKSWCFQFGLLPRVLWPLAVYKVPISTVQKLERRVSIKKWLGLPRCLTTIGLYGDSVLKLPFTSLTEEFKCAKTRLQMTLNDSKDPVVRENAPTLATGRKWTPAGALEEATAALRHADIVGNVKQGRGGLGLTASRPVWRSATTPARRKMVVEEVRRQQEAARWAKAVALGKQGLWTRWEGVERRKLSWRDIWAMDARSLSFTVRALYDVLPTPVNLHQWFGEDPACVLCAKPASLGHILTGCKISLTQGRYTWRHNQVLKSLASTLEGKRTSINALPPPTAKASLRTAFVREGTTAVRSNSTPSERSQLCPARDWKLLVDVGKQLVFPSEIAATTLRPDLVLWSLSLKKVYIVELTVPWEDSMQEAYERKHLRYSELAAEARYRGWNAEVHPVEVGCRGFVGTSAT

SEQ ID NO: 26482 - protein, 802 aa, Entosphenus tridentatus
MRTAWQKNIIPKLWRRAGGVLIPKEKDAVNISQFRPIFLLNVEGNIFFRVIAQRMAEYLQRNGYVDTSVQKAGISGFSGCLEHSSMIWHQIQMAKVEKRDLHVVFFDLANAIGSVPHELLWSAFRFFHIPDTITTLVKSYFQDLQFCFTTSEFTTSWQCLNVGIMAGYTISLLAFIMAMEVIIRSSKWVAGGQRVDSGFRLPPLRAYMDDITTLTTTVPCTRRLLRKLEENISWARMKIKPSKSRSISIVKGVLSDLKFFIGDDQIPTVSEQPVKSLGRWYDASLKDKDQVQQLRKDISSSLQSIDNTQLPGKLKAWCLQFGLLPRVLWPLAVYEVSISTVEKMERGVTGYLKKWLGVPRCLTTIGLYGDGVLKLPLTSLTEEFKCAKTRLQMTLNESRDPVVSNNALTLATGRKWRPGNAVQEATAALRHADIVGHVQQGRGGLGLTSRAAWSKATAPERRKMVVQEVRHQEEAARWAKAVSLAKQGEWTRWDSVEKRNISWKDLWAMEARRLSFSIRETYDVLPTPVNLHQWYGEDPDCALCSMPANLRHILTGCKTSLTQGRYTWRHNQVLKKLASALEDKRAATNSLPPPAASHPLRTTFVREGAKPPKSGSTPLERDQLRLARDWKMLADIGRQLVFPPEIATTTLRPDMVLWSRSLKKVFIIELTVPWEDSVDEAYERKHLRYADLVAEARHHGWNTEVQPMEVGYRGFVATSTTRLLRDLGIKGQSQRLAIRAVSEAAEGSSQWLWMKRKDPQLGPEVRGPGGMRSTMLDSGRRTPLPCIVLWDVGYQQQGNSYD

SEQ ID NO: 26483 - protein, 1142 aa, Oncorhynchus mykiss
MVTTGPETTTSNESTAQENTTATVTSSAATAGHKQMQVCVCGWRKVTSHHGLRIHQGKKGCLGKERQRPRIDYFLRKRSNQSNEAQQLDANHSLQCISTTVMEDVNSSTEVTTEVEPTTGVELTEPPRPAVERRLPGHRPYVKWPGASDKKLWETVNTDLTLTLEKLRGTVEKKLERMGDIIYEYGTERFGVEEAKGGRKVPTPPVSRRQQEIKRLVQERRQLKKQWKKASEVEKEGIEALQADIKTRLASLRRAENLRKRRRKKEQTRTRFYKDPFKFLKSLFTKEKSGALKTTKKDLEEHLRTTNFDSKRHEHLAIPSDIPPIEPPEHHIETSPPTWKEVENTVRRARTASAPGPNGVPYKVYKNAPDVLRFLWRLMRTAWKNKIIPKVWRRAGGVLIPKEKDAVNISQFRPISLLNVEGKIFFRVIAQRMAEYLQRNAYVDTSVQKAGISGFSGCLEHSSMIWHQIQMAKVEKRDLHVVFLDLANAFGSVPHELLWSAFRFFHIPDTITTLVKSYFQDLQFCFTTSEFTTSWQCLNVGIMAGCTISPLAFIMAMEVIIRSSKWVAGGQRVDSGFRLPPLRAYMDDITTLTTTVPCTRRLLRKLEENISWARMKIKPSKSRSISIVKGVLSDLKFFIGDDQIPTVSEQPVKSLGRWYDASLKDKDQVQQLRKDISSSLQSIDNTQLPGKLKAWCLQFGLLPRVLWPLAVYEVPISTVEKMERGVTGYLKKWLGVPRCLTTIGLYGDGVLKLPLTSLTEEFKCSKTRLQMTLNESRDPVVSNNAPTLATGRKWRPGKAVQEATAALRHADIVGHVQQGRGGLGLTSRAAWSKATAPERRKMVVQEVRHQEEAARWAKAVSLSKQGQWTRWDSVEKRKISWKDLWAMEARRLSFSIRATYDVLPTPVNLHQWYGEDPDCALCSMPANLRHILTGCKTSLTQGRYTWRHNQVLKNLASAMEDKRAATNSLPPPAASHPLRTNFVREGAKPPKRGSTPLERDQLRLARDWKMLADIGRQLVFPPEIATTTLRPDMVLWSRSLKKVFIIELTVPWEDSVDEAYERKHLRYADLAAEARHHGWNTEVRPVEVGCRGFVATSTTRLLRDLGIKGQSQRSAIKAVSEAAEGSSQWLWMKRKDPSWAPK

SEQ ID NO: 26484 - protein, 1179 aa, Oncorhynchus gorbuscha
MLRSMLETPALATESQNTRIPLESARAGAEDDSSADNMVTTGLETTTSNESTAQENTTATVTSSAATVGHKQMQVCVCGWRKVTSHHGLRIHQGKKGCLGKERQRTRIDYFLRKRSNQSNEAQQLDANHSLQCISTTVMEDVNSSTEVATEVEPTTGVELTQPPRPAVERRLPGHRPYVKWPGASDKKLWETVNTDLTLTLEKLRGTVEKKLERMGDIIYEYGTERFGVEEAKGGRKVPTPPVSRRQQEIKRLVQERRQLKKQWKKASEVEKEGIEALQADIKTRLASLRRAENLRKRRRKKEQTRTRFYKEPFKFLKSLFTKEKSGALKTTKKDLEEHLRITNVDSKRHEHLAIPSDIPPIEPPEHHIETSPPTWKEVEDTVRRARTASGPGPNGVPYKVYKNTPDVLRFLWRLMRTAWQKKIIPKVWRRAGGVLIPKEKDAVNISQFRPISLLNVEGKIFFRVIAQRMAEYLQRNTYVDASVQKAGISGFSGCLEHSSMIWHQIQMAKVEKRDLHVVFLDLANAFGSVPHELLWSAFRFFHIPDTITNLVKSYFQDLQFCFTTSEFTTSWQCPNVGIMAGCTISPLAFTMAMEVIIRSSKWVAGGQRVDSGFRLPPLRAYMDDITTLTTTVPCTRRLLRKLEENISWARMKIKPSKSRSISIVKGVLSDLKFFIGDDQIPTVSEQPVKSLGRWYDASLKDKDQVQQLRKDISSSLQSIDNTQLPGKLKAWCLQFGLLPRVLWPLALYEVPISTVEKMERGVTGYLKKWLGVPRCLTTIGLYGDGVLKLPLTRLTEEFKCAKTRLQMTLNESRDPVVSNNAPTLATGRKWRPGKAVQEATAALRHADIVGHVQQGRGGLGLTSRAAWSKATAPERRKMVVQEVRHQEEAARWAKAVSLAKQGQWTRWDSVEKRKISWKDLWAMEARRLSFSIRATYDVLPTPVNLHQWYGEDPDCALCSMPANLRHILTGCKTSLAQGRYTWRHNQVLKNLASALEDKRAATNSLPPTAASHSLRTNFVREGAKPPKSGSTPLERDQLRLARDWKMLADIGRQLVFPPEIATTTLRPDMVLWSRSLNKVFIIELTVPWENSVDEAYERKHLRYADLAAEARHHGWNTEVRPVEVGCRGFVATSTTRLLRDLGIKGQSQRSAIKAVSEAAEGSSQWLWMKRKDPSWAPK

SEQ ID NO: 26485 - protein, 965 aa, Tachysurus fulvidraco
MGDIIYEYGAERFGVQEAKGGRKVPTPPVSRRQQELKRLVQERRQLKKQWKKASEEEKEGIEALQVYIKTRLASLRKAENLRKRRRKKEQTRTRFYKDPFKFLKRLFTREKSGALKTTKKDLEEHLRTTNFDPKRYQHLAIPSDIPPIEPPEHHIETSPPTWKEVEDIVRRARTASAPGPNGVPYKVYKNAPDVLRFLWRLMRTAWQKKIIPKVWRRAGGVLIPKEKDAVNISQFPPISLLNAEGKIFFRVIAQRMAVFLQRNAYVDTSVQKAGISGFSGCLEHSSMIWHQIQMAKMEKRDLHVVFLDLANAFGSVPHELLWSAFKFFHIPDTITTLVKAYFQDLQFCFTTSKFTTSWQCLNVGIMAGCTISPLAFIMAMEVIIRSSKWVAGGQRVDSGFRLPPLRAYMDDITTLTTTVPCTRRLLRKLEENIRWARMKINPSKSRNISIVKGVLSDLKFFIGDVQIPTVSEQPVKSLGRWYDASLKDKDQVQQLRKDISSSLQSIDNTQLPGKLKAWCLQFGLLPRVLWPLVVYEVPISIVEKIERGVTAYLKKWLGVPRCLTTICLYGDGVLKLPLTSLTEEFKCAKTRLQMTLNESRDPVVSNNAPTLATGRKWRPGKAVQEAIAALRHADIVGHVQQGRGGLGLTSRAVWSKATAPERRMMVVQDVRHQQEAASWAKAVSLGKQGQWTRWDSVEKRKISWKELWAMEAMRLSFSIRATYDVLPTPDNLHQWYGEDPECALCSMPANLRHILTACKTSLIQGRYTWRHNQVLKNLASALEDKRVATNSLPPPAASHPLWTTFVREGAKPQKSSSTPSERDQLHLARDWKMLSDIGRQLVFPPEIATTTLRPDMVLWSCSLKKVFIIELTVPWEDSVDEAYERKHLRYADLAAEARHHGWNTEVRPVEVGCRCFVATSMTRLFRDLGIKGQSQRSAIRAVSEAAEGSSQWLWMKRKDPSWAPK

SEQ ID NO: 26486 - protein, 953 aa, Pimephales promelas
MDILSHFSFPLVNRFASTISPYQIKRLVQERRQLKKQWKKASEVEKEGIEALQADIKTRLASLRRAENLRKRRRKKEQTRTRFYKDPFKFLKSLFTEEKSGALKTTKKDLEEHLRTTNFDSKRHEHLAIPSDIPPIEPPEYHIETSPPTWKEVENIVRRARTASAPGPNGVPYKVYKNAPDVLRFLWRLMRTAWQKKKIPKVWRRAGGVLIPKEKDAETISLFRPISLLNVEGKIFFKVIAQRMAEFLQKNAYVDTSVQKAGILGFSGCLEHSSMIWHQIQMAKVEKRDLHVVFLDLANAFGSVPNELLWSAFRFFHIPDTITTLVRSYFQDLQFCFTTSEFTTSWQTLNVGIMAGCTISPLAFIMAMEVIIRASRWVVGGQRVNSGYRLPPLRAYMDDITTLTTTVPCTRRLLRKLEENISWAHMKIKPSKSRSISIVKGKLSKLKFFIGHDQIPTVSEQPVKSLGRWYDASLKDKDQVQQLRNDISSSLQGIDNTQLPGKLKAWCLQFGLLPRVLWPLVVYEVPISTVEKMERGVTGYLKKWLGVPRCLTTIGLYGDGVLKLPLTSLTEEFKCGKTRLQMMLNESRDLVVSNNAPTLATGRKWRPGKAVQEATAALKHADILGHVQQGRGGLGLTSHAVWSKATAPERRKMVVQEVRQQEEAARWAKAVSLAKQGQWTRWDSVEKRKISWKDLWAMEARRLSFSIRATYDVLPTPVNLHQWYCEDPECALCSMPANLRHILTGCKTSLTQGRYTWRHNQVLKTLASALENKRAATNSLPPPAASHPLRMTFVREGAKPPKSSSTPLDRDQLRLARDWKMLADIGQQLVFPPEIATTTLRPDMVLWSRSLKKAFIIELTVPWEDSVDEAYERKHLRYAELAAEAQRHGWNTEIRPVEVGCRGFVATSTIRLLRDLGIKGQSQRSAIRAVSEAAEVSSQWLWIKRKDPSWAPK

SEQ ID NO: 26487 - protein, 1179 aa, Oncorhynchus kisutch
MRRSMLETPALATESQHTRIPLESARAGAEDDSSADNMVTTGPETTTSNESTAQENTTATVTSSAATAGHKQMQVCVCGWRKVTSHHGLRIHQGKKGCLGKERQRPRIDYFLRKRSNQSNEAQQLDANHSLQCISTTVMEDVHSSTEVTTEVEPTTVVELTEPPRPAVERRLPGHRPYVKWPGASDKKLWETVNTDLTLTLETLRGTVEKKLERMGDIIYEYGTERFGVEEAKGGRKVPTPPVSRRQQEIKRLVQERRQLKKQWKKASEVEKEGIEALQADIKTWLASLRRAENLRKRRRKKEQTRTRFYKDPFKFLKSLFTKEKSGALKTTKKDLEEHLRTTNFDSKRHEHLAIPSDIPPIEPPEHHIETSPPTWKEVENTVRRARTASAPGPNGVPYKVYKNAPDVLRFLWRLMRTAWKNKIIPKVWRRAGGVLIPKEKDAVNISQFRPISLLNVEGKIFFRVIAQRMAEYLQSNAYVDTSVQKAGISGFSGCLEHSSMIWHQIQMAKVEKRDLHVVFLDLANAFGSVPHELLWSAFRFFHIPDTITTLVKSYFQDLQFCFTTSEFTTSWQCLNVGIMAGCTISPLAFIMAMEVIIRSSKWVAGGQRVDSGFRLPPLRAYMDDITTLTTTVPCTRRLLRKLEENISWARMKIKPSKSRSISIVKGVLSDLKFFIGDDQIPTVSEQPVKSLGRWYDASLKDKDQVQQLRKDISSSLQSIDNTQLPGKLKAWCLQFGLLPRLLWPLAVYEVPISTVEKMERGVTGYLKKWLGVPRCLTTIGLYGDGILKLPLTSLTEEFKCSKTRLQMTLNESRDPVVSNNAPTLATGRKWRPGKAVQEATAALRHADIVGHVQQGRGGLGLTSRAAWSKATAPERRKMVVQEVRHQEEAARWAKAVSLSKQGQWTRWDSVEKRKISWKDLWAMEARRLSFSIRATYDVLPTPVNLHQWYGEDPDCALCSMPANLRHILTGCKTSLTQGRYTWRHNQVLKNLASALEDKRAATNSLPPPAASHPLRTNFVREGAKPPKRGSTPLERDQLRLARDWKMLADIGRQLVFPPEIATTTLRPDMVLWSHSLKKVFIIELTVPWEDSVDEAYERKHLRYADLAAEARHHGWNTEVRPGEVGCRGFVATSTTRLLRDLGIKGQSQRSAIKAVSEAAEGSSQWLWMKRKDPSWAPK

SEQ ID NO: 26488 - protein, 1042 aa, Lethenteron reissneri
MTINDLSIYLTAGHKQMQVCVCGWRKVTSHHGLRIHQGKKGCLGKERQRPRIDYFLRKRSNQSNEAQQLDVNHSLQCISTTVMEDVNSSTEVTTEVEPTTGVELTQPPRPAVERRLPGHRPYVKWPGASDKKLWETVNTDLTLTLEKLRGTVEKKLERMGDIIYEYGAESFGVQEAKGGRKVPTPPVSRRQQEIKRLVQERRQLKKQWTKASEVEKEGIEALQADIKTRLASLRRAENLRKRRRKKEQTRTRFYEHPFKFLKSLFTKEKSGVLKTTKKDLEEHLRTTNFDSKRHEHLAIPSDIPPIEPPEHHTETSPPTWKEVENTVRRARTASAPGPNGVPYKVYKNAPDVLRFLWRLMGIAWKKKIIPKVWRRAGGVLIPKEKDAVNISQFRPISLLNVEGKIFFRVIAQRMAEYLQRNAYVDTSVQKAGISGFSGCLEHSSMIWHQIQMAKVEKRDLHLAFLDLANAFGSVPHELLWSAFRFFHIPDTITTLVKSYFQDLQFCFTTSEFTTSWQCLNVGIMAGCTISPLAFIMAMEVIIRSSKWVAGGQRVDSGCRLPPLRAYMDDITTLTTTVPCTRRLLRKLEENISWARMKIKPSKSRSISIVKGVLCDLKFFIGDDQIPTVSEQLVKSLGRWYDASLKDKDQVQQLRKDISSSLQSIDNTQLPGKLKAWCLQFGLLPRVLWPLAVYEVPISTVEKMERGVTSYLKKWLGVPRCLTTIGLYGDGVLKLPLTSLTEEFKCAKTRLQMTLNESRDPVVSNNAPTLATGRKWRPGKAVQEATAALRHAAIVGHVQQGRGGFGLTSRAAWSKATAPERRKMVVQEVRHQEEAARWAKAVSLAKQGQWTRWDSVEKRKISWKDLWAMEARRLSFSIRATYDVLPTPVNLHQWYGEDPDCALCSMPANLRHILTGCKTSLTQGRYTWRHNQVLKNLASALEDKRTATNSLPPPAASHPLRTTFVREGAKPPKSGSTPIERDQLRLARDWKMLADIGRQLVFPPEIATTTLRPDVVIWSRSLKKVFIIELTVPWEDSVDEAYE

SEQ ID NO: 26489 - protein, 1176 aa, Lethenteron reissneri
MLRSMLETPALATESQHTRIPLESARAGAEDDSSTDNMVTTGPETTTSNESIAQENTTATVTSSAATAGHKQMQVCVCCWRKVTSHHGLRIHQGKKGCLGKERQRPRIDYFLRKRSYQSNEAQQLDANHSLQCISTTVMEDVNSSTEVTTEVEPTTGVELTQPPRPAVERRLPGHRPYVKWPGASDKKLWETVNTDLTLTLEKLRGTVEKKLERMGDIIYEYGAESFGVQEAKGRRKVPTPPVSRRQQEIKRLVQERRQLKKQWKKASEVEKEGIEALQADIKTRLASLRRAENLRKRRRKKEQTRTRFYKDPFKFLKSLFPNEKSGVLKTTKKDLEEHLRTTNFDSKRHEHLTIPADIPPIEPPEHHIETSPPTWKEVENTVRRARTASAPGPNGVPYKVYKNAPDVLRFLWRLMRTAWQKKIIPKVWHRAGGVLIPKEKDAVNISQFRPISLLNVEGKIFFRGIAQRMAEYLQRNAYVDTSVQKAGISGFSGCLEHSSVIWHQIQMAKVEKRDLHVVFLDLANAFGSVPHELLWSAFRFFHIPDTITTLVKSYFQDLQFCFTTSEFTTSWQCLNVGIMAGCTISPLAFIMAMEVIIRSSKWVAGGQRVDSGFRLPPLRAYMDDITTLTTTVPCTRRLLRKLEENISWARMKIKPSKSRSISIVKGVLCDLKFFIGDDQIPTVSEQPVKSLGRWYDASLKDKDQVQQLRKDISSSLQSIDNTQLPGKLKAWCLQFGLLPRVLWPLAVYEVPISTVEKMERGVTSYLKKWLGVPRCLTTIGLYGNGVLKLPLTSLTEEFKCAKTRLQMTLNESRDPVVSNNAPTLATGRKWRPGKAVQEATAALRHADIVGHVQQGRGGLGLTSRAAWSKATAPERRKMVVQEVRHQEEAARWAKAVSLAKQGQWTRWDSVEKRKISWKDLWAMEARRLSFSIRATYDVLPTPVNLHQWYGEDPDCALCSMPANLRHMCKTSLTQGRYTWRHNQVLKNLASALEDKRAATNSLPPPAASHPLRTTFVREGAKPPKSGSTPIERDQLRLARDWKMLADIGRQLVFPPEIATTTLRPDMVLWSCSLKKVFIIELTVPWEDSVDEAYERKHLRYADLAAEARHHGWNTEVRPVEVGCRGFVATSTTRLLRDLGIKGQSQRSAIRAVSEAAEGSSQWLWMKRKDPSWAPK

SEQ ID NO: 26490 - protein, 1142 aa, Oncorhynchus mykiss
MVTTGPETTTSNESTAQENTTATVTSSAATAGHKQMQVCVCGWRKVTSHHGLRIHQGKKGCLGKERQRPRIDYFLRKRSNQSNEAQQLDANHSLQCISTTVMEDVNSSTEVTTEVEPTTGVELTEPPRPAVERRLPGHRPYVKWPGASDKKLWETVNTDLTLTLEKLRGTVEKKLERMGDIIYEYGTERFGVEEAKGGRKVPTPPVSRRQQEIKRLVQERRQLKKQWKKASEVEKEGIEALQADIKTRLASLRRAENLRKRRRKKEQTRTRFYKDPFKFLKSLFTKEKSGALKTTKKDLEEHLRTTNFDSKRHEHLAIPSDIPPIEPPEHHIETSPPTWKEVENTVRRARTASAPGPNGVPYKVYKNAPDVLRFLWRLMRTAWKNKIIPKVWRRAGGVLIPKEKDAVNISQFRPISLLNVEGKIFFRVIAQRMAEYLQRNAYVDTSVQKAGISGFSGCLEHSSMIWHQIQMAKVEKRDLHVVFLDLANAFGSVPHELLWSAFRFFHIPDTITTLVKSYFQDLQFCFTTSEFTTSWQCLNVGIMAGCTISPLAFIMAMEVIIRSSKWVAGGQRVDSGFRLPPLRAYMDDITTLTTTVPCTRRLLRKLEENISWARMKIKPSKSRSISIVKGVLSDLKFFIGDDQIPTVSEQPVKSLGRWYDASLKDKDQVQQLRKDISSSLQSIDNTQLPGKLKAWCLQFGLLPRVLWPLAVYEVPISTVEKMERGVTGYLKKWLGVPRCLTTIGLYGDGVLKLPLTSLTEEFKCSKTRLQMTLNESRDPVVSNNAPTLATGRKWRPGKAVQEATAALRHADIVGHVQQGRGGLGLTSRAAWSKATAPERRKMVVQEVRHQEEAARWAKAVSLSKQGQWTRWDSVEKRKISWKDLWAMEARRLSFSIRATYDVLPTPVNLHQWYGEDPDCALCSMPANLRHILTGCKTSLTQGRYTWRHNQVLKNLASALEDKRAATNSLPPPAASHPLRTNFVREGAKPPKRGSTPLERDQLRLARDWKMLADIGRQLVFPPEIATTTLRPDMVLWSRSLKKVFIIELTVPWEDSVDEAYERKHLRYADLAAEARHHGWNTEVRPVEVGCRGFVATSTTRLLRDLGIKGQSQRSAIKAVSEAAEGSSQWLWMKRKDPSWAPK

SEQ ID NO: 26491 - protein, 1179 aa, Oncorhynchus kisutch
MRRSMLETPALATESQHTRIPLESARAGAEDDSSADNMVTTGPETTTSNESTAQENTTATVTSSAATAGHKQMQVCVCGWRKVTSHHGLRIHQGKKGCLGKERQRPRIDYFLRKRSNQSNEAQQLDANHSLQCISTTVMEDVNSSTEVTTEVEPTTVVELTEPPRPAVERRLPGHRPYVKWPDASAKKLWETVNTDLTLTLETLRGTVEKKLERMGDIIYEYGTERFGVEEAKGGRKVPTPPVSRRQQEIKRLVQERRQLKKQWKKASEVEKEGIEALQADIKTRLASLRRAENLRKHRRKKEQTRTRFYKDPFKFLKSLFTKEKSGALKTTKKDLEEHLRTTNFDSKRHEHLAIPSDIPPIEPPEHHIETSPPTWKEVENTVRRARTASAPGPNGVPYKVYKNAPDVLRFLWRLMRTVWKNKIIPKVWRRAGGVLIPKEKDAVNISQFRPISLLNVEGKIFFRVNAQRMAGYLQRNAYVDTSVQKAGISGFSGCLEHSSMIWHQIQMAKVEKRDLHVVFLDLANAFGSVPHELLWSAFRFFHIPDTITTLVNSYFQDLQFCFTTSEFTTSWQCLNVGIMAGCTISPLAFIMAMEVIIRSSKWVAGGQRVDSGFRLPPLRAYMDDITTLTTTVPCTRRLLRKLEENISWARMKIKPSKSRSISIVKGVLSDLKFFIGDDQIPTVSEQPVKSLGRWYDASLKDKDQVQQLRKDISSSLQSIDNTQLPGKLKAWCLQFGLLPRVLWPLAVYEVPISTVEKMERGVTGYLKKWLGVPRCLTTIGLYGDGVLKLPLTSLTQEFKCSKTRLQMTLNESRDPVVSNNAPTLATGRKWRPGKAVQEATAALRHADIVGHVQQGRGGLGLTSRAAWSKATAPERRKMVVQEVRHQEEAARWAKAVSLSKQGQWTRWDSVEKRKMSWKDLWAMEARRLSFSIRATYDVLPTPVNLHQWYGEDPDCALCSMPANLRHILTGCKTSLTQGRYTWRHNQVLKNLASALEDKRAATNSLPPPAASHPLRTNFVREGAKPPKRGSTPLERDQLRLARDWKMLADIGRQLVFPPEIATTPLRPDMVLWSRLLKKVFIIELTVPWEDSVDEAYERKHLRYADLAAEARHHGWNTEVRPVEVGCRGFVATSTTRLLRDLGIKGQSQRSAIKAVSEAAEGSSQWLWMKRKDPSWAPK

SEQ ID NO: 26492 - protein, 764 aa, Lethenteron reissneri
MRTAWQKKIIPKVWRRAGGVLIPKEKDAVNISQFRPISLLNVEGKIFFRIIAQRMAEYLQRNAYVNTSVQKAGISGFSGCLEHSSMIWHQIQMAKVEKRDLHVVFLDLANAFGSVPHELLWSAFRFFHIPDTITTLVKSYFQDLQFCFTTSEFTTSWQCLNVGIMAGCTISPLAFIMAMEVIIRSSKWVAGGQRVDSGFRLPPLRAYMDDITTLTTTVPCTRRLLRKLEENISWARMKIKPSKSRSISIVKGVLCDLKFFIGDDQIPTVSEQPVKSLGRWYDASLKDKDQVQQLRKDISSSLQSIDNTQLPGKLKAWCLQFGLLPRVLWPLAVYEVPISTVEKMERGATSYLKKWLGVPRCLTTIGLYGDGVLKLPLTSLTEEFKCAKTRLQMTLNESRDPVVSNNAPTLATGRKWRPGKAVQEATAALRHADIVGHVQQGRGGLGLTSRAAWSKATAPERRKMVVQEVRHQEEAARWAKAVSLAKQGQWTRWDSVEKRKISWKDLWAMEARRLSFSIRATYDIFPTPVNLHQWYGEDPDCALCSMPANLRHILTGCKTSLTQGRYTWRHNQVLKNLASALEDKRAATNSLPPPAASHPLRTTFVREGAKPPKSGSTPIERDQLHLARDWKMLADIGRQLVFPPEIATTTLRPDMVLWSCSLKKVFIIELTVPWEDSVDEAYERKHLRYADLAAEARHHGWNTEVRPVEVGCRGFVATSTTRLLRDLGIKGQSQRSAIRAVSEAAEGSSQWLWMKRKDPSWAPK

SEQ ID NO: 26493 - protein, 1179 aa, Lethenteron reissneri
MLRSMLETPALATESQHTRIPLESARAGAEDDSSTDNMVTTGPETTTSNESTAQENTTATVTSSAATAGHKQMQVCVCGWRKVTSHHGLRIHQGKKGCLGKERQRPRIDYFLRKRSNQSNEAQQLDANHSLQCISTTVMEDVNSSTEVTTEVEPTTGVELTQPPRPAVERRLPGHRPYVKWPGASDKKLWETVNTDLTLTLEKLRGTVEKKLERMGDIIYEYGAESFGVQEAKGGRKVPTPPVSRRQQEIKRLVQERRQLKKQWKKASEVEKEGIEALQADIKTRLASLRRAENLRKRRRKKEQTRTRFYKDPFKFLKSLFTKEKSGVLKTTKKDLEEHLRTTNFDSKRHEHLAIPSDIPPIEPPEHHIETSPPTWKEVENTVRRARTASAPGPNGVPYKVYKNAPDVLRFLWRLMGIAWKKKIIPKVWRRAGGVLIPKEKDAVNISQFRPISLLNVEGKIFFRVIAQRMAEYLQRNAYVDTSVQKAGISGFSGCLEHSSMIWHQIQMAKVEKRDLHVVFLDLANAFGSVPHELLWSAFRFFHIPDTITTLVKSYFQDLQFCFTTSEFTTSWQCLNVGIMAGCTISPLAFIMAMEVIIRSSKWVAGGQRVDSGCRLPPLRAYMDDITTLTTTVPCTRRLLRKLEENISWARMKIKPSKSRSISIVKGVLCDLKFFIGDDQIPTVSEQPVKSLGRLYDSSLKDKDQVQQLRKDISSSLQSIDNTQLPGKLKAWCLQFGLLPRVLWPLAVYEVPISTVEKMERGVTGYLKKWLGVPRCLTTIGLYGDGVLKLPLTSLTEEFKCAKTRLQMTLNESRDPVVSNNAPTLATGRKWRPGKAVQEATAALRHADIVGHVQQGRGGFGLTSRAAWSKANAPERRKMVVQEVRHQEEAARWAKAVSLAKQGQWTRWDSVEKRKISWKDLWAMEARRLSFSIRATYDVLPTPVNLHQWYGEDPDCALCSMPANLRHILTGCKTSLTQGRYTWRHNQVLKNLASALEDKRTATNSLPPPAASHPLRTTFVREGAKPPKSGSTPIERDQLRLARDWKMLADIGRQLVFPPEIATTTLRPDMVLWSRSLKKVFIIELTVPWEDSVDEAYERKHLRYADLAAEARHHGWNTEVRPVEVGCRGFVATSTTRLLRDLGIKGQSQRSAIRAVSEAAEGSSQWLWMKRKDPSWAPK

SEQ ID NO: 26494 - protein, 1041 aa, Oncorhynchus gorbuscha
MEDVNSSTEVATEVEPTTGVELTQPPRPAVERRLPGHRPYVKWPGASDKKLWETVNTDLTLTLEKLRGTVEKKLERMGDIIYEYGTERFGVEEAKGGRKVPTPPVSRRQQEIKRLVQERRQLKKQWKKASEVEKEGIEALQADIKTRLASLRRAENLRKRRRKKEQTRTRFYKDPFKFLKSLFTKEKSGALKTTKKDLEEHLRITNVDSKRHEHLAIPSDIPPIEPPEHHIETSPPTWKEVEDTVRRARTASGPGPNGVPYKVYKNTPDVLRFLWRLMRTAWQKKIIPKVWRRAGGVLIPKEKDAVNISQFRPISLLNVEGKIFFRVIAQRMAEYLQRNTYVDASVQKAGISGFSGCLEHSSMIWHQIQMAKVEKRDLHVVFLDLANAFGSVPHELLWSAFRFFHIPDTITNLVKSYFQDLQFCFTTSEFTTSWQCLNVGIMAGCTISPLAFTMAMEVIIRSSKWVAGGQRVDSGFRLPPLRAYMDDITTLTTTVPCTRRLLRKLEENISWARMKIKPSKSRSISIVKGVLSDLKFFIGDDQIPTVSEQPVKSLGRWYDASLKDKDQVQQLRKDISSSLQSIDNTQLPGKLKAWCLQFGLLPRVLWPLALYEVPISTVEKMERGVTGYLKKWLGVPRCLTTIGLYGDGVLKLPLTSLTEEFKCAKTRLQMTLNESRDPVVSNNAPTLATGRKWRPGKAVQEATAALRHADIVGHVQQGRGGLGLTSRAAWSKATAPERRKMVVQEVRHQEEAARWAKAVSLAKQGQWTRWDSVEKRKISWKDLWAMEARRLSFSIRATYDVLPTPVNLHQWYGEDPDCALCSMPANLRHILTGCKTSLAQGRYTWRHNQVLKNLASALEDKRAATNSLPPTAASHSLRTNFVREGAKPPKSGSTPLERDQLRLARDWKMLADIGRQLVFPPEIATTTLRPDMVLWSRSLNKVFIIELTVPWENSVDEAYERKHLRYADLAAEARHHGWNTEVRPVEVGCRGFVATSTTRLLRDLGIKGQSQRSAIKAVSEAAEGSSQWLWMKRKDPSWAPK

SEQ ID NO: 26495 - protein, 965 aa, Oncorhynchus kisutch
MGDIIYEYGTERFGVEEAKGGRKVPTPPVSRRQQEIKRLVQERRQLKKQWKKASEVEKEGIEALQADIKTRLASLRRAENLRKRRRKKEQTRTRFYKDPFKFLKSLFTKEKSGALKTTKKDLEEHLRTTNLDSKRHEHLAIPSDIPPIEPPEHHIETSPPTWKEVENTVRGARTASAPGPNGVPYKVYKNAPDVLRFLWRLMRTAWKNKIIPKVWRRAGGVLIPKEKDAVNISQFRPISLLNVEGKIFFRVIAQRMAEYLQRYAYVDTSVQKAGISGFSGCLEHSSIIWHQIQMAKVEKRDLHVVFLDLANAFGSVPHELLWSAFRFFHIPDTITTLVKSYFQDLQFCFTTSEFTTSWQCLNVGIMAGCTISPLAFIMAMEVIIRSSKWVAGGQRVDSGFRLPPLRAYMDDITTLTTTVPCTRRLLRKLEENISWARMKIKPSKSRSISIVKGVLSDLKFFIGDDQIPTVSEQPVKSLGRWYDASLKDKDQVQQLRKDISSSLQSIDNTQLPGKLKAWCLQFGLLPRVLWPLAVYEVPISTVEKMERGVTGYLKKWLGVPRCLTTIGLYGDGVLKLPLTSLTEEFKCSKTRLQMTLNESRDPVVSNNAPTLATGRKWRPGKAVQDATAALRHADIVGHVQQGRGGLGLTRRAAWSKATAPERRKMVVQEVRHQEEAARWAKAVSLAKQGQWTRWDSVEKRKISWKDLWAMEARRLSFSIRATYDVLPTPVNLHQWYGEDPDCALCSMPANLRHILTGCKTSLTQGRYTWRHNQVLKNLASALEDKRAATNSLPPPAASHPLRTNFVREGAKPLKRGSTPLERDQLRLARDWKMLADIGRQLVFPPEIATTTLRPDMVLWSRSLKKVFIIELTVPWEDSVDEAYERKHLRYADLAAEARHHGWNTEVRPVEVGCRGFVATSTTRLLRDLGIKGQSQRSAIKAVSEAAEGSSQWLWMKRKDPSWAPK

SEQ ID NO: 26496 - protein, 1179 aa, Lethenteron reissneri
MLRSMLETPDLATESQHTRIPLESARAGAEDDSSTDNMVTTGPETTTSNESTAQENTTATVTSSAATAGHKQMQVCVCGWRKVTSHHRLRIHQGKKGCLGKERQRPRIDYFLRKRSNQSNEAQQLDANHSLQCISTTVMEDVNSSTEVTTEVEPTTGVELTQPPRPAIERRLPGHRPYVKWPGASDKKLWETVNTDLTLTLEKLRGTVEKKLERMGDIIYEYGAESFGVQEAKGGRKVPTPPVSRRQQEIKRLVQERRQLKKQWKKASEVEKEGIEALQADIKTRLASLRRAENLRKRRRKKEQTRTRFYKDPFKFLKSLFTKEKSGVLKTTKKDLEEHLRTTNFDSKRHEHLAIPSDIPPIEPPEHHIETSPPTWKEVENTVRRARTASAPGPNGVPYKVYKNAPDVLRFLWRLMRTAWQKKIIPKVWRRPGGVLIPKEKDAVNISQFRPISLLNVEGKIFFRIIAQRMAEYLQRNAYVDTSVQKAGISGFSGCLEHSSMIWHQIQMAKVEKRDLHVVFLDLANAFGSVPHELLWSAFRFFHIPDTITTLVKSYFQDLQFCFTTSEFTTSWQCLNVGIMAGCTISPLAFIMAMEVIIRSSKWVAGGQRVDSGFRLPPLRAYMDDITTLTTTVPCTRRLLRKLEENISWARMKIKPSKSRSISIVKGVLCDLKFFIGDDQIPTVSEQPVKSLGRWYDASLKDKDQVQQLRKDISSSLQSIDNTQLPGKLKAWCLQFGLLPRVLWPLAVYEVPISTVEKMERGATSYLKKWLGVPRCLTTIGLYGDGVLKLPLTSLTEEFKCAKTRLQMTLNESRDPVVSNNAPTLATGRKWRPGKAVQEATAALRHADIVGHVQQGRGGLGLTSRAAWSKATAPERRKMVVQEVRHQEEAARWAKAVSLAKQGQWTRWDSVEKRKISWKDLWAMEARRLSFSIRATYDILPTPVNLHQWYGEDPDCVLCSMPANLRHILTGCKTSLTQGCYTWRHNQVLKNHASALEDKRAATNSLPPPAASHPLRTTFVREGAKPPKSGSTPIERDQLRLARDWKMLADIGRQLVFPPEIATTTLRPDMVLWSRSLKKVFIIELTVPWEDSVDEAYERKHLRYADLAAEARHHGWNTEVRPVEVGCRGFVATSTTRLLRDLGIKGQSQRSAIKAVSEAAEGSSQWLWMKRKDPSWAPK

SEQ ID NO: 26497 - protein, 1142 aa, Oncorhynchus gorbuscha
MVTTGLETTTSNESTAQENTTATVTSSAATVGHKQMQVCVCGWRKVTSHHGLRIHQGKKGCLGKERQRTRIDYFLRKRSNQSNEAQQLDANHSLQCISTTVMEDVNSSTEVATEVEPTTGVELTQPPRPAVERRLPGHRPYVKWPGASDKKLWETVNTDLTLTLEKLRGTVEKKLERMGDIIYEYGTERFGVEEAKGGRKVPTPPVSRRQQEIKRLVQERRQLKKQWKKASEVEKEGIEALQADIKTRLASLRRAENLRKRRRKKEQTRTRFYKDPFKFLKSLFTKEKSGALKTTKKDLEEHLRITNVDSKRREHLAIPSDIPPIEPPEHHIETSPPTWKEVEDTVRRARTASGPGPNGVPYKVYKNTPDVLRFLWRLMRTAWQKKIIPKVWRRAGGVLIPKEKDAVNISQFRPISLLNVEGKIFFRVIAQRMAEYLQRNTYVDASVQKAGISGFSGCLEHSSMIWHQIQMAKVEKRDLHVVFLDLANAFGSVPHELLWSAFRFFHIPDTITNLVKSYFQDLQFCFTTSEFTTSWQCLNVGIMAGCTISPLAFTMAMEVIIRSSKWVAGGQRVDSGFRLPPLRAYMDDITTLTTTVPCTRRLLRKLEENISWARMKIKPSKSRSISIVKGVLSDLKFFIGDDQIPTVSEQPVKSLGRWYDASLKDKDEVQQLRKDISSSLQSIDNTQLPGKLKAWCLQFGLLPRVLWPLALYEVPISTVEKMERGVTGYLKKWLGVPRCLTTIGLYGDGVLKLPLTSLTEEFKCAKTRLQMTLNESRDPVVSNNAPTLATGRKWRPGKAVQEATAALRHADIVGHVQQGRGGLGLTSRAAWSKATAPERRKMVVQEVRHQEEAARWAKAVSLAKQGQWTRWDSVEKRKISWKDLWAMEARRLSFSIRATYDVLPTPVNLHQWYGEDPDCALCSMPANLRHILTGCKTSLAQGRYTWRHNQVLKNLASALEDKRAATNSLPPTAASHSLRTNFVREGAKPPKSGSTPLERDQLHLARDWKMLADIGRQLVFPPEIATTTLRPDMVLWSRSLNKVFIIELTVPWENSVDEAYERKHLRYADLAAEARHHGWNTEVRPVEVGCRGFVATSTTRLLRDLGIKGQSQRSAIKAVSEAAEGSSQWLWMKRKDPSWAPK

SEQ ID NO: 26498 - protein, 1179 aa, Oncorhynchus kisutch
MRRSMLETPALATESQHTRIPLESARAGAEDDSSADNMVTTGPETTTSNESTAQENTTATVTNSAATAGHKQMQVCVCGWRKVTSHHGLRIHQGKKGCLGKERQRPRIDYFLRKRSNQSNEAQQLDANHSLQCISTTVMEDVNSSTEVTTEVEPTTGVELTEPPRPAVERRLPGHRPYVKWPGASDKKLWETVNTDLTLTLEKLRGTVEKKLERMGDIIYEYGTERFGVEEAKGGRKVPTPPVSRRQQEIKRLVQERRQLKKQWKKASEVEKEGIEALQADIKTQLASLRRAENLRKRRRKKEQTRTRFYKDPFKFLKSLFTKEKSGALKTTKKDLEEHLRTTNFDSKRHEHLAIPSDIPPIEPPEHHIETSPPTWKEVENTVRGARTASAPGPNGVPYKVYKNAPDVLRFLWRLMRTAWKNKIIPKVWRRAGGALIPKEKDAVNISQFRPISLLNVEGKIFFRVIAQRMAEYLQRNAYVDTSVQKAGISGFSGCLEHSSMIWHQIQMAKVEKRDLHVVFLDLANAFGSVPHELLWSAFRFFHIPDTITTLVKSYFQDLQFCFTTSEFTTSWQCLNVGIMAGCTISPLAFIMAMEVIIRSSKWVAGGQRVDSGFRLPPLRAYMDDITTLTTTVPCTRRLLRKLEENISWARMKIKPYKSRSISIVKGVLSDLKFFIGDDQIPTVSEQPVKSLGRWYDASLKDKDQVQQLRKDISSSLQSIDNTQLPGKLKAWCLQFGLLPRVLWPLAVYEVPISTVEKMERGVTGYLKKWLGVPRCLTTIGLYGDGVLKLPLASLTEEFKCSKTRLQMTLYESRDPVVSNNAPTLATGRKWRPGKAVQEATAALRHADIVGHVQQGRGGLGLTSRAAWSKATAPERRKMVVQEVRHQEEAARWAKAVSLAKQGQWTRWDSVEKRKISWKDLWAMEARRLSFSIRATYDVLPTPVNLHQWYGEDPDCALCSMPANLRNILTGCKTSLTQGRYTWRHNQVLKNLASALEDKRAATNSLPPPAASHPLRTNFVREGAKPPKRGSTPLERDQLRLARDWKMLADIGRQLVFPPEIATTTLRPDMVLWSRSLKKVFIIELTVPWEDSVDEAYERKHLRYADLAAEARHHGWNTEVRPVEVGCRGFVATSTTRLLRDLGIKGQSQRSAIKAVSEAAEGSSQWLWMKRKDPSWAPK

SEQ ID NO: 26499 - protein, 1040 aa, Lethenteron reissneri
MEDVNSSTEVTEVEPTTGVELTQPPRPAVERRLPGHRPYVKWPGASDKKLWETVNTDLTLTLEKLRGTVEKKLERMGDIIYEYGAERFGVQEAKGGRKVPTPPVSRRQQEIKRLVQERRQLKKQWKKASEVKKEGIEALQADIKTRLASLRRAENLRKRRRKKEQSRTRFYKDPFKFLKSLFTKEKSGVLKTTKKDLEEHLRTTNFDSKRHEHLAIPSDIPPIEPPELHIETSPPTWKEVENTVRRARTASAPGPNGVQYKVYKNAPDVLRFLWRLMRTAWQKKIIPKVWRRAGGVLIPKEKDAVNISQFRPISLLNVEGKIFFRVIAQRMAEYLQRNAYVDTSVQKAGISGFSGCLEHSSMIWHQIQMAKVEKRDLHVVFLDLANAFGSVPHELLWSAFRFFHIPDTITTLVKSYFQDLQFCFTTSEFTTSWQCLNVGIMAGCTISPLAFVMAMEVIIRSSKWVAGGQRVDSGFRLPPLRAYMDDITTLTTTVPCTRRLLRKLEENISWARMKIKPSKSCSISIVKGVLCDLKFFIGDDQIPTVSEQPIKSLERWYDASLKDKDQVQQLRKDISSSLQSIDNTQLPGKLKAWCLQFGLLPRVLWPLAVYEVPISTVEKMERGVTSYLKKWLGVPRCLDTIGLYGDGVLKLPLTSLTEEFKCAKTRLQMTLNESRDPVVSNSAPTLATGRKWRPGKAVQEATAALRHADIVGHVQQGRGGLGLTSRAAWSKATAPERRKMVVQEVRHQEEAARWAKAVSLAKQGQWTRWDSVEKRKISWKDLWAMEARRLSFSIRAIYDVLPTPVNLHQWYGEDPDCALCSMPANLRHILTGCKTSLTQGRYTWRHNQVLKNLASALEDKRAATNSLPPPAASHPLRTTFVREGAKPPKSGSTPIERDQLRLARDWKMLADIGRQLVFPPEIATTTLRPDMVLWSRSLKKVFIIELTVPWEDSVNEAYERKHLRYADIAAEARHHGWNTEVRPVEVGCRGVVATSTTRLLRDLGIKGQSQRSAIRAVSEAAEGSSQWLWMKKKDPSWAPK

SEQ ID NO: 26500 - protein, 963 aa, Oncorhynchus mykiss
MHFLINSLPESAYKSILLSEFPGVCPVSRRQQEIKRLVQERRQLKKQWKKASEVEKEGIEALQADIKTRLASLRRAENLRKRRRKKEQTRTRFYKDPFKFLKSLFTKEKSGALKTTKKDLEEHLRTTNFDSKRHEHLAIPSDIPPIEPPEHHIETSPPTWKEVENTVRRARTASAPGPNGVPYKVYKNAPDVLRFLWRLMRTAWKNKIIPKVWRRAGGVLIPKEKDAVNISQFRPISLLNVEGKIFFRVIAQRMAEYLQRNAYVDTSVQKAEISGFSGCLEHSSMIWHQIQMAKVEKRDLHVVFLDLANAFGSVPHELLWSAFRFFHIPDTITTLVKSYFQDLQFCFTTSEFTTSWQCLNVGIMAGCTISPLAFIMAMEVIIRSSKWVAGGQRVDSGFRLPSLRAYMDDITTLTTTVPCTRRLLRKLEENISWARMKIKPSKSRSISIVKGELSDLKFFIGDDQIPTVSEQPVKSLGRWYDASLKDKDQVQQLRKDISSSLQSIDNTQLPGKLKAWCLQFGLLPRVLWPLAVYEVPISTVEKMERGVTGYLKKWLGVPRCLTTIGLYGDGVLKLPLTSLTEEFKCSKTRLQMTLNESRDPVVSNNAPTLATGRKWRPGKAVQEATAALRHADIVGHVQQGRGGLGVTSRAAWSKATAPERRKMVVQEVRHQEEAARWAKAVSLSKQGQWTRWDSVEKRKISWKDLWAMEARRLSFSIRATYDVLPTPVNLHQWYGEDPDCALCSMPANLRHILTGCKTSLTQGRFTWRHNQVLKNLASALEDKRAATNSLPPPAASHPLRTNFVREGAKPPKRGSTPLERDQLRLARDWKMLADFGRQLVFPPEIATTTLRPDMVLWSRSLKKVFIIELTVPWEDSVDEAYERKHLRYADLAAETRHHGWNTEVRPVEVGCRGFVATSTTRLLRDLGIKGQSQRSAIKAVSEAAEGSSQWLWMKRKDPSWAPK

SEQ ID NO: 26501 - protein, 1181 aa, Oncorhynchus gorbuscha
MLRSMLETPALATESQNTRIPLESARAGAEDDSSADNMVTTGLETTTSNESTAQENTTATVTSSAATVGHKQMQVCVCGWRKVTSHHGLRIHQGKKGCLGKERQRTRIDYFLRKRSNQSNEAQQLDANHSLQCISTTVMEDVNSSTEVATEVEPTTGVELTQPPRPAVERRLPGHRPYVKWPGASDKKLWETVNTDLTLTLEKLRGTVEKKLERMGDIIYEYGTERFGVEEAKGGRKVPTPPVSRRQQEIKRLVQERRQLKKQWKKASEVEKEGIEALQADIKTRLASLRRAENLRKRRRKKEQTRTRFYKDPFKFLKSLFTKERKKSGALKTTKKDLEEHLRITNVDSKRHEHLAIPSDIPPIEPPEHHIETSPPTWKEVEDTVRRARTASGPGPNGVPYKVYKNTPDVLRFLWRLMRTAWQKKIIPKVWRRAGGVLIPKEKDAVNISQFRPISLLNVEGKIFFRVIAQRMAEYLQRNTYVDASVQKAGISGFSGCLEHSSMIWHQIQMAKVEKRDLHVVFLDLANAFGSVPHELLWSAFRFFHIPDTITNLVKSYFQDLQFCFTTSEFTTSWQCLNVGIMAGCTISPLAFTMAMEVIIRSSKWVAGGQRVDSGFRLPPLRAYMDDITTLTTTVPCTRRLLRKLEENISWARMKIKPSKSRSISIVKGVLSDLKFFIGDDQIPTVSEQPVKSLGRWYDASLKDKDQVQQLRKDISSSLQSIDNTQLPGKLKAWCLQFGLLPRVLWPLALYEVPISTVEKMERGVTGYLKKWLGVPRCLTTIGLYGDGVLKLPLTSLTEEFKCAKTRLQMTLNESRDPVVSNNAPTLATGRKWRPGKAVQEATAALRHADIVGHVQQGRGGLGLTSRAAWSKATAPERRKMVVQEVRHQEEAARWAKAVSLAKQGQWTRWDSVEKRKISWKDLWAMEARRLSFSIRATYDVLPTPVNLHQWYGEDPDCALCSMPANLRHILTGCKTSLAQGRYTWRHNQVLKNLASALEDKRAATNSLPPTAASHSLRTNFVREGAKPPKSGSTPLERDQLRLARDWKMLADIGRQLVFPPEIATTTLRPDMVLWSRSLNKVFIIELTVPWENSVDEAYERKHLRYADLAAEARHHGWNTEVRPVEVGCRGFVATSTTRLLRDLGIKGQSQRSAIKAVSEAAEGSSQWLWMKRKDPSWAPK

SEQ ID NO: 26502 - protein, 1128 aa, Oncorhynchus kisutch
MYMCVLVTTVTSSAATAGHKQIQVCVCGWRKVTSHHGLRIHQGKKGCLGKERQRPRIDYFLRKRSNQSNEAQQLDANHSLQCISTTVMEDVNSSTEVTTEVEPTTGVELTEPPRPAVERRLPGYRPYVKWPGASDKKLWETVNTDLTLTLEKLRGTVEKKLERMGDIIYEYGTERFGVEEAKGGRKVPTPPVSRRQQEIKRLVQERRQLKKQWKKASEVEKEGIEALQADIKTRLASLRRAENLRKRRRKKEQTRTRFYKDPFKFLKSLFTKEKSGALKTTKKDLEEHLRTTNFDSKRHEHLAIPSDIPPIEPPEHHIETSPPTWKEVENTVRGARTASAPGPNGVPYKVYKNAPDVLRFLWRLMRTTWKNKIIPKVWRRAGGVLIPKEKDAVNISQFRPISLLNVEGKIFFRVIAQRMAEYLQRNAYVDTSVQKAGISGFSGCLEHSSMIWHQIQMAKVEKRDLHVVFLDLANAFGSVPHELLWSAFRFFHIPDTITTLVKSYFQDLQFCFTTSEFTTSWQCLNVGIMAGCTISPLAFIMAMEVIIRSSKWVAGGQRVDSGFRLPPLRAYMDDITTLTTTVPCTRRLLRKLEENISWAHMKIKPSKSRSISIVKGVLSDLKFFIGDDQIPTVSEQPVKSLGRWYDASLKDKDQVQQLRKDISSSLQSIDNTQLPGKLKAWCLQFGLLPRVLWPLAVYEVPISTVEKMERGVTGYLKKWLGVPRCLTTIGLYGDGVLKLPLTSLTEEFKCSKTRLQMTLNESRDPVVSNNAPTLATGRKWRPGKAVQEATAALRHADIVGHVQQGRGGLGLTSRAAWSKATAPERRKMVVQEVRHQEEAARWAKAVSLSKQGQWTRWDSVEKRKISSKDLWAMEARRLSFSIRATYDVLPTPVNLHQWYGEDPDCALCSMPANLRHILTGCKTSLTQGRYTWRHNQVLKNLASALEDKRAATNSLPPPAASHPLRTNFVREGAKPPKRGSTPLERDQLRLARDWKMLADIGRQLVFPPEIATTTLRPDMVLWSRSLKKVFIIELTVPWEDSVDEAYERKQLRYADLAAEARHHGWNTEVRPVEVGCRGFVATSTTRLLRDLGIKGQSQHSAIKAVSEAAEGSSQWLWMKRKDPSWAPK

SEQ ID NO: 26503 - protein, 1179 aa, Lethenteron reissneri
MLRSMLETPALATESQHTRIPLESARAGAEDDSSTDNMVTTGPETTTSNESTAQENTTATVTSSAATAGHKQMQVCVCGWRKVTSHHGLRIHQGKKGCLGKERQRPRIDYFLRKRSNQSNEAQQLDANHSLQCISTTVMEDVNSSTEVTTEVEPTTGVELTQPPRPAVERRLPGHRPYVKWPGASDKKLWETVNTDLTLTLEKLRGTVEKKLERMGDIIYEYGAESFGVQEAKGGRKVPTPPVSRRQQEIKRLVQERRQLKKQWKKASEVEKEGIEALQADIKTRLASLRRAENLRKRRRKKEQTRTRFYKDPFKFLKSLFTKEKSGVLKTTKKDLEEHLRTTNFDSKRHEHLAIPSDIPPIEPPEHHIETSPPTWKEVENTVRRARTASAPGPNGVPYKVYKNAPDVLRFLWRLMGIAWKKKIIPKAWRRAGGVLIPKEKDAVNISQFRPISLLNVEGKIFFRVIAQRMAEYLQRNAYVDTSVQKAGISGFSGCLEHSSMIWHQIQMAKVEKRDLHVVFLDLANAFGSVPHELLWSAFRFFHIPDTITTLVKSYFQDLQFCFTTSEFTTSWQCLNVGIMAGCTISPLAFIMAMEVIIRSSKWVAGGQRVDSGCRLPPLRAYMDDITTLTTTVPCTRRLLRKLEENISWARMKIKPSKSRSISIVKGVLCDLKFFIGDDQIPTVSEQPVKSLGRWYDSSLKDKDQVQQLRKDISSSLQSIDNTQLPGKLKAWCLQFGLLPRVLWPLAVYEVPISTVEKMERGVTGYLKKWLGVPRCLTTIGLYGDGVLKLPLTSLTEEFKCAKTRLQMTLNESRDPVVSNNAPTLATGRKWRPGKAVQEATAALRHADIVGHVQQGRGGFGLTSRAAWSKATAPERRKMVVQEVRHQEEAARWAKAVSLAKQGQWTRWDSVEKRKISWKDLWAIEARRLSFSIRATYDVLPTPVNLHQWYGEDPDCALCSMPANLRHILTGCKTSLTQGRYTWRHNQVLKNLASALEDKRTATNSLPPPAASHPLRTTFVREGAKPPKSGSTPIERDQLRLARNWKMLADIGRQLVFPPEIATTTLRPDMVLWSRSLKKVFIIELTVPWEDSVDEAYERKHLRYADLAAEARHHGWNTEVRPVEVGCRGFVATSTTRLLRDLGIKGQSQRSAIRAVSEAAEGSSQWLWMKRKDPSWAPK

SEQ ID NO: 26504 - protein, 1041 aa, Oncorhynchus mykiss
MEDVNSSTEVTTEVEPTTGVELTEPPRPAVERRLPGHRPYVKWPGASDKKLWETVNTDLTLTLEKLRGTVEKKLERMGDIIYEYGTERFGVEEAKGGRKVPTPPVSRRQQEIKRLVQERRQLKKQWKKASEVEKEGIEALQADIKTRLASLRRAENLRKRRRKKEQTRTRFYKDPFKFLKSLFTKEKSGALKTTKKDLEEHLRTTNFDSKRHEHLAIPSDIPPIEPPEHHIETSPPTWKEVENTVRRARTASAPGPNGVPYKVYKNAPDVLRFLWRLMRTAWKNKIIPKVWRRAGGVLIPKEKDAVNISQFRPISLLNVEGKIFFRVIAQRMAEYLQRNAYVDTSVQKAGISGFSGCLEHSSMIWHQIQMAKVEKRDLHVVFLDLANAFGSVPHELLWSAFRFFHIPDTITTLVKSYFQDLQFCFTTSEFTTSWQCLNVGIMAGCTISPLAFIMAMEVIIRSSKWVAGGQRVDSGFRLPPLRAYMDDITTLTTTVPCTRRLLRKLEENISWARMKIKPSKSRSISIVKGVLSDLKFFIGDDQIPTVSEQPVKSLGRWYDASLKDKDQVQQLRKDISSSLQSIDNTQLPGKLKAWCLQFGLLPRVLWPLAVYEVPISTVEKMERGVTGYLKKWLGVPRCLTTIGLYGDGVLKLPLTSLTEEFKCSKTRLQMTLNESRDPVVSNNAPTLATGRKWRPGKAVQEATAALRHADIVGHVQQGRGGLGLTSRAAWSKATAPERRKMVVQEVRHQEEAARWAKAVSLSKQGQWTRWDSVEKRKISWKDLWAMEARRLSFSIRATYDVLPTPVNLHQWYGEDPDCALCSMPANLRHILTGCKTSLTQGRYTWRHNQVLKNLASALEDKRAATNSLPPPSASQPLRTNFVREGAKPPKRGSTPLERDQLRLARDWKMLADIGRQLVFPPEIATTTLRPDMVLWSRSLKKVFIIELTVPWEDSVDEAYERKHLRYADLAAEARHHGWNTEVRPVEVGCRGFVATSTTRLLRDLGIKGQSQRSAIKAVSEAAEGSSQWLWMKRKDPSWAPK

SEQ ID NO: 26505 - protein, 764 aa, Lethenteron camtschaticum
MRTAWQNKIMPKVWRRAGGVLIPKEKDAVNISQFRPISLLNVEGKIFFRIIAQRMAEYLQRNAYVDTSVQKAGISGFSGCLEHSSMIWHQIQMAKVEKRDLHVVFLDLANAFGSVPHELLWSAFRFFHIPDTITTLVKSYFQDLQFCFTTSEFTTSWQCLNVGIMAGCTISPLAFIMAMEVIIRSSKWVAGGQRVDSGFRLPPLRAYMDDITTLTTTVPCTRRLLRKLEENISWARMKIKPSKSRSISIVKGVLCDLKFFIGDDQIPTVSEQPVKSLGRWYDASLKDKDQVQQLRKDISSSLQSIDNTQLPGKLKAWCLQFGLLPRVLWPLAVYEVPISTVEKMERGATSYLKKWLGVPRCLTTIGLYGDGVLKLPLTSLTEEFKCAKTRLQMTLNESRDPVVSNNAPTLATGRKWRPGKAVQKATAALRHADIVGHVQQGRGGLGLTSRAAWSKATAPERRKMVVQEVRHQEEAARWAKAVSLAKQGQWTRWDIVEKRKISWKDLWATEARRLSFSIRATYDILPTPVNLHQWYGEDPDCALCSMPANLRHILTGCKTSLTQGRYTWRHNQVLKNLASALEDKRAATNSLPPPAAPHPLRTTFVREGAKPPKSGSTPIERDQLRLARDWKMLADIGRQLVFPPEIATTTLRPDVVLWSRSLKKVFIIELTVPWEDSVDEAYERKHLRYADLAAEARHHGWNTEVRPVEVGCRGFVATSTTRLLRDLGIKGQSQRSAIKAVSEAAEGSSQWLWMKRKDPSWAPK

SEQ ID NO: 26506 - protein, 1105 aa, Oncorhynchus tshawytscha
MQVCVCGWRKVTSHHGLRIHQGKKGCLGKERQRTRIDYFLRKRSNQSNEAQQLDVNHSLQCISTTVMEDVNSSTEVTTEVEPTTGVELTQPPRPVVKRRLPGHRPYVKWPGASDKKLWETVNTDLTLTLEKLQGTVEKKLERMGDIIYEYGTERFGVEEAKGGRKVPTPPVSRRQQEIKCLVQERRQLKKQWKKASEVEKEGIEALQADIKTRLASLRRAENLRKRRRKKEQTRTRFYKDPFKFLKSLFTKEKSGALKTTKKDLEEHLRTTNFDSKRHEHLAIPSDIPPIEPPEHHIETSPPTWKEVENTVRRARTASAPGPNGVPYKVYKNAPDVLRFLWRLMRTAWQKKIIPKVWRRAGGVLIPKEKDAVNISQFRPISLPNIEGKIFFRVIAQRMAEYLQRNAYVDTSVQKAGISGFSGCLEHSSMIWHQIQMAKVEKRDLHVVFLNLANAFGSVPHELLWSAFRFFHIPDTITNLVKSYFQDLQFCFTTSEFTTSWQCLNVGIMAGCTISPLAFTMAMEVIIRSSKWVAGGQRVDSGFRLPPLRAYMDDITTLTTTVPCTRRLLRKLEENISWARMKIKPSKSRSISIVKGVLSDLKFFIGDDQIPTVSEQPVKSLGRWYDASLKDKDQVQPLCKDISSSLQSIDNTQLPGKLKAWCLQFGLLPRVLWPLALYEVPISTVEKMERGVTGYLKKWLGVPRCLTTIGLYGDGVLKLPLTSLTEEFKCAKTRLQMTLNESRDPVVSNNAPTLATGRKWRPGKAVQDATAALRHADIVGHVQQGRGGLGLTSRAAWSKATAPERRKMVVQEVRHQEEAARWAKAVSLAKQGQWTRWDSVEKRKISWKDLWAMEARRLSFSIRATYDVLPTPVNLHQWYGEDPDCALCSMPANLRHILTGCKTSLTQGRYTWRHNQVLKNLASALEDKRAATNSLPPTAASHSLRTNFVREGAKPPKSGSTPLERDQLCLARDWKMLADIGRQLVFPPEIATTTLRPDMVLWSRSLNKVFIIELTVPWEDSVDEAYERKHLRYADLAAEAWHHGWNTEVRPVEVGCRGFVATSTTRLLRDLGIKGQSSAIKAVSEAAEGSSQWLWMKRKDPSWAPK

SEQ ID NO: 26507 - protein, 1179 aa, Lethenteron reissneri
MLRSMLETPALATESQHTRIPLESARAGAEDDSSTDNMVTTGPETTTSNESTAQENTTATVTSSAATAGHKQMQVCVCGWRKVTSHHGLRIHQGKKGCLGKERQRPRIDYFLRKRSNQSNEAQQLDANHSLQCISTTVMEDVNSSTEVTTEVEPTTGVELTQPPRPAVERRLPGHRPYVKWPGASDKKLWETVNTDLTLTLEKLRGTVEKKLERMGDIIYEYGAESFGVQEAKGGRKVPTPPVSRRQQEIKRLVQERRQLKKQWKKASEVEKEGIEALQADIKTRLASLRRAENLRKRRRKKEQTRTRFYKDSFKFLKSLFTKEKSGVLKTTKKDLEEHLRTTNLDSKRHEHLAIPSDIPPIEPPEHHIETSPPTWKEVENTVRRARTASAPGPNGVPYKVYKNAPDVLRFLWRLMGIAWKKKIIPKAWRRAGGVLIPKEKDAVNISQFRPISLLNVEGKIFFRVIAQRMAEYLQRNAYVDTSVQKAGISGFSGCLEHSSMIWHQIQMAKVEKRDLHVVFLDLANAFGSVPHELLWSAFRFFHIPDTITTLVKSYFQDLQFCFTTSEFTTSWQCLNVGIMAGCTISPLAFIMAMEVIIRSSKWVAGGQRVDSGCRLPPLRAYMDDITTLTTTVPCTRRLLRKLEENISWARMKIKPSKSRSISIVKGVLCDLKFFIGDDQIPTVSEQPVKSLGRWYDSSLKDKDQVQQLRKDISSSLQSIDNTQLPGKLKAWCLQFGLLPRVLWPLAVYEVPISTVEKMERGVTGYLKKWLGVPRCLTTIGLYGDGVLKLPLTSLTEEFKCAKTRLQMTLNESRDPVVSNNAPTLATGRKWRPGKAVQEATAALRHADIVGHVQQGRGGFGLTSRAAWSKATAPERRKMVVQEVRHQEEAARWAKAVSLAKQGQWTRWDSVEKRKISWKDLWAMEARRLSFSIRATYDVLPTPVNLHQWYGEDPDCALCSMPANLRHILTGCKTSLTQGRYTWRHNQVLKNLASALEDKRTATNSLPPPAASHPLRTTFVREGAKPPKSGSTPIERDQLRLARDWKMLADIGRQLVFPPEIATTTLRPDMVLWSRSLKKVFIIELTVPWEDSVDEAYERKHLRYADLAAEARHHGWNTEVRPVEVGCRGFVATSTTRLLRDLGIKGQSQRSAIRAVSEAAEGSSQWLWMKRKDPSWAPK

SEQ ID NO: 26508 - protein, 1179 aa, Oncorhynchus gorbuscha
MLRSMLETPALATESQNTRIPRESARAGAEDDSLADNMVTTGLETTTSNESTAQENTTATVTSSAATVGHKQMQVCVCGWRKVISHHGLRIHQGKKGCLGKERQRTRIDYFLRKRSNQSNEAQQLDANHSLQCISTTVMEDVNSSTEVATEVEPTTGVELTQPPRPAVERRLPGHRPYVKWPGASDKKLWETVNTDLTLTLEKLRGTVEKKLERMGDIIYEYGTERFGVEEAKGGRKVPTPPVSRRQQEIKRLVQERRQLKKQWKKASEVEKEGIEALQADIKTRLASLRRAENLRKRRRKKEQTRTRFYKDPFKFLKSLFTKEKSGALKTTKKDLEEHLRITNVDSKRHEHLAIPSDIPPIEPPEHHIETSPPTWKEVEDTVRRARTASGPGPNGVPYKVYKNTPDVLRFLWRLMRTAWQKKIIPKVWRRAGGVLIPKEKDAVNISQFRPISLLNVEGKIFFRVSARRMAEYLQRNTYVDASVQKVGISGFSGCLEHSSMIWHQIQMAKVEKRDLHVVFLDLANAFGSVPHELLWSAFRFFHIPDTITNLVKSYFQDLQFCFTTSEFTTSWQCLNVGIMAGCTISPLAFTMAMEVIIRSSKWVAGGQRVDSGFRLPPLRAYMDDITTLTTTVPCTRRLLRKLEENISWARMKIKPSKSRSISIVKGVLSDLKFFIGDDQIPTVSEQPVKSLGRWYDASLKDKDQVQQLRKDISSSLQSIDNTQLPGKLKAWCLQFGLLPRVLWPLALYEVPISTVEKMERGVTGYLKKWLGVPRCLTTIGLYGDGVLKLPLTSLTEEFKCAKTRLQMTLNESRDPVVSNNAPTLATGRKWRPGKAVQEATAALRHADIVGHVQQGRGGLGLTSRAAWSKATAPERRKMVVQEVRHQEEAARWAKAVSLAKQGQWTRWDSVEKRKISWKDLWAMEARRLSFSIRATYDVLPTPVNLHQWYGEDPDCALCSMPANLRHILTGCKTSLAQGRYTWRHNQVLKNLASALEDKRAATNSLPPTAASHSLRTNFVREGAKPRKSGSTPLERDQLRLARDWKMLADIGRQIVFPPEIATTTLRPDMVLWSRSLNKVFIIELTVPWENSVDEAYERKHLRYADLAAEARHHGWNTEVRPVEVGCRGFVATSTTRLLRDLGIKGQSQRSAIKAVSEAAEGSSQWLWMKRKDPSWAPK

SEQ ID NO: 26509 - protein, 1166 aa, Oncorhynchus kisutch
MLRSMLETPALATESQHTRIPLESVRAGAEDDSSADYMVKTEPETTTSNESTAQENTTSTVTSSAATVGHKQMQVCVCGWRKVTSHHGLRIHQGKKGCLGKERQRPRIDYFLRKRSNQSNEAQQLDANHSLQCISTTVMEDVNSSTEVATEVEPTTGVELTQPPRPAVGRRLPGHRPYVKWPGASDKKLWETVNTDLTLTLEKLRGTVEKKLERMGDIIYEYGTERFGVEEAKGRRKVPTPPVSRRQQEIKRLVQERRQLKKQWKKASEVEKEDIEALQADIKTRLASLRRAENLRKRRRKKEQTRTRFYKDPFKFLKSLFTKEKSGAPKTTKKDLEEHLKTTNFDSKRHEHLAIPSDIPPIEPPEHHIETSPPTWKEVENTVRRARTASAPGPNGVPYKVCKNAPDVLRFLWRLMRTAWQKKIIPKVWRRAGGVLIPKEKDAVNISQFRPISLLNVEGKIFFRVIAQRMAEYLQRNAYVDTSVQKAGISGFSGCLEHSSMIWHQIQMAKVEKRDLHVVFLDLANAFGSVPHELLWSAFRFFHIPDTITNLVKLYFQDLQFCFTTSEFTISWQCLNVGIMAGCTISPLAFTMAMEVIIRSSKWFAGGQRVDSGFRLPPLRAYMDDITTLTTTVPCTRRLLRKLEENISWARMKIKPSKSRSISIVKGVLSDLKFFIGDDQIPTVSEQPVKSLGRWYDASLKDKDQVQQLRKDISSSLQSIDNTQLPGKLKAWCLQFGLLPRVLWPLALYEVPISTVEKMERGVTGYLKKWLGVPRCLTTIGLDGDGVLKLPLTSLTEEFKCAKTRLQMTLNESRDPVVSNNTPTLATGRKWRPGKAVQEATAALRHADIVGHVQQGRGGLGLTSRAAWSKATAPERRKMVVQEVRHQEKAARGAKAVSLAKQGQWTRWDSVEKRKISWKDLWAMEARRLSLSIRATYDVLPTPVNLHQWYGEDPDCALCSMPANLRHILTGCKTSLTQGRYTWRHNQVLKNLASALEDKRAATNSLPPTAASHSLRTNFVREGAKPPKSGSTPLERDQLRLARDWKMLADIGRQLVFPPEIGTTTLRPDMVLWSRSLNKVFIIELTVPWEDSVDEANEQKHLRYADLAAEARHHGWNTEVRPGAAEVLWQHLQPDCLETWELKARASVRQSKLYRRWQKAAVSGSG

SEQ ID NO: 26510 - protein, 1179 aa, Oncorhynchus gorbuscha
MLCSMFETPALATESQNTRIPLESARAGAEDDSSADNMVTTGLETTTSNESTAQENTTATVTSSAATVGHKQMQVCVCGWRKVTSHHGLRIHQGKKGCLGKERQRTRIDYFLRKRSNQSNEAQQLDANHSLQCISTTVMEDVNSSTEVATEVEPTTGVELTQPPRPAVERRLPGHRPYVKWPGASDKKLWETVNTDLTLTLENLRGTVEKKLERMGDIIYEYGTERFGVEEAKGGRKVPTPPVSRRQQEIKRLVQERRQLKKQWKKASEVEKEGIEALQADIKTRLASLRRAENLRKRRRKKEQTRTRFYKDPFKFLKSLFTKEKSGALKTTKKDLEEHLRITNVDSKRHEHLAIPSDIPPIEPPEHHIETSPPTWKEVEDTVRRARTASGPGPNGVPYKVYKNTPDVLRFLWRLMRTAWQKKIIPKVWRRAGGVLIPKEKDAVNISQFRPISLLNVEGKIFFRVIAQRMAEYLQRNTYVDASVQKAGISGFSGCLEHSSMIWHQIQMAKVEKRDLHVVFLDLANAFGSVPHELLWSAFRFFHIPDTITNLVKSYFQDLQFCFTTSEFTTSWQCLNVGIMAGCTISPLAFTMAMEVIIRSSKWVAGGQRVDSGFRLPPLRAYMDDITTLTTTVPCTRRLLRKLEENISWARMKIKPSKSRSISIVKGVLSDLKFFIGDDQIPTVSEQPVKSLGRWYDASLKDKDQVQQLRKDISSSLQSIDNTQLPGKLKAWCLQFGLLPRVLWPLALYEVPISTVEKMERGVTGYLKKWLGVPRCLTTIGLYGDGVLKLPLTSLTEEFKCAKTRLQMTLNESRDPVVSNNAPTLATGRKWRPGKAVQEATAALRHADIVGHVQQGRGGLGLTSRAAWSKATAPERRKMVVQEVRHQEEAARWAKAVSLAKQGQWTRWDSVEKRKISWKDLWAMEARRLSFSIRATYDVLPTPVNLHQWYGEDPDCALCSMPANLRHILTGCKTSLAQGRYTWRHNQVLKNLASALEDKRAATNSLPPTAASHSLRTNFVREGAKPPKSGSTPLERDQLRLARDWKMLADIGRQLVFPPEIATTTLRPDMVLWSRSLNKVFIIELTVPWENSVDEAYERKHLRYADLAAEARHHGWNTEVRPVEVGCRGFVATSTTRLLRDLGIKGQSQRSAIKAVSEAAEGSSQWLWMKRKDPSWAPK

SEQ ID NO: 26511 - protein, 1142 aa, Salvelinus namaycush
MVTTGPETTTSNESTAQENTTATVTSSAATAGHKQMQVCVCGWRKVTSHHGLRIHQGKKGCLGKERQRPRIDHFLRKRSNQSNEAQQLDANHSLQCISTTVMEDVNSSTEVTPEVEPTTGVELTQPPRPAVERRLPGHRPYVKWPGASDKKLWEAVNTDLTLTLEKLRGTVEKKLERMGDIIYEYGAESFGVQEAKGGRKVPTPPVSRRQQEIKRLVQERRQLKKQWKKASEVEKEGIEALQADIKTRLASLRRAENLRKRRRKKEQTRTRFYKDPFKFLKSLFTKEKSGALKTTKKDLEEHLITTNFDSKRHEHLAIPSDIPPIEPPEHHIETSPPTWKEVENTVRRARTASAPGPNGVPYKVYKNAPDVLRVLWRLMRTAWQKKIIPKVWRRAGGVLIPKEKDAVNISQFRPISLLNVEGKIFFRVIAQRMSEYLQRNAYVDTSVQKAGISGFSGCLEHSSMIWHQIQMAKVEKRDLHVVFLDLANAFGSVPHELLWSAFRFFHIPDTITTLVKSYFQDLQFCFTTSEFTTSWQCLNVGIMAGCTISPLAFIMAMEVIIRSSKWVAGGQRVDSGFRLPPLRAYMDDITTLTTTVPCTRRLLRKLEENISWARMKIKPSKSRSISIVKGVLSDLKFFIGDDQIPTVSEQPVKSLGRWYDASLKDKDQVQQLRKDISSSLQSIDNTQLPGKLKAWCLQFGLLPRVLWPLAVYEVPISTVEKMERGVTGYLKKWLGVPRCLTTIGLYGDGVLKLPLTSLTEEFKCAKTRLQMTLNESRDPVVSNNAPTLATGRKWRPGKAVQEATAALRHADIVGHVQQGRGGLGLTSRAAWSKATAPERRKMVVQEVRHQEEAARWAKAVSLAKQGQWTRWDSVEKRKISWKDLWAMEARRLSFSIRATYDVLPTPVNLHQWYGEDPDCALCSMPANLRHILTGCKTSLTQGRYTWRHNQVLKNLASALEDKRAATNSLPPPAASHPLRTTFVREGAKPPKSGSTPLERDQLRLARDWKMLADIGRQLVFPPEIATTTLRPDIVLWSRSLKKVFIIELTVPWEDSVDEAYERKHLRYADLAAEARHHGWNTEVRPVEVGCRGFVATSTTRLLRDLGIKGQSQRSAIKAVSEVAEGSSQWLWMKRKDPSWAPK

SEQ ID NO: 26512 - protein, 969 aa, Oncorhynchus tshawytscha
MEDVNSSTEVATEVEPTTGVELTQPPRPAVERRLPGHRPYVKWPGASDKKLWETVNTDLTLTLEKLRGTVEKKLERMGDIIYEYGTERFGVEEAKGGRKVPTPPVSRRQQEIKRLVQERRQLKKQWKKASEVEKEGIEALQADIKTRLASLRRAENLRKRRRKKEQTRTRFYKDPFKFLKSLFTKEKNGALKTTKKDLEEHLRTTNFDSKRHEHLAIPSDIPPIEPPRHHIETSPPTWKEVENTVRRPRTASAPGPNGVPYKVYKNAPDVLRFLWRLMRTAWQKKIIPKVWRRAGGVLIPKENDAVNISQFRPISLLNVEGKIFFRVIAQRMAEYLQRNAYVDTSVQKAGISGFSGCLEHSSMIWHQIQMAKVEKRDLHVVFLDLANAFGSVPHELLWSAFRFFHIPDTITNLVKSYFQDLQFCFTTSEFTTSWRLCLNVGIMVGCTISPLAFTMAMEVIIRSSKWVAGGQRVDSGFRLPPLKAYMDDITTLTTTVPCTRRLLRKLEENISWARMKIKPSKSHSISIVKGVLSDLKFFIGDDQIPTVSEQPVKSLGRWYDASLKDKDQVQQLRKDISSSLQSIDYTQLPGKLKAWCLQFGLLPRVLWPLALYEVPISTVEKMERGVTGYLKKWLGVPRCLTTIGLYGDGVLKLPLTSLTEEFKCAKTRLQMTLNESRDPVVSNNAPTLATGRKWRPGKAVQEATAALRHADIVGHVQQGRGGLGLTSHAAWSKATAPERRKMVVQEVRHQEEAARWAKEVSLAKQGQWTRWDSVEKRKISWKDLWAMEARRLSFSIRATYDVLPTPVNLHQWYGEDPDCALCSMPANLRHILTGCKTSLTQGRYTWRHNQVLKNLASALEDKRAATNSLPPTAASDSLRTNFVREGAKPPKSGSTPLERDQLRLARDWKMLADIGRQLVFPPEIATTTLRPDMVLWSRSLNKVFIIELTVPWEDSVDEAYERKHCAMLI

SEQ ID NO: 26513 - protein, 1179 aa, Oncorhynchus kisutch
MRRSMLETPALATESQHTRIPLESARVGAEDDSSADNMVTTGPETTTSNESTAQENTTATVTSSAATAGHKQMQVCVCGWRKVTSHHGLRIHQGKKGCLGKERQRPRIDYFLRKRSNQSNEAQQLDANHSLQCISTTVMEDVNSSTEVTTEVEPTTVVELTEPPRPAVERRLPGHRPYVKWPGASDKKLWETVNTDLTLTLETLRGTVEKKLERMGDIIYEYGTERFGVEEAKGGRKVPTPPVSRRQQEIKRLVQERRQLKKQWKKASEVEKEGIEALQADIKTRLASLRRAENLRKRRRKKEQTRTRFYKDPFKFLKSLFTKEKSGALKTTKKDLEEHLRTTNFDSKRHEHLAIPSDIPPIEPPEHHIETSPPTWKEVENTVRRARTASAPGPNGVPYKVYKNAPDVLRFLWRLMRTAWKNKIIPKVWRRAGGVLIPKEKDAVNISQFRPISLLNVEGKIFFRVIAQRMAEYLQRNAYVDTSVQKAGISGFSGCLEHSSMIWHQIQMAKVEKRDLHVVFLDLANAFGSVPHELLWSAFRFFDIPDTITTLVKSYFQDLQFCFTTSEFTTSWQCLNVGIMAGCTISPLAFIMAMEVIIRSSKWVAGGQRVDSGFRLPPLRAYMDDITTLTTTVPCSRRLLRKLEENISWARMKIKPSKSRSISIVKGVLSDLKFFIGDDQIPTVSEQPVKSLGRWYDASLKDKDQVQQLRKDISSSLQSIDNTQLPGKLKAWCLQFGLLPRVLWPLAVYEVPISTVEKMERGVTGYLKKWLGVPRCLTTIGLYGDGVLKLPLTSLTEEFKCSKTRLQMTLNESRDPVVSNNAPTLATGRKWRPGKAVQEATAALRHADIVGHVQQGRGGLGLTSRAAWSKATAPERRKMVVQEVRHQEEAARWAKAVSLSKQGQWTRWDSVEKRKISWKDLWAMEARRLSFSIRATYDVLPTPVNLHQWYGEDPDCALCSMPANLRHILTGCKTSLTQGCYTWRHNQVLKNLASALEDKRAATNSLPPPAASHPLRTNFVREGAKPPKRGSTPLERDQLRLARDWKMLADIGRQLVFPPEIATTTLRPDMVLWSRSLKKVFIIELTVPWEDSVDEAYERKHLRYADLAAEARHHGWNTEVRPVEVGCRGFVATSTTRLLRDLGIKGQSQRSAIKAVSEAAEGSSQWLWMKRKDPSWAPK

SEQ ID NO: 26514 - protein, 1041 aa, Lethenteron reissneri
MEDVNSSTEVTTEVEPTTGVELTQPPRPAVERRLPGHRPYVKWPGASDKKLWETVNTDLTLTLEKLRGTVEKKLERMGDIIYEYGAESFGVQEAKGGRKVPTPPVSRRQQEIKRLVQERRQLKKQWKKASEVEKEGIEALQADIKTRLASLRRAENLRKRRRKKEQTRTRFYKDPFKFLKSLFTKEKSGVLKTTKKDLEEHLRTTNFDSKRHEHLAIPSDIPPIEPPEHHIETSPPTWKEVENTVRRARTASAPGPNGVPYKVYKNAPDVLRFLWRLMGIAWKKKIIPKVWRRAGGVLIPKEKDAVNISQFRPISLLNVEGKIFFRVIAQRMAEYLQRNAYVDTSVQKAGISGFSGCLEHSSMIWHQIQMAKVEKRDLHVVFLDLANAFGSVPHELLWSAFRFFHIPDTITTLVKSYFQDLQFCFTTSEFTTSWQCLNVGIMAGCTISPLAFIMAMEVIIRSSKWVAGGQRVDSGCRLPPLRAYMDDITTLTTTVPCTRRLLRKLEENISWARMKIKPSKSRSISIVKGVLCDLKFFIGDDQIPTVSEQPVKSLGRLYDSSLKDKDQVQQLRKDISSSLQSIDNTQLPGKLKAWCLQFGLLPRVLWPLAVYEVPISTVEKMERGVTGYLKKWLGVPRCLTTIGLYGDGVLKLPLTSLTEEFKCAKTRLQMTLNESRDPVVSNNAPTLATGRKWRPGKAVQEATAALRHADIVGHVQQGRGGFGLTSRAAWSKANAPERRKMVVQEVRHQEEAARWAKAVSLAKQGQWTRWDSVEKRKISWKDLWAMEARRLSFSIRATYDVLPTPVNLHQWYGEDPDCALCSMPANLRHILTGCKTSLTQGRYTWRHNQVLKNLASALEDKRTATNSLPPPAASHPLRTTFVREGAKPPKSGSTPIERDQLRLARDWKMLADIGRQLVFPPEIATTTLRPDMVLWSRSLKKVFIIELTVPWEDSVDEAYERKHLRYADLAAEARHHGWNTEVRPVEVGCRGFVATSTTRLLRDLGIKGQSQRSAIRAVSEAAEGSSQWLWMKRKDPSWAPK

SEQ ID NO: 26515 - protein, 764 aa, Salvelinus namaycush
MRTAWQKKIIPKVWRRAGGVLIPKEKDAVNISQFRPISLLNVEGKIFFRVIAQRMSEYLQRNAYVDTSVQKAGISGFSGCLEHSSMIWHQIQMAKVEKRDLHVVFLDLANAFGSVPHELLWSAFRFFHIPDTITTLVKSYFQDLQFCFTTSEFTTSWQCLNVGIMAGCTISPLAFIMAMEVIIRSSKWVAGGQRVDSGFRLPPLRAYMDDITTLTTTVPCTRRLLRKLEENISWARMKIKPSKSRSISIVKGVLSDLKFFIGDDQIPTVSEQPVKSLGRWYDASLKDKDQVQQLRKDISSSLQSIDNTQLPGKLKAWCLQFGLLPRVLWPLAVYEVPISTVEKMERGVTGYLKKWLGVPRCLTTIGLYGDGVLKLPLTSLTEEFKCAKTRLQMTLNESRDPVVSNNAPTLATGRKWRPGKAVQEATAALRHADIVGHVQQGRGGLGLTSRAAWSKATAPERRKMVVQEVRHQEEAARWAKAVSLAKQGQWTRWDSVEKRKISWKDLWAMEARRLSFSIRATYDVLPTPVNLHQWYGEDPDCALCSMPANLRHILTGCKTSLTQGRYTWRHNQVLKNLASALEDKRAATNSLPPPAASHPLRTTFVREGAKPPKSGSTPLERDQLRLARDWKMLADIGRQLVFPPEIATTTLRPDIVLWSRSLKKVFIIELTVPWEDSVDEAYERKHLRYADLAAEARHHGWNTEVRPVEVGCRGFVATSTTRLLRDLGIKGQSQRSAIKAVSEVAEGSSQWLWMKRKDPSWAPK

SEQ ID NO: 26516 - protein, 965 aa, Oncorhynchus kisutch
MGDIIYDYGTERFGVEEAKGGRKDPTPPVSRRQQEIKRLVQERRLLKKQWKKASEVEKEGIEALQADIKTRLASLRRAENLQKRRRKKEQTRTRFYKDPFKFLKSLFTKEKSGALKTTKKDLEEHLRTTNFDSKQHVLLAILSDISSFEPQVHHIETSPPTWKEVENTVREARTASAPGPNGVPYKVYKNAPDVLRFLWRLMRTAWQKNIIPKVWRRAGGVLIPKEKDAVNISQFRPISLLNVEGKIFFRVIAQRMAEYLQRNAYVDTSVQKAGISGFSGCLEHSSMIWHQIQMAKVEKRDLHVVFLDLANAFGSVPHELLWSAFRFFHIPDTITNLVKSYFQDLQFCFTTSEFTTSWQCLNVGIIAGCIISPLAFTMAMEVIIRSSKCVAGGQRVDSGFRLPPLRAYMDDITTLTTTVPCTRRLLRKLEENISWARMKIKPSKSRSISIVKGVLSDLKFFIGDDQIPTVSEQPVKSLGRWYDASLKDKDQVQQLCKDISSSLQSIDNTQLPGKLKAWCLQFGLLPRVLWPLAVYEVPISTVEKMERGVTGYLKKWLGVPRCLTTIGLYGDGVLKLPLTSLTEEFKCAKTRLQMTLNESRDPVVSNNAPTLATGRKWRPGKAVQEATAALRHADIVGHVQQGRGGLGLTSRAAWSKATAPERRKMVVQEVRHQEEAARWAKALSLAKQGEWTRWDSVEKRKISWKDLWAMEARRLSFSIRATYDVLPTPVNLHQWYGEDPDCALCSMPANLRHILTGCKTSLTQGRYTRRHNQVLKNLASALEDKRAATNSLPPTAASHSLRTNFVREGAKPPKSGSTPLERDQLCLARDWKMLADIGRQLVFPPEIATTTLRPDIVLWSRSLNKVFIIELTVPWEDAVDEAYERKHLRYADRAAEARHHGWNTEVRPVEVGCRGFVATSTTRLLRDLGIKGQSQRSAIKAVSEAAEGSSQWLWMKRKDPSWAPK

SEQ ID NO: 26517 - protein, 1179 aa, Lethenteron reissneri
MLRSMLETPDLATKSQHTRIPLESARAGAENDSSTDNMVTTGPETTTSNESTAQENTTATVTSSAATAGHKQMQVCVCGWRKVTSHHGFRIHQGKKGCLGKERQRPRIDYFLRKRSNQSNEAQQLDANHSLQCISTTVMEDVNSSTEVTTEVEPTTGVELTQPPRPAIERRLPGHRPYVKWPGASDKKLWETVNTDLTLTLEKLRGTVEKKLERMGDIIYEYGAESFGVQEAKGGRKVPTPPVSRRQQEIKRLVQERRQLKKQWKKASEVEKEGIEALQADIETRLASLHRAENLRKRRRKKEQTRTRFYKDPFKFLKSLFTKEKSGVLKTTKKDLEEHLRTTNFDSKRHEHLAIPSDIPPIEPPEHHIETSPPTWKEVENTVRRARTASAPGPNGVPYKVYKNAPDVLRFLWRLMRTAWQKKIIPKVWRRAGGVLIPKEKDAVNISQFRPISLLNVEGKIFFRIIAQRMAEYLQRNAYIDTSVQKAGISGFTGCLEHSSMIWHQIQMAKVEKRDLHVVFLDLANAFGSVPHELLWSAFRFFHIPDTITTLVKSYFQDLQFCFTTSEFTTSWQCLNVGIMAGCTISPLAFIMAMEVIIRSSKWVAGGQRVDSGFRLPPLRAYMDDITTLTTTVPCTRRLLRKREENISWARMKIKPSKSRSISIVKGVLCDLKFFIGDDQIPTVSEQLVKSLGRWYDASLKDKDQVQQLRKDISSSLQSIDNTQLPGKLKAWCLQFGLLPRVLWPLAVYEVPISTVEKIERGATSYLNKWLGVPRCLTTIGLYGDGVLKLPLTSLTEEFKCAKTRLQMTLNESRDPVVSNNAPTLATGRKWRPGKAVQEATAALRHADIVGHVQQGRGGLGLTSRAAWSKATAPERRKMVVQEVRHQEEAARWAKAVSLAKQGQWTRWDSVEKRKISWKDLWATKARRLSFSIRATYDILPTPVNLHQWYGEDPDCALCSMPANLRHILTGCKTSLTQGRYTWRHNQVLKNLASALEDKRAATNSLPPPAASHPLRTTFVREGAKPPKSGSTPIERDQLRLARDWKMLADIGRQLVFPPEIATTTLRPDVVLWSRSLKKVFIIELTVPWEDSVDEAYERKHLRYADLAAEARHHGWNTEVRPVEVGCRGFVATSTTRLLRDLGIKGQSQRSAIKAVSEAAEGSSQWLWMKRKPPSWAPK

SEQ ID NO: 26518 - protein, 1142 aa, Oncorhynchus gorbuscha
MVTTGLETTTSNESTAQENTTATVTSSAATVGHKQMQVCVCGWRKVTSHHGLRIHQGKKGCLGKERQRTRIDYFLRKRSNQSNEAQQLDANHSLQCISTTVMEDVNSSTEVATEVEPTTGVELTQPPRPAVERRLPGHRPYVKWPGASDKKLWETVNTDLTLTLEKLRGTVEKKLERMGDIIYEYGTERFGVEEAKGGRKVPTPPVSRRQQEIKRLVQERRQLKKQWKKASEVEKEGIEALQADIKTRLASLRRAENLRKRRRKKEQTRTRFYKDPFKFLKSLFTKEKSGALKTTKKDLEEHLRITNVDSKRHEHLAIPSDIPPIEPPEHHIETSPPTWKEVEDTVRRARTASGPGPNGVPYKVYKNTPDVLRFLWRLMRTAWQKKIIPKVWRRAGGVLIPKEKDAVNISQFRPISLLNVEGKIFFRVIAQRMAEYLQRNTYVDASVQKAGISGFSGCLEHSSMIWHQIQMAKVEKRDLHVVFLDLANAFGSVPHELLWSAFRFFHIPDTITNLVKSYFQDLQFCFTTSEFTTSWQCLNVGIMAGCTISPLAFTMAMEVIIRSSKWVAGGQRVDSGFRLPPLRAYMDDITTLTTTVPCTRRLLRKLEENISWARMKIKPSKSRSISIVKGVLSDLKFFIGDDQIPTVSEQPVKSLGRWYDASLKDKDQVQQLRKDISSSLQSIDNTQLPGKLKAWCLQFGLLPRVLWPLALYEVPISTVEKMERGVTGYLKKWLGVPRCLTTIGLYGDGVLKLPLTSLTEEFKCAKTRLQMTLNESRDPVVSNNAPTLATGSKWRPGKAVQEATAALRHADIVGHVQQGRGGLGLTSRAAWSKATAPERRKMVVQEVRHQEEAARWAKAVSLAKQGQWTRWDSVEKRKISWKDLWAMEARRLSFSIRATYDVLPTPVNLHQWYVEDPDCALCSMPANLRHILTGCKTSLAQGRYTWRHNQVLKNLASALEDKRAATNSLPPTAASHSLRTNFVREGAKPPKSGSTPLERDQLRLARDWKMLADIGWQLVFPPEIATTTLRPDMVLWSRSLNKVFIIELTVPWENSVDEAYERKHLRYADLAAEARHHGWNTEVRPLEVGCRGFVATSTTRLLRDLGIKGQSQRSAIKAVSEAAEGSSQWLWMKRKDPSWAPK

SEQ ID NO: 26519 - protein, 1032 aa, Callorhinchus milii
MEDVNSSTEVTTEVEPTTGVELTQPPRPAVERRLPGHRPYVKWPGASDKKLWETVKLRGTVEKKLERMGDIIYEYGAESFGVQEAKGGRKVPTPPVSRRQQEIKRLVQERRQLKKQWKKASEVEKEGIEALQADIKTRLASLRRAENLRKRRRKKEQTRTRFYKDPFKFLKSLFTKEKSGVLKTTKKDLEEHLRTTNFDSKRHEHLAIPSDIPPIEPPEHHIETSPPTWKEVENTVRRARTASAPGPNGVPYKVYKNAPDVLRFLWRLMRTAWQKKIIPKVWRRAGGVLIPKEKDAVNISQFRPISLLNVEGKIFFRVIAQRMAEYLQRNAYVDTSVQKAGISGFSGCLEHSSMIWHQIQMAKVEKRDLHVVFLDLANAFGSVPHELLWSAFRFFHIPDTITTLVKSYFQDLQFCFTTSEFTTSWQCLNVGIMAGCTISPLAFIMAMEVIIRSSKWVAGGQRVDSGFRLPPLRAYMDDITTLTTTVPCTRRLLRKLEENISWARMKIKPSKSRSISIVKGVLCDLKFFIGDDQIPTVSEQPVKSLGRWYDASLKDKDQVQQLRKDISSSLQSIDNTQLPGKLKAWCLQFGLLPRVLWPLAVYEVPISTVEKMERGVTSYLKKWLGVPRCLTTIGLYGDGVLKLPLTSLTEEFKCAKTRLQMTLNESRDPVVSNNAPTLATGRKWRPGKAVQEATAALRHADIVGHVQQGRGGLGLTSRAAWSKATAPERRKMVVQEVRHQEEAARWAKAVSLAKQGQWTRWDSVEKRKISWKDLWAMEARRLSFSIRATYDVLPTPVNLHQWYGEDPDCALCSMPANLRHILTGCKTSLTQGRYTWRHNQVLKNLASALEDKRAATNSLPPPAASHPLRTTFVREGAKPPKSGSTPIERDQLRLARDWKMLADIGRQLVFPPEIATTTLRPDMVLWSRSLKKVFIIELTVPWEDSVDEAYERKHLRYADLAAEARHHGWNTEVRPVEVGCRGFVATSTTRLLRDLGIKGQSQRSAIRAVSEAAEGSSQWLWMKRKDPSWAPK

SEQ ID NO: 26520 - protein, 764 aa, Lethenteron reissneri
MRTAWQKKIIPKVWRRAGGVLIPKEKDAVNISQFCPISLLNVEGKIFFRIIAQRMAEYLQRNAYVDTSVQKAGISGFSGCLEHSSMIWHQIQMAKVEKRDLHVVFLDLANAFGSVPHELLWSAFRFFHIPDTITTLVKSYFQDLQFCFTTSEFTTSWQCLNVGIMAGCTISALAFIMAMEVIIRSSKWVAGGQRVDSGFRLPPLRAYMDDITTLTTTVPCTRRLLRKLEENISWARMKIKPSKSRSISIVKGVLCDLKFFIGDDQIPTVSEQPVKSLGRWYDASLKDKDQVQQLRKDISSSLQSIDNTQLPGKLKAWCLQFGLLPRVLWPLAVYEVPISTVEKMERGATSYLKKWLGVPRCLTTIGLYGDGVLKLPLTSLTEEFKCAKTRLQMTLNESRDPVVSNNAPTLATGRKWRPGKAVQEATAALRHADIVGHVQQGRGGLGLTSRAAWSKATAPERRKMVVQEVRHQEEAARWAKAVSLAKQGQWTRWDSVEKRKISWKDLWATEARRLSFSIRATYDILPTPVNLHQWYGEDPDCALCSMPANFRHILTGCKTSLTQGRYTWRHNQVLKNLASALEDKRAATNSLPPPAASHPLRTTFVREGAKPPKSGSTPIERDQLRLARDWKMLADIGRQLVFPPEIATTTLRPDVVLWSRSLKKVFIIELTVPWEDSVDEAYERKHLRYADLAAEARHHGWNTEVRPVEVGCRGFVATSTTRLLRDLGIKGQSQRSAIKAVSEAAEGSSQWLWIKRKDPSWAPK

SEQ ID NO: 26521 - protein, 1060 aa, Oncorhynchus mykiss
MKHSNWTQTIVCSASYTTVMEDVNSSTEVTTEVEPTTGVELTEPPRPAVERRLPGHRPYVKWPGASDKKLWETVNTDLTLTLEKLRGTVEKKLERMGDIIYEYGTERFGVEEAKGGRKVPTPPVSRRQQEIKRLVQERRQLKKQWKKASEVEKEGIEALQADIKTRLASLRRAENLRKRRRKKEQTRTRFYKDPFKFLKSLFTKEKSGALKTTKKDLEEHLRTTNFDSKRHEHLAIPSDIPPIEPPEHHIETSPQTWKEVENTVRRARTASAPGPNGVPYKVYKNAPDVLRFLWRLMRTAWKNKIIPKVWRRAGGVLIPKEKDAVNISQFRPISLLNVEGKIFFRVIAQRMAEYLQRNAYVDTSVQKAGISGFSGCLEHSSMIWHQIQMAKVEKRDLHVVFLDLANAFGSVPHELLWSAFRFFHIPDTITTLVKSYFQDLQFCFTTSEFTTSWQCLNVGIMAGCTISPLAFIMAMDVIIRSSKWVAGGQRVDSGFRLPPLRAYMDDITTLTTTVPCTRRLLRKLEENISWARMKIKPSKSRSISIVKGVLSDLKFFIGDDQIPTVSEQPVKSLGRWYDASLKDKDQVQQLRKDISSSLQSIDNTQLPGKLKAWCLQFGLLPRVLWPLAVYEVPISTVEKMERGVTGYLKKWLGVPRCLTTIGLYGDGVLKLPLTSLTEEFKCSKTRLQMTLNESRDPVVSNNAPTLATGCKWRPGKAVQEATAALRHADIVGHVQQGRGGLGLTSRAAWSKATAPERRKMVVQEVRHQEEAARWAKAVSLSKQGQWTRWDSVEKRKISWKDLWAMEARRLSFSIRATYDVLPTPVNLHQWYGEDPDCALCSMPANLRHILTGCKTSLTQGRYTWRHNQVLKNLASALEDKRAATNSLPPPAASHPLRTNFVREGAKPPKRGSTPLERDQLRLARDWKMLADIGRQLVFPPEIATTTLRPDMVLWSRSLKKVFIIELTVPWEDSVDEAYERKHLRYADLAAEARHHGWNTEVRPVEVGCRGFVATSTTRLLRDLGIKGQSQRSAIKAVSEVAEGSSQWLWMKRKDPSWTPK

SEQ ID NO: 26522 - protein, 1041 aa, Oncorhynchus gorbuscha
MEDVNSSTEVATEVEPTTGVELTQPPRPAVERRLPGHRPYVKWPGASDKKLWETVNTDLTLTLEKLRGTVEKQLERMGDIIYEYGTERFGVEEAKGGRKVPTPPVSRRQQEIKRLVQERRQLKKQWKKASEVEKEGIEALQADIKTRLASLRRAENLRKRRRKKEQTRTRFYKDPFKFLKSLFTKEKSGALKTTKKDLEEHLRITNVDSKRHEHLAIPSDIPPIEPPEHHIETSPPTWKEVEDTVRRARTASGPGPNGVPYKVYKNTPDVLRFLWRLMRTAWQKKIIPKVWRRAGGVLIPKEKDAVNISQFRPISLLNVEGKIFFRVIAQRMAEYLQRNTYVDASVQKAGISGFSGCLEHSSMIWHQIQMAKVEKRDLHVVFLDLANAFGSVPHELLWSAFRFFHIPDTITNLVKSYFQDLQFCFTTSEFTTSWQCLNVGIMAGCTISPLAFTMAMEVIIRSSKWVAGGQRVDSGFRLPPLRAYMDDITTLTTTVPCTRRLLRKLEENISWARMKIKPSKSRSISIVKGVLSDLKFFIGDDQIPTVSEQPVKSLGRWYDASLKDKDQVQQLRKDISSSLQSIDNTQLPGKLKAWCLQFGLLPRVLWPLALYEVPISTVEKMERGVTGYLKKWLGVPRCLTTIGLYGDGVLKLPLTSLTEEFKCAKTRLQMTLNESRDPVVSNNAPTLATGRKWRPGKAVQEATAALRHADIVSHVQQGRGGLGLTSRAAWSKATAPERRKMVVQEVRHQEEAARWAKAVSLAKQGQWTRWDSVEKRKISWKDLWAMEARRLSFSIRATYDVLPTPVNLHQWYGEDPDCALCSMPANLRHILTGCKTSLAQGRYTWRHNQVLKNLASALEDKRAATNSLPPTAASHSLRTNFVREGAKPPKSGSTPLERDQLRLARDWKMLADIGRQLVFPPEIATTTLRPDMVLWSRSLNKVFIIELTVPWENSVDEAYERKHLRYADLAAEARHHGWNTEVRPVEVGCRGFVATSTTRLLRDLGIKGQSQRSAIKAVSEAAEGSSQWLWMKRKDPSWAPK

SEQ ID NO: 26523 - protein, 1041 aa, Salvelinus namaycush
MEDVNSSTEVTTEVEPTTGVELTQPPRPAVERRLPGHRPYVKWPGASDKKLWEAVNTDLTLTLEKLRGTVEKNLERMGDIIYEYGAESFGVQEAKGGRKVPTPPVSRRQQEIKRLVQERRQLKKQWKKASEVEKEGIEALQADIKTRLASLCRAENLRKRRRKKEQTRTRFYKDPFKFLKSLFTKEKSGALKTTKKDLEEHLITTNFDSKRHEHLAIPSDIPPIEPPEHHIETSPPTWKEVENTVRWARTASAPGPNGVPYKVYKNAPDVLRVLWRLMRTAWQKKIIPKVWRRAGGVLIPKEKDAVNISQFRPISLLNVEGKIFFRVIAQRMAEYLQRNAYVDTSVQKAGISGFSGCLEHSSMIWHQIQMAKVEKRDLHVVFLDLANAFGSVPHELLWSAFRFFHIPDTITTLVKSYFQDLQFCFTTSEFTTSWQCLDVGIMAGCTISPLAFIMAMEVIIRSSKWVAGGQRVDSGFRLPPLRAYMDDITTLTTTVPCTRRLLRKLEENISWARIKIKPYKSRSISIVKGVLSDLKFFIGDDQIPTVSEQPVKSLGRWYDASLKDKDQVQQLRKDISSSLQSIDNTQLPGKLNAWCLQFGLLPRVLWPLAVYEVPISTVEKMERGVTGYLKKWLRVPRCLTTIGLYGDGVLKLPLTSLTEEFKCAKTRLQMTLNESRDPVVSNNALTLATGRKWRPGKAVQEATAALRHADIVGHVQQGRGGLGLTSRAAWSKATAPERRKMVVQEVRHQEEAARWAKAVSLAKQGQWTRWDSVEKRKISWKDLWAMEARRLSFSIRATYDVLPTPVNLHQWYGEGSDCALCSMPANLRHILTGCKTSLTQGRYTWRHNQVLKNLASALEDKRAATNSLPPPAASHPLRTTFVREGAKPPKSGSTPLERDQLRLARDWKMLADIGRQLVFPPEIATTTLRPDMVLWSRSRKKVFIIELTVPWEDSVDEAYERKHLRYADLAAEARHHGWNTEVRPVEVGCRGFVATSTTRLLRDLGIKGQSQRSAIKAVSEAAEGSSQWLWMKRKDPSWAPK

SEQ ID NO: 26524 - protein, 1169 aa, Callorhinchus milii
MLRSMLETPDLATESQHTRIPLESARAGAEDDSSTDNMVTTGPETTTSNESTAQENTTATVTSSAATAGHKQMQVCVCGWRKVTSHHGLRIHQGKKGCLGKERQRPRIDYFLRKRSNQSNEAQQLDANHSLQCISTTVMEDVNSSTEVTTEVEPTTGVELTQPPRPAVERRLPGHRPYVKWPGASDKKLWETVNTDLTLTLEKLRGTVEKKLERMGDIIYEYGAESFGVQEAKGGRKVPTPPVSRRQQEIKRLVQERRQLKKQWKKASEVEKEGIEALQADIKTRLASLRRAENLRKRRRKKEQTRTRFYKDPFKFLKSLFTKEKSGVLKTTKKDLEEHLRTTNFDSKRHEHLAIPSDIPPIEPPEHHIETSPPTWKEVENTVRRARTASAPGPNGVPYKVYKNAPDVLRFLWRLMRTAWQKKIIPKVWRRAGGVLIPKEKDAVNISQFRPISLLNVEGKIFFRVIAQRMAEYLQRNAYVDTSVQKAGISGFSGCLEHSSMIWHQIQMAKVEKRDLHVVFLDLANAFGSVPHELLWSAFRFFHIPDTITTLVKSYFQDLQFCFTTSEFTTSWQCLNVGIMAGCTISPLAFIMAMEVIIRSSKWVAGGQRVDSGFRLPPLRAYMDDITTLTTTVPCTRRLLRKLEENISWARMKIKPSKSRSISIVKGVLCDLKFFIGDDQIPTVSEQPVKSLGRWYDASLKDKDQVQQLRKDISSSLQSIDNTQLPGKLKAWCLQFGLLPRVLWPLAVYEVPISTVEKMERGVTSYLKKWLGVPRCLTTIGLYGDGVLKLPLTSLTEEFKCAKTRLQMTLNESRDPVVSNNAPTLATGRKWRPGKAVQEATAALRHADIVGHVQQGRGGLGLTSRAAWSKATAPERRKMVVQEVRHQEEAARWAKAVSLAKQGQWTRWDSVEKRKISWKDLWAMEARRLSFSIRATYDVLPTPVNLHQWYGEDPDCALCSMPANLRHILTGCKTSLTQGRYTWRHNQVLKNLASALEDKRAATNSLPPPAASHPLRTTFVREGAKPPKSGSTPIERDQLRLARDWKMLADIGRQLVFPPEIATTTLRPDMVLWSRSLKKVFIIELTVPWEDSVDEAYERKHLPLCRNTEVRPVEVGCRGFVATSTTRLLRDLGIKGQSQRSAIRAVSEAAEGSSQWLWMKRKDPSWAPK

SEQ ID NO: 26525 - protein, 1139 aa, Lethenteron reissneri
MLRSMLETPDLATESQHTRIPLESARAGAEDDSSTDNMVTTGPETTTSNESTAQENTTATATSSAATAGHKQMQVCVCGWRKVTSHHGLRIHQGKKGCLGKERQRPRIDYFLRKRSNQSNEAQQLDANHSLQCISTTVMEDVNSSTEVTTEVEPTTGVELTQPPRPAIERRLPGHRPYVKWPGAIDKKLWETVNTDLTLTLEKLRGTVEKKLERMGDIIYEYGAESFGVQEAKGGRKVPTPPVSRRQQEIKCLVQERRQLKKQWKKASEVEKEGIEALQADIKTRLASLRRAENLRKRRRKKEQTRTRFYKDPFKFLKSLFTKEKSGVLKTTKKDLEEHLRTTNFDSKRHEHLAIPSDIPPIEPPEHHIETSPPTWKEVENTVRRARTASAPGPNGVPYKVYKNAPDVLRFLWRLMRTAWQKKIIPKVWRRAGGVLIPKEKDAVNISQFRPISLLNVEGKIFFRIIAQRMAEYLQRNAYVDTSVQKAGISGFSGCLEHSSMIWHQIQMAKVEKRDFHVVFLDLANAFGSVPHELLWSAFRFFYIPDTITTLVKSYFQDLQFCFTTSEFTTSWQCLNVGIMAGCTISPLAFIMAMEVIIRSSKWVAGGQRVDSGFRLPPLRAYMDDITTLTTTVPCTRRLLRKLEENISWARMKIKPSKSRSISIVKGVLCDLKFFIGDDQIPTVSEQPVKSLGRWYDASLKDKDQVQQLRKDISSSLQSIDNTQLPGKLKAWCLQFDLLPRVLWPLAVYEVPISTVEKMERGATSYLKKWLGVPRCLTTIGLYGDGVLKLPLTSLTEEFKCAKTRLQMTLNESRDPVVSNNAPTLATGRKWRPGKAVQEATAALRHADIVGHVQQGRGGLGLTSRAAWSKATAPERRKMVVQEVRHQEEAARWAKAVSLAKQGQWTRWDSVEKRKISWKDLWAMEARRLSFSIRATYDILPTPVNLHQWYGEDPDCALCSMQANLRHILTVCKTSLTQGRYTWRHNQVLKNLASALEDKRAATNSLPPPAASHPLRTTFVREGAKPPKSGSTPIERDQLRLARDWKMLADIGRQLVFPPEIATTTLRPDMVLWSHSLKKVFIIELTVPWEDSVDEAYERKHLRYADLAAEALASWLEHRSPTSGGGLQRFCGNIYNQTA

SEQ ID NO: 26526 - protein, 1141 aa, Oncorhynchus mykiss
MVTTGPETTTSNESTAQENTTATVTSSAATAGHKQMQVCVCGWRKVTSHHGLRIHQGKKGCLGKERQRPRIDYFLRKRSNQSNEAQQLDANHSLQCISTTVMEDVNSSTEVTTEVEPTTGVELTEPPRPAVERRLPGHRPYVKWPGASDKKLWETVNTDLTLTLEKLRGTVEKKLERMGDIIYEYGTERFGVEEAKGGRKVPTPPVSRRQQEIKRLVQERRQLTKQWKKASEVEKEGIEALQADIKTRLASLRRAENLRKRRRKKEQTRTRFYKDPFKFLKSLFTKEKSGALKTTKKDLEEHLRTTNFDSKRHEHLAIPSDIPPIEPPEHHIETSPPTWKEVENTVRRARTASAPGPNGVPYKVYKNAPDILRFLWRLMRTAWKNKIIPKVWRRAGVLIPKEKDAVNISQFRPISLLNVEGKIFFRVIAQRMAEYLQRNAYVDTSVQKAGISGFSGCLEHSSMIWHQIQMAKVEKRDLHVVFLDLANAFGSVPHELLWSAFRFFHIPDTITTLVKSYFQDLQFCFTTSEFTTSWQCLNVGIMAGCTISPLAFIMAMEVIIRSSKWVAGGQRVDSGFRLPPLRAYMDDITTLTTTVPCTRRLLRKLEENISWARMKIKPSKSRSISIVKGVLSDLKFFIGDDQIPTVSEQPVKSLGRWYDASLKDKDQVQQLRKDISSSLQSIDNTQLPGKLKAWCLQFGLLPRVLWPLAVYEVPISTVEKMERGVTGYLKKWLGVPRCLTTIGLYGDGVLKLPFTSLTEEFKCSKTRLQMTLNESRDPVVSNNAPTLAIGRKWRPGKAVQEATAALRHADIVGHVQQGRGGLGLTSRAAWSKATAPERRKMVVQEVRHQEEAARWAKAVSLSKQGQWTRWDSVEKRKISWKDLWAMEARRLSFSIRATYDVLPTPVNLHQWYGEDPDCALCSMPANLRHILTGCKTSLTQGRYTWCHNQVLKNLASALEDKRAATNSLPPPAASHPLRTNFVREGAKPPKRGSTPLERDQLRLARDWKMLADIGRQLVFPPEIATTTLRPDMVLWSRSLKKVFIIELTVPWEDSVDEAYERKHLRYADLAAEARHHGWNTEVRPVEVGCRGFVATSTTRLLRDLGIKGQSQRSTIKAVSEAAEGSSQWLWMKRKDPSWALK

SEQ ID NO: 26527 - protein, 764 aa, Oncorhynchus gorbuscha
MRTAWQKKIIPKVWRRAGGVLIPKEKDAVNISQFRPISLLNVEGKIFFRVIAQRMAEYLQRNTYVDASVQKAGISGFSGCLEHSSMIWHQFQMAKVEKRDLHVVFLDLANAFGSVPHELLWSAFRFFHIPDTITNLVKSYFQDLQFCFTTSEFTTSWQCLNVGIMAGCTISPLAFTMAMEVIIRSSKWVAGGQRVDSGFRLPPLRAYMDDITTLTTTVPCTRRLLRKLEENISWARMKIKPSKSRSISIVKGVLSDLKFFIGDDQIPTVSEQPVKSLGRWYDASLKDKDQVQQLRKDISSSLQSIDNTQLPGKLKAWCLQFGLLPRVLWPLALYEVPISTVEKMERGVTGYLKKWLGVPRCLTTIGLYGDGVLKLPLTSLTEEFKCAKTRLQMTLNESRDPVVSNNAPTLATGRKWRPGKAVQEATAALRHADIVGHVQQGRGGLGLTSRAAWSKATAPERRKMVVQEVHHQEEAARWAKAVSLAKQGQWTRWDSVEKRKISWKDLWAMEARRLSFSIRATYDVLPTPVNLHQWYGVDPDCALCSMPANLRHILTGCKTSLAQGRYTWRHNQVLKNLASALEDKRAATNSLPPTAASHSLRTNFVREGAKPPKSGSTPLERDQLSLARDWKMLADIGRQLVFPPEIATTTLRPDMVLWSRSLNKVFIIELTVPWENSVDEAYERKHLRYADLAAEARHHGWNTEVRPVEVGCRGFVATSTTRLLRDLGIKGQSQRSAIKAVSEAAEGSSQWLWMKRKDPSWAPK

SEQ ID NO: 26528 - protein, 1065 aa, Salvelinus namaycush
MLFVLPRSVYVDANHSLQCISTTVMEDVNSSTEVTPEVEPTTGVELTQPPRPAVERRLPGHRPYVKWPGASDKKLWEAVNTDLTLTLEKLRGTVEKKLERMGDIIYEYGAESFGVQEAKGGRKVPTPPVSRRQQEIKRLVQERRQLKKQWKKASEVEKEGIEALQADIKTRLASLRRAENLRKRRRKKEQTRTRFYKDPFKFLKSLFTKEKSGALKTTKKDLEEHLITTNFDSKRHEHLAIPSDIPPIEPPEHHIETSPPTWKEVENTVRRARTASAPGPNGVPYKVYKNAADVLRVLWRLMRTAWQKKIIPKVWRRAGGVLIPKEKDAVNISQFRPISLLNVEGKIFFRVIAQRMSEYLQRNAYVDTSVQKAGISGFSGCLEHSSMIWHQIQMAKVEKRDLHVVFLDLANAFGSVPHELLWSAFRFFHIPDTITTLVKSYFQDLQFCFTTSEFTTSWQCLNVGIMAGCTISPLAFIMAMEVIIRSSKWVAGGQRVDSGFRLPPLRAYMDDITTLTTTVPCTRRLLRKLEENISWARMKIKPSKSRSISIVKGVLSDLKFFIGDDQIPTVSEQPVKSLGRWYDASLKDKDQVQQLRKDISSSLQSIDNTQLPGKLKAWCLQFGLLPRVLWPLAVYEVPISTVEKMERGVTGYLKKWLGVPRCLTTIGLYGDGVLKLPLTSLTEEFKCAKTRLQMTLNESRDPVVSNNAPTLATGRKWRPGKAVQEATAALRHADIVGHVQQGRGGLGLTSRAAWSKATAPERRKMVVQEVRHQEEAARWAKAVSLAKQGQWTRWDSVEKRKISWKDLWAMEARRLSFSIRATYDVLPTPVNLHQWYGEDPDCALCSMPANLRHILTGCKTSLTQGRYTWRHNQVLKNLASALEDKRAATNSLPPPAASHPLRTTFVREGAKPPKSGSTPLERDQLRLARDWKMLADIGRQLVFPPEIATTTLRPDIVLWSRSLKKVFIIELTVPWEDSVDEAYERKHLRYADLAAEARHHGWNTEVRPVEVGCRGFVATSTTRLLRDLGIKGQSQRSAIKAVSEVAEGSSQWLWMKRKDPSWAPK

SEQ ID NO: 26529 - protein, 1179 aa, Lethenteron reissneri
MLRSMLETPDLATESQHTRIPLESARAGAEDDSSTDNMVTTGPETTTSNESTAQENTTATVTSSAATAGHKQMQVCVCGWRKVTSHHRLRIHQGKKGCLGKERQRPRIDYFLRKRSNQSNEAQQLDANHSLQCISTTVMEDVNSSTEVTTEVEPTTGVELTQPPRPAIERRLPGHRPYVKWPGASDKKLWETVNTDLTLTLEKLRGTVEKKLERMGDIIYEYGAESFGVQEAKGGRKVPTPPVSRRQQEIKRLVQERRQLKKQWKKASEVEKEGIEALQADIKTRLASLRRAENLRKRRRKKEQTRTRFYKDPFKFLKSLFTKEKSGVLKTTKKDLEEHLRTTNFDSKRHEHLAIPSDIPPIEPPEHHIETSPPTWKEVENTVRRARTASAPGQNGVPYKVYKNAPDVLRFLWRLMRTAWQKKIIPKVWRRPGGVLIPKEKDAVNISQFRPISLLNVEGKIFFRIIAQRMAEYLQRNAYVDTSVQKAGISGFSGCLEHSSMIWHQIQMAKVEKRDLHVVFLDLANAFGSVPHELLWSAFRFFHIPDTITTLVKSYFQDLQFCFTTSEFTTSWQCLNVGIMAGCTISPLAFIMAMEVIIRSSKWVAGGQRVDSGFRLPPLRAYMDDITTLTTTVPCTRRLLRKLEENISWARMKIKPSKSRSISIVKGVLCDLKFFIGDDQIPTVSEQPVKSLGRWYDASLKDKDQVQQLRKDISSSLQSIDNTQLPGKLKAWCLQFGLLPRVLWPLAVYEVPISTVEKMERGATSYLKKWLGVPRCLTTIGLYGDGVLKLPLTSLTEEFKCAKTRLQMTLNESRDPVVSNNAPTLATGRKWRPGKAVQEATAALRHADIVGHVQQGRGGLGLTSRAAWSKATAPERRKMVVQEVRHQEEAARWAKAVSLAKQGQWTRWDSVEKRKISWKDLWAMEARRLSFSIRATYDILPTPVNLHQWYGEDPDCVLCSMPANLRHILTGCKTSLTQGCYTWRHNQVLKNLASALEDKRAATNSLPPPAASHPLRTTFVREGAKPPKSGSTSIERDQLRLARDWKMLADIGRQLVFPPEIATTTLRPDMVLWSRSLKKVFIIELTVPWEDSVDEAYERKHLRYADLAAEARHHGWNTEVRPVEVGCRGFVATSTTRLLRDLGIKGQSQRSAIKAVSEAAEGSSQWLWMKRKDPSWAPK

SEQ ID NO: 26530 - protein, 1179 aa, Pimephales promelas
MLRSMLETPALATKRQHMRIPLESARAGAEEDSLTDTMVTTGLETTTSNESTAQENTTATVTSSAATAGHKEMQVCVCGWRKVTSYHGLRIHQGKKGCLGIERQRPRIDHFLRKRPNQSSEAQQLDANHSLQCISTAVMEDVNPSTEVTTEVEPTTGLEITHPPRPVVERRLLGHRPCVKWPGASDKKLWETVNTDLTLTLEKLRGTVEKKLESMGNIIYEYGVESFGVQEAKGRRKVPTPPVSRRQQEIKRLVQERRQLKKQWKKASEVEKEGIEALQADIKTRLASLRRAENLRKRRRKKEQTRTRFYKDPFKFLKSLFTEEKSGALKTTKKDLEEYLRTTNFDSKRHEHLAIPSDIPPIEPPEYHIETSPPTWKEVENIVRRARTASAPGPNGVPYKVYRNAPDVLRFLWRLMRTAWQKKKIPKVWRRAGGVLIPKEKDAETISQFRPISLLNVEGKIFFKVIAQRMAEFLQKNAYVDTSVQKAGISGFSGCLEHSSMIWHQIQMAKVEKRDLHVVFLDLANAFGSVPHELLWSAFRFFHIPDTITTLVRSYFQDLQFCFTTSEFTTSWQTLNVGIMAGCTISPLAFIMAMEVIIRASRWVVGGQRVNSGYRLPPLRAYMDDITTLTTTVPCTRRLLRKLEENISWARMKIKPSKSRSISIVKGKLSKLKFFIGHDQIPTVSEQPVKSLGRWYDASLKDKDQVQQLRKDISSSLQAIDNTQLPGKLKAWCLQFGLLPRVLWPLVVYEVPISTVEKMERGVTGYLKKWLGVPRCLTTIGLYGDGVLKLPLTSLTEEFKCAKTRLQMTLNESRDLVVSNNAPTLATGRKWRPGKAVQEATAALKHADILGHVQHGRGGLGLTSHAVWSKATAPERRKMVVQEVRQQEEAARWAKAVSLAKQGQWTRWDSVEKRKVSWKDLWVMEARRLSFSIRATYDVLPTPVNLHQWYGEDPECALCSMPANLRHILTGFKTSLTQGRYTWRHNQVLKTLASALENKRAATNSLPPPAASHPLRMTFVREGAKPPKSSSTPLDRDQLRLARDWKMLADIGRQLVFPPEIATTTLRPDMVLWSRSLKKAFIIELTVPWEDSVDEAYERKHLRYAELAAEARRHGWNTEIRPVEVGCRGFVATSTIRLLRDLGIKGQSQRSAIRAVSEAAEVSSQWLWIKRKDPSWAPK

SEQ ID NO: 26531 - protein, 1179 aa, Callorhinchus milii
MLRSMLETPDLATESQHTRIPLESARAGAEDDSSTDNMVTTGPETTTSNESTAQENTTATVTSSAATAGHKQMQVCVCGWRKVTSHHGLRIHQGKKGCLGKERQRPRIDYFLRKRSNQSNEAQQLDANHSLQCISTTVMEDVNSSTEVTTEVEPTTGVELTQPPRPAIERRLPGHRPYVKWPGASDKKLWETVNTDLTLTLEKLRGTVEKKLERMGDIIYEYGAESFGVQEAKGGRKVPTPPVSRRQQEIKRLVQERRQLKKQWKKASEVEKEGIEALQADIKTRLASLRRAENLRKRRRKKEQTRTRFYKDPFKFLKSLFTKEKSGVLKTTKKDLEEHLRTTNFDSKRHEHLAIPSDIPPIEPPEHHIETSPPTWKEVENTVRRARTASAPGPNGVPYKVYKNAPDVLRFLWRLMRTAWQKKIIPKVWRRAGGVLIPKEKDAVNISQFRPISLLNVEGKIFFRIIAQRMAEYLQRNAYVDTSVQKAGISGFSGCLEHSSMIWHQIQMAKVEKRDLHVVFLDLANAFGSVPHELLWSAFRFFHIPDTITTLVKSYFQDLQFCFTTSEFTTSWQCLNVGIMAGCTISPLAFIMAMEVIIRSSKWVAGGQRVDSGFRLPPLRAYMDDITTLTTTVPCTRRLLRKLEENISWARMKIKPSKSRSISIVKGVLCDLKFFIGDDQIPTVSEQPVKSLGRWYDASLKDKDQVQQLRKDISSSLQSIDNTQLPGKLKAWCLQFGLLPRVLWPLAVYEVPISTVEKMERGATSYLKKWLGVPRCLTTIGLYGDGVLKLPLTSLTEEFKCAKTRLQMTLNESRDPVVSNNAPTLATGRKWRPGKAVQEATAALRHADIVGHVQQGRGGLGLTSRAAWSKATAPERRKMVVQEVRHQEEAARWAKAVSLAKQGQWTRWDSVEKRKISWKDLWAMEARRLSFSIRATYDILPTPVNLHQWYGEDPDCALCSMPANLRHILTGCKTSLTQGRYTWRHNQVLKNLASALEDKRAATNSLPPPAASHPLRTTFVREGAKPPKSGSTPIERDQLRLARDWKMLADIGRQLVFPPEIATTTLRPDMVLWSRSLKKVFIIELTVPWEDSVDEAYERKHLRYADLAAEARHHGWNTEVRPVEVGCRGFVATSTTRLLRDLGIKGQSQRSAIKAVSEAAEGSSQWLWMKRKDPSWAPK

SEQ ID NO: 26532 - protein, 1142 aa, Lethenteron reissneri
MVTTGPETTTSNESTAQENTTATVTSSAATAGHKQMQVCVCGWRKVTSHHGLRIHQGKKGCLGKERQRPRIDYFLRKRSNQSNEAQQLDANHSLQCISTTVMEDVNSSTEVTTEVEPTTEVELTQPPRPAVERRLPGHRPYVKWPGASDKKLWETVNTDLTLTLEKLRGTVEKKLERMGDIIYEYGAESFGVQEAKGGRKVPTPPVSRRQQEIKRLVQERRQLKKQWKKASEVEKEGIEALQADIKTRLASLRRAENLRKRRRKKEQTRTRFYKDPFKFLKSLFTKEKSGVLKTTKKDLEEHLRTTNFDSKRHEHLAIPSDIPLIEPPEHHIETSPPTWKEVENTVRRARTASAPVPNGVPYKVYKNAPDVLRFLWRLMGIAWKKKIIPKVWRRAGGVLIPKEKDAVNISQFRPISLLNVEGKIFFRVIAQRMAEYLQRNAYVDTSVQKAGISGFSGCLEHSSMIWHQIQMAKVEKRDLHVVFLDLANAFGSVPHELLWSAFRFFHIPDTITTLVKSYFQDLQFCFTTSEFTTSWQCLNVGIMVGCTISPLAFIMAMEVIIRSSKWVAGGQRVDSGCRLPPLRAYMDDITTLTTTVPCTRRLLRKLEENISWARMKIKPSKSRSISIVKGVLCDLKFFIGDDQIPTVSEQPVKSLGRWYDASLKDKDQVQQLRKDISSSLQSIDNTQLPGKLKAWCLQFGLLPRVLWPLAVYEVPISTVEKMERGVTGYLKKWLGVPRCLTTIGLYGDGVLKLPLTSLTEEFKCAKTRLQMTLNESRNPVVSNNAPTLATGRKWRPGKAVQEATAALRHADIVGHVQQGRGGFGLTSRAAWSKATAPERRKMVVQEVRHQEEAARWAKAVSFAKQGQWTRWDSVEKRKISWKDLWAMEARRLSFSIRATYDVLPTPVNLHQWYGEDPDCALCSMPANLRHILTGCKTSLTQGRYTWRHNQVLKNLASALEDKRTAINSLPPPAASHPLRTTFVREGAKPPKSGSTPIERDQLRLARDWKMLADIGRQLVFPPEIATTTLRPDMVLWSRSLKKVFIIELTVPWEDSVDEAYERKHLRYADLAAEARHHGWNTEVRPVEVGCRGFVATSTTRLLRDLGIKGQSQRSAIRAVSEAAEGSSQWLWMKRKDPSWAPK

SEQ ID NO: 26533 - protein, 759 aa, Oncorhynchus gorbuscha
MRTAWQKKIIPKVWRRAGGVLIPKEKDAVNISQFRPISLLNVEGKIFFRVIAQRMAEYLQRNTYVDASVQKAGISGFSGCLEHSSMIWHQIQTAKVEKRDLHVVFLDLANAFGSVPHELLWSAFRFFHIPDTITNLVKSYFQDLQFCFTTSWQCLNVGIMAGCTISPLAFTMAMEVIIRSSKWVAGGQRVDSGFRLPPLRAYMDDITTLTTTVPCTRRLLRKLEENISWARMKIKPSKSRSISIVKGVLSDLKFFIGDVQIPTVSEQPVKSLGRWYDASLKDKDQVQQLRKDISSSLQSIDNTQLPGKLKAWCLQFGLLPRVLWPLALYEVPISTVEKMERGVTGYLKKWLGVPRCLTTIGLYGDGVLKLPLTSLTEEFKCAKTRLQMTLNESRDPVVSNNAPTLATGRKWRPGKAVQEATAALRHADIVGHVQQGRGGLGLTSRAAWSKATAPERRKMVVQEVRHQEEAARWAKAVSLAKQGQWTRWDSVEKRKISWKDLWAMEARRLSFSIRATYDVLPTPVNLHQWYGEDPDCALCSMPANLRHILTGCKTSLAQGRYTWRHNQVLKNLASALEDKRAATNSLPPTAASHSLRTNFVREGAKPPKSGSTPLERDQLCLARDWKMLADIGRQLVFPPEITTTTLRPDMVLWSRSLNKVFIIELTVPWENSVDEAYERKHLRYVDLAAEARHHGWNTEVRPVEVGCRGFVATSTTRLLRDLGIKGQSQRSAIKAVSEAAEGSSQWLWMKRKDPSWAPK

SEQ ID NO: 26534 - protein, 1142 aa, Salvelinus namaycush
MVTTGPETTTSNESTAQENTTATVTSSAATAGHKQMQVCVCGWRKVTSHHGLRIHQGKKGCLGKERQRPRIDHFLRKRSNQSNEAQQLDANHSLQCISTTVMEDVNSSTEVTPEVEPTTGVELTQPPRPAVERRLPGHRPYVKWPGTSDKKLWEAVNTDLTLTLEKLRGTVEKKLERMGDIIYEYGAESFGVQEAKGGRKVPTPPVSRRQQEIKRLVQERRQLKKQWKKASEVEKEGIEALQADIKTRLASLRRAENLRKRRRKKEQTRTRFYKDPFKFLKSLFTKEKSGALKTTKKDLEEHLITTNFDSKRHEHLAIPSDIPPIEPPEHHIETSPPTWKEVENTVRRARTASAPGPNGVPYKVYKNAPDVLRVLWRLMRTAWQKKIIPKVWRRAGGVLIPKEKDAVNISQFRPISLLNVEGKIFFRVIAQRMSEYLQRNAYVDTSVQKAGISGFSGCLEHSSMIWHQIQMAKVEKRDLHVVFLDLANAFGSVPHELLWSAFRFFHIPDTITTLVKSYFQDLQFCFTTSEFTTSWQCLNVGIMAGCTISPLAFIMAMEVIIRSSKWVAGGQRVDSGFRLPPLRAYMDDITTLTTTVPCTRRLLRKLEENISWARMKIKPSKSRSISIVKGVLSDLKFFIGDDQIPTVSEQPVKSLGRWYDASLKDKDQVQQLRKDISSSLQSIDNTQLPGKLKAWCLQFGLLPRVLWPLAVYEVPISTVEKMERGVTGYLKKWLGVPRCLTTIGLYGDGVLKLPLTSLTEEFKCAKTRLQMTLNESRDPVVSNNAPTLATGRKWRPGKAVQEATAALRHADIVGHVQQGRGGLGLTSRAAWSKATAPERRKMVVQEVRHQEEAARWAKAVSLAKQGQWTRWDSVEKRKISWKDLWAMEARRLSFSIRATYDVLPTPVNLHQWYGEDPDCALCSMPANLRHILTGCKTSLTQGRYTWRHNQVLKNLASALEDKRAATNSLPPPAASHPLRTTFVREGAKPPKSGSTPLERDQLRLARDWKMLADIGRQLVFPPEIATTTLRPDIVLWSRSLKKVFIIELTVPWEDSVDEAYERKHLRYADLAAEARHHGWNTEVRPVEVGCRGFVATSTTRLLRDLGIKGQSQRSAIKAVSEVAEGSSQWLWMKRKDPSWAPK

SEQ ID NO: 26535 - protein, 1179 aa, Callorhinchus milii
MLRSMLETPALATESQHTRIPLESARAGAEDDSSTDNMVTTGPETTTSNESTAQENTTATVTSSAATAGHKQMQVCVCGWRKVTSHHGLRIHQGKKGCLGKERQRPRIDYFLRKRSNQSNEAQQLDANHSLQCISTTVMEDVNSSTEVTTEVEPTTGVELTQPPRPAIERRLPGHRPYVKWPGASDKKLWETVNTDLTLTLEKLRGTVEKKLERMGDIIYEYGAESFGVQEAKGGRKVPTPPVSRRQQEIKRLVQERRQLKKQWKKASEVEKEGIEALQADIKTRLASLRRAENLRKRRRKKEQTRTRFYKDPFKFLKSLFTKEKSGVLKTTKKDLEEHLRTTNFDSKRHEHLAIPSDIPPIEPPEHHIETSPPTWKEVENTVRRARTASAPGPNGVPYKVYKNAPDVLRFLWRLMRTAWQKKIIPKVWRRAGGVLIPKEKDAVNISQFRPISLLNVEGKIFFRIIAQRMAEYLQRNAYVDTSVQKAGISGFSGCLEHSSMIWHQIQMAKVEKRDLHVVFLDLANAFGSVPHELLWSAFRFFHIPDTITTLVKSYFQDLQFCFTTSEFTTSWQCLKVGIMAGCTISPLAFIMAMEVIIRSSKWVAGGQRVDSGFRLPPLRAYMDDITTLTTTVPCTRRLLRKLEENISWARMKIKPSKSRSISIVKGVLCDLKFFIGDDQIPTVSEQPVKSLGRWYDASLKDKDQVQQLRKDISSSLQSIDNTQLPGKLKAWCLQFGLLPRVLWPLAVYEVPISTVEKMERGATSYLKKWLGVPRCLTTIGLYGDGVLKLPLTSLTEEFKCAKTRLQMTLNESRDPVVSNNAPTLATGRKWRPGKAVQEATAALRHADIVGHVQQGRGGLGLTSRAAWSKATAPERRKMVVQEVRHQEEAARWAKAVSLAKQGQWTRWDSVEKRKISWKDLWAMEARRLSFSIRATYDILPTPVNLHQWYGEDPDCALCSMPANLRHILTGCKTSLTQGRYTWRHNQVLKNLASALEDKRAATNSLPPPAASHPLRTTFVREGAKPPKSGSTPIERDQLRLARDWKMLADIGRQLVFPPEIATTTLRPDMVLWSRSLKKVFIIELTVPWEDSVDEAYERKHLRYADLAAEARHHGWNTEVRPVEVGCRGFVATSTTRLLRDLGIKGQSQRSAIKAVSEAAEGSSQWLWMKRKDPSWAPK

SEQ ID NO: 26536 - protein, 764 aa, Lethenteron reissneri
MRTAWQKKIIPKVWRRAGGVLIPKEKDAVNISQFRPISLLNVEGKIFFRVIAQRMAEYLQRNAYVDTSVQKAGISGFSGCLEHSSMIWHQIQMAKVEKRDLHVVFLDLANAFGSVPHELLWFAFRFFHIPDTITTLVKSYFQDLQFCFTTSEFTTSWQCLNVGIMAGCTISPLAFIMAMEVIIRSSKWVAGGQRVDSGFRLPPRRAYMDDITTLTTTVPCTRRLLRKLEENISWARMKIKPSKSRSISIVKGVLCDLKFFIGDDQIPTVSEQPVKSLGRWYDASLKDKDQVQQLRKDISSSLQSIDNTQLPGKLKAWCLQFGLLPRVLWPLAVYEVPISTVEKMERGVTSYLKKWLGVPRCLTTIGLYGDGVLKLPLTSLTEEFKCAKTRLQMTLNESRDPVVSNNVPTLATGRKWRPGKAVQEATAALRHADIVGHVQQGRGGLGLTSRAAWSKATAPERQKMVVQEVRHQEEAARWAKAVSLAKQGQWTRWDSVEKRKISWKDLWAMEVRRLSFSIRATYDVLPTPVNLLQWYGEDPDCALCSMPANLRHILTGCKTSLTQGRYTWRHNQVLKNLVSALEDKRAATNSLPPPAASHPLRTTFVREGAKPPKSSSTPLERDQLRLARDWKMLADIGWQLVFPPEIATTTLRPDMVLWSRSLKKVFIIELTVPWEDSVDEAYERKHLRYADLAAEARHHGWNTEVRPVEVGCRGFVATSTTRLLRGLGIKGQSQRSAIRAVSEAAEGSSQWLWMKRKDPSWAPK

SEQ ID NO: 26537 - protein, 1041 aa, Entosphenus tridentatus
MEDVNSSTEVTTEVEPTTGVELTQPPRPAVERRLPGHRPYVKWPGASDKKLWETVNIDLTLTLKKLRGTVEKKLERMGDIIYEYGAESFGVQEAKGGRKVPTPPVSRRQQETKRLVQERRQLKKQWKKASEVEKEGTEALQTDIKTRLASLSRAENLRKCRRKKEQTRTRFYKDPFNFLKSLFTKEKSGALKTTNKDLEEHLRTTNFDSKRHEHLSIPSDIPPIEPPEHHIETSPPTWKEVENTVRRARTASAPGPNGVPYKVYKNAPDVLRFLWRLMRTAWQKKIIPKVWRRAGGVLTPKEKDAVNISQFRPISLLNVEGKIFFRVIAKRMAEYLQRNAYVDTSVQKAGISGFSGCLEHSSMIWHQIQMAKVEKRDLHVVFLDLANAFGSVPHELLWSAFRFFHIPDTITTLVKSYFQDLQFCFTTSEFTTSWQCLNVGIMAGCTISPLEFIMAIEVIIRSSKWVAGGQRVDSGFRLPPLRAYMNDITTLTTTVPCTRRLLRKLEENISWARMKIKPSKSRSISIVKGVLSDLKFFIGDDQIPTVSEQSVKSLGRWYDASLKDKDQVQQLRKDISSSLQSIDNTQLPGKLKAWCLQFGLLPRVLWPLAVYEVPISTVEKMERGVTGYLKKWFGVPRCLTTIGLYGDGVLKLPLTSLTEELKCAKTRLQMTLNESRDPVVSNNAPTLATGRKWRPGKAVQEATAALRHADIVGHVQQGRGGLGLTSRAAWSKAIAPERRKMVVQEVLHQEEAARWAKAVSLAKQGQWTRWDSVEKKKISWKDLWAMEARRLSFSIRATYDVLPTPVNLHQWYGEDPDCALCSMPANLRHILTGCKTSLTQRRYTWRHIQVLKNLASALEDKRAATNSLPPPAASHPLRTTFVREGAKPPKSGSTPLERDQLRLARDWKMLADIGRQLVFPPEIATTTLRPDMVLWSRSLKKVFIIELTVPWEDSVDEAYELKHLRYVDLAAEARHHGWNTEVRPVEVGCRGFVATSTTRLLRDLGIKGQSQRSAIRAVSEVAEGSSQWLWMKRKDPSWAPK

SEQ ID NO: 26538 - protein, 1179 aa, Lethenteron reissneri
MLRSMLETPDLATESQHTRIPLESARAGAEDDSSTDNMVTTGPETTTSNESTAQENTTATVTSSAATAGHKQMQVCVCGWRKVTSHHGLRIHQGKKGCLGKERQRPRIDYFLRKRSNQSNEAQQLDANHSLQCISTTVMEDVNSSTEVTTEVEPTTGVELTQPPRPAIERRLPGHRLYVKWPGASDKKLWETVNTDLTLTLEKLRGTVEKKLERMGDIIYEYGAESFGVQEAKGGRKVPTPPVSRRQQEIKRLVQERRQLKKQWKKASEVEKEGIEALQADIKTRLASLCRAENLRKRRRKKEQTRTRFYKDPFKFLKSLFTKEKSGVLKTTKKDLEEHLRTTNFDSKQHEHLAIPSDIPPIEPPEHHIETSPPTWKEVENTVRRARTASAPGPNGVPYKVYKNAPDVLRFLWRLMRTAWQKKIIPKVWRRAGGVLIPKEKDAVNISQFRPISLLNVEGKIFFRIIAQRMAEYLQRNAYVDTSVQKAGISGFSGCLEHSSMIWHQIQMAKVEKRDLHVVFLDLANAFGSVPHELLWSAFRFFHIPDTITTLVKSYFQDLQFCFTTSEFTTSWQCLNVGIMAGCTISPLAFIMAMEVIIRSSKWVAGGQRVDSGFRLPPLRAYMDDITTLTTTVPCTRRLLRKLEENISWARMKIKPSKSRSISIVKGVLCDLKFFIGDDQIPKVSEQPVKSLGRWYDASLKDKDQVQQLRIDISSSLQSIDNTQLPGKLKAWCLQFGLLPRVLWPLAVYEVPISTVEKMERGATSYLKKWLGVPRCLTTIGLYGDGVLKLPLTSLTEEFKCAKTRLQMTLNESRDPVVSNNAPTLATGRKWRPGKAVQEATAALRHADIVGHVQQGRGGLGLTSRAAWSKATAPERRKMVVQEVHHQEEAARWAKAVSLAKQGQWTRWDSVEKRKISWKDLWAMEARRLSFSIRATYDVLPTQVNLHQWYGEDPDCALCSMPANLRHILTGCKTSLTQGRYTWRHNQVLKNLASALEDKRAATNSLPPPAASHPLQTTFVREGAKPPKSGSTPIERDQLRLARDWKMLADIGRQLVFPPEIATTTLRPDMVLWSRSLKKVFIIELTVPWEDSVDEAYERKHLRYADLAAEARHHGWNTEVRPVEVGCRGFVATSTTRLLRDLGIKGQSQRSAIRAVSEAAEGSSQWLWMKRKDPSWAPK

SEQ ID NO: 26539 - protein, 1179 aa, Oncorhynchus gorbuscha
MVTTGLETTTSNESTAQENTTATVTSSAATVGHKQMQVCVCGWRKVTSHHGLRIHQGKKGCLGKERQRTRIDYFLRKRSNQSNEAQQLDANHSLQCISTTVMEDVNSSTEVATEVEPTTGVELTQPPRPAVERRLPGHRPYVKWPGASDKKLWETVNTDLTLTLEKLRGTVEKKLERMGDIIYEYGTERFGVEEAKGGRKVPTPPVSRRQQEIKRLVQERRQLKKQWKKASEVEKEGIEALQADIKTRLASLRRAENLRKRRRKKEQTRTRFYKDPFKFLKSLFTKEKSGALKTTKKDLEEHLRITNVDSKRHEHLAIPSDIPPIEPPEHHIETSPPTWKEVEDTVRRARTASGPGPNGVPYKVYKNTPDVLRFLWRLMRTAWQKKIIPKVWRRAGGVLIPKEKDAVNISQFRPISLLNVEGKIFFRVIAQRMAEYLQRNTYVDASVQKAGISGFSGCLEHSSMIWHQIQMAKVEKRDLHVVFLDLANAFGSVPHELLWSAFRFFHIPDTITNLVKSYFQDLQFCFTTSEFTTSWQCLNVGIMAGCTISPLAFTMAMEVIIRSSKWVAGGQRVDSGFRLPPLRAYMDDITTLTTTVPCTRRLLRKLEENISWARMKIKPSKSRSISIVKGVLSDLKFFIGDDQIPTVSEQPVKSLGRWYDASLKDKDQVQQLRKDISSSLQSIDNTQLPGKLKAWCLQFGLLPRVLWPLALYEVPISTVEKMERGVTGYLKKWLGVPRCLTTIGLYGDGVLKLPLTSLTEEFKCAKTRLQMTLNESRDPVVSNNAPTLATGRKWRPGKAVQEATAALRHADIVGHVQQGRGGLGLTSRAAWSKATAPERRKMVVQEVRHQEEAARWAKAVSLAKQGQWTRWDSVEKRKISWKDLWAMEARRLSFSIRATYDVLPTPVNLHQWYGEDPDCALCSMPANLRHILTGCKTSLAQGRYTWRHNQVLKNLASALEDKRAATNSLPPTAASHSLRTNFVREGAKPPKSGSTPLERDQLRLARDWKMLADIGRQLVFPPEIATTTLRPDMVLWSRSLNKVFIIELTVPWENSVDEAYERKHLRYADLAAEARHHGWNTEVRPVEVGCRGFVATSTTRLLRDLGIKGQSQRSAIKAVSEAAEGSSQWLWMKRKDPSWAPVRGPGGMRSTMIDSGRRTPLPCIVPWDVCYQQQGNSYD

SEQ ID NO: 26540 - protein, 1142 aa, Pimephales promelas
MVTTGLETTTSNESTAQENTTATVTSSAATAGHKEMQVCVCGWRKVTSYHGLRIHQGKKGCLGIERQRPRIDHFLRKRPNQSSEAQQLDANHSLQCISTAVMEDVNPSTEVTTEVEPTTGVEITHPPRPVVERRLLGHRPCVKWPGASDKKLWETVNTDLTLTLEKLRGTVEKKLESMGNIIYEYGVESFGVQEAKGRRKVPTPPVSRRQQEIKRLVQERRQLKKQWKKASEVEKEGIEALQADIETRLASLRRAENLRKRRRKKEQTRTRFYKDPFKFLKSLFTEEKSGALKTTKKDLEEYLRTTNFDSKRHEHLAIPSDIPPIEPPEYHIETSPPTWKEVENIVRRARTASAPGPNGVPYKVYRNAPDVLRFLWRLMRTAWQKKKIPKVWRRAGGVLIPKEKNAETISQFRPISLLNVEGKIFFKVIAQRMAEFLQKNAYVDTSVQKAGISGFSGCLEHSSMIWHQIQMAKVEKRDLHVVFLDLANAFGSVPHELLWSAFRFFHIPDTITTLVRSYFQDLQFCFTTSEFTTSWQTLNVGIMAGCTISPLAFIMAMEVIIRASRWVVGGQRVNSGYRLPPLRAYMDDITTLTTTVPCTRRLLRKLEENISWARMKIKPSKSRSISIVKGKLSKLKFFIGHDQIPTVSEQPVKSLGRWYDASLKDKDQVQQLRKDISSSLQAIDNTQLPGKLKAWCLQFGLLPRVLWPLVVYEVPISTVEKMERGVTGYLKKWLGVPRCLTTIGLYGDGVLKLPLTSLTEEFKCPKTRLQMTLNESRDLVVSNNAPTLATGRKWRPGKAVQEATAALKHADILGHVQHGRGGLGLTSHAVWSKATAPERRKMVVQEVRQQEEAARWAKAVSLAKQGQWTRWDSVEKRKVSWKDLWAMEARRLSFSIRATYDVLPTPVNLHQWYGEDPECALCSMPANLRHILTGCKTSLTQGRYTWRHNQVLKTLASALENKRAATNSLPPPAASHPLRMTFVREGAKPPKSSSTPLDRDQLRLARDWKMLADIGRQLVFPPEIATTTLRPDMVLWSRSLKKAFIIELTVPWEDSVDEAYERKHLRYAELAAEARRHGWNTEIRPVEVGCRGFVATSTIRLLRDLGIKGQSQRSAIRAVSEAAEVSSQWLWIKRKDPSWAPK

SEQ ID NO: 26541 - protein, 1179 aa, Lethenteron reissneri
MLRSMLETPDLATESQHTRIPLESARAGAEDDSLTDNMVTTGPETTTSNESTAQENTTATVTSSAATAGHKQMQVCVCGWRKVTSHHGLRIHQGKKGCLGKERQRPRIDYFLQKRSNQSNEAQQLDANHSLQCISTTVMEDVNSSTEVTTEVEPTTGVELTQPPRPAIERRLPGHRPYVKWPGASDKKLWETVNTDLTLTLEKLRGTVEKKLERMGDIIYEYGAESFGVQEAKGGRKVPTPPVSRRQQEIKRLVQERRQLKKQWKKASEVEKEGIEALQADIKTRLASLRRAENLRKHRRKKEQTRTRFYKDPFKFLKSLFTKEKSGVLKTTKKDLEEHMRTTNFDSKRHEHLAIPSDIPPIEPPEHHIETSPPTWKEVENKVRRARTASAPGPNGVPYKVYKNAPDVLRFLWRLMRTAWQKKIIPKVWRRAGGVLIPKEKDAVNISQFRPISLLNVEGKIFFRIIAQRMAEYLQRNAYVDTSVQKAGISGFSGCLEHSSMIWHQIQMAKVEKRDLHVVFLDLANAFGSVPHELLWSAFRFFHIPDTITTLVKSYFQDLQFCFTTSEFTTSWQCLNVGIMAGCTISPLAFIMAMEVIIRSSKWVAGGQRVDSGFRLPPLRAYMDDITTLTTTVPCTRRLLRKLEENISWARMKIKPSKSRSISIVKGVLCDLKFFIGDDQIPTVSEQPVKSLGRWYDASLKDKDQVQQLRKDISSSLQSIDNTQLPGKLKAWCLQFGLLPRVLWPLAVYEVPISTVEKMERGATSYLKKWLGVPRCLTTIGLYGDGVLKLPLTSLTEEFKCAKTRLQMTLNESRDPVVSNNAPTLAIGRKWRPGKAVQEATAALRHADIVGHVQQGRGGLGLTSRAAWSKATAPERRKMVVQEVRHQEEAARWAKAVSLAKQGQWTRWDSVEKRKISWKDLWATEARRLSFSIRATYDILPTPVNLHQWYGEDPDCALCSMPANLRHILTGCKTSLTQGRYTWRHNQVLKNLASALEDKQAATNSLPPPAASHPLRTTFVREGAKPPKSGSTPIERDQLRLARDWKMLADIGRQLVFPPEIATTTLRPDVVLWSRSLKKVFIIELTVPWEDSVDEAYERKHLRYADLAAEAQHHGWNTEVRPVEVGCRGFMATSTTRLLRDLGIKGQSQRSAIKAVSEAAEGSSQWLWMKRKDPSWAPK

SEQ ID NO: 26542 - protein, 1063 aa, Entosphenus tridentatus
MEDVNSSTEVTTEVEPTTGVILTQPPRSAVERRLPGHRPYVKWPGASDKKLWETVNTDLTLTLEKLRGTVEKKLERMGDIIYEYGAESLGVQEAKGGRNVPTPPVSRRQQEIKRLVQERRQLKKQWKKASEVEKEGIEALQADIKTRLASLRRAENLRKRRRKKEQTRTRFYKDPFKFLKSLFTKEKSGVLKTTKKDLEEHLRTTNFDSKRHEHLAIPSDNTPIEPPEHHIEITPPTWKEVENTVRRARTASAPGPNGVPYKVYKNAPDVLRFLWRLMRTAWQKKIIPKVWRRAGGVLIPKEKDALNISQFRPISLLNVEGKIFFRVIAQRMAEYLQRNVYVDTSVQKAGISEFSGCLEHSSMILHQIQMAKVEKRDLHVVFLDLANAFGSVPHELLWSAFRFFHIPDTITTLVKSYFQDLQFCFTTSEFTTSWQCLNVGIMAGCTISPLAFIMAMEVIIRSSKWVAGGQRVDSGFRLPPLRAYMDDITTLTTTVPCTRRLLRKLEKNISWARMKIKPSKSRSISIVKGVLCDLKFFIRDDQIPTVSEQPVKSLGRWYDASLKDKDQVQQLRKDISSSLQSIDNTQLPGKLKAWCLQFGLLPRVLWPLAVYEVPISIVEKMERGVTGYLKKWLGVPRCLTTIGLYGDGVLKLPLTSLTEEFKCAKTRLQMTLNESRDPVVSNNAPTLATGRELRPGKAVQEATAALRHADIMGHVQQGRGGLGLTSRAAWSKATAPEQRKMVVQEVRHQEEAARWAKAVYLAKQGQWTRWDSVEKRKISWKDLWAMEARRLSFFIRATYDVLPTPVNLHQWYGEDPDCALCSMPANLRHIITGCKTSLTQGRYTWRHNQVLKNLASALDDKRAATNSLPPPAASHPLRTTFVREGAKPPKSGSTPLERDQLRLARDWKMLADIGRQLVFPPEIATTTLRPDMVLWSRSLKKVFIIELTVPWEDSVDEAYERKHLRYADLAAEARHHGWNTEVRPVEVGCRGVVATSTTRLLRDLGIKGQSQRSAIRAVSEAAEGSSQWLWMKRKDPSWAPKWEGQEVCSQQCLTKGGGRPCHA

SEQ ID NO: 26543 - protein, 1142 aa, Salvelinus namaycush
MVTTGPETTTSNESTAQENTTATVTSSAATAGHKQMQVCVCGWRKVTSHHGLRIHQGKKGCLGKERQRPRIDHFLRKRSNQLNEAQQLDANHSLQCINTTVMEDVNSSTEVTTEVEPTTGVELTQPPRPAVERRLPGHRPYVKWPGASDKKLWEAVNTDLTLTLEKLRGTVEKKLERMGDIIYEYGAESFGVQEAKGGRKVPTPPVSRRQQEIKRLVQERRQLKKQWKKASEVEKEGIEALQADIKTRLASLRRAENLRKRRRKKEQTRTRFYKDPFKFLKSLFTKEKSGALKTTKKDLEEHLITTNFDSKRHEHLAIPSDIPPIEPPEHHIETSPPTWKEVENTVRRARTASAPGPNGVPYKVYKNAPDVLRVLWRLMRTAWQKKIIPKVWRRAGGVLIPKEKDAVNISQFRPISLLNVDGKIFFRVIAQRMAEYLQRNAYVDTSVQKAGISGFSGCLEHSSMIWHQIQMAKVEKRDLHVVFLDLANAFGSVPHELLWSAFRFFHIPDTITTLVKSYFQDLQFCFTTSEFTTSWQCLNVGIMAGCTISPLAFIMAMEVIIRSSKWVAGGQRVDSGFRLPPLRAYMDDITTLTTTVPCTRRLLRKLEENISWARMKIKPSKSRSISIVKGVLSDLKFFIGDDQIPTVSEQPVKSLGRWYDASLKDKDQVQQLRKDISSSLQSIDNTQLPGKLKAWCLQFGLLPRVLWPLAVYEVPISTVEKMERGVTGYLKKWLGVPRCLTTIGLYGDGVLKLPLTSLTEEFKCAKTRLQMTLNESRDPVVSNNAPTLATGRKWRPGKAVQEATAALRHADIVGHVQQGRGGLALTSRAAWSKATALERRKMVVQEVRHQEEAARWAKAVSLAKQGQWTRWDSVEKRKISWKDLWAMEARRLSFSIRATYDVLPTPVNLHQWYGEDPDCALCSMPANLRHILTGCKTSLTQGRYTWRHNQVLKNLASALEDKRAATNSLPPTAASHPLRTTFVREGAKPPKSGSTPLERDQLRLARDWKMLADIGRQLVFPPEIATTILRPDMVLWSRSLKKVFIIELTVPWEDSVDEAYERKHLRYADLAAEARHHGWNTEVRPVEVGCRGFVATSTTRLLRDLGIKGQSQRSAIKAVSEAAEGSSQWLWMKRKDPSWAPK

SEQ ID NO: 26544 - protein, 762 aa, Lethenteron reissneri
MRTAWQKKIIPKVWRRAGGVLIPKEKDAVNISQFRPISLLNVEGKIFFRIIAQRMAEYLQRNAYVDTSVQKAGISGFSGCLEHTSMIWHQIQMAKVEKRDLHVVFLDLANAFGSVPHELLWSAFRFFHIPDTITTLVKSYFQDLQFCFTTSEFTTSWQCLNVGIMAGCTISPLAFIMAMEVIIRSSKWVAGGQRVDSGFRLPPLRAYMDDITTLTTTVPCTRRLLRKLEENISWARMKIKPSKSRSISIVKGVLCDLKFFIGDDQIPTVSEQPVKSLGRWYDASLKDKDQVQQLRKDISSSLQSIDNTQLPGKLKAWCLQFGLLPRVLWPLAVYEVPISTVEKMERGATSYLKKWLGVPRCLTTIGLYGDGVLKLPLTSLNEEFKCAKTRLQMTLNESRDPVVSNNAPTLATGRKWRPGKAVQEATAALRHADIVGHVQQGRGGLGLTSRAAWSKATAPERRKMVVQEVRHQEEAARWAKAVSLAKQGQWTRWDSVEKRKISWKDLWATEARRLSFSIRATYDILPTPVNLHQWYGEDPDCALCSMPANLRHILTGCKTSLTQGRYTWRHNQVLKNLASALEDKRAATNSLPPPAASHPTTFVREGAKPPKSGSTPIERDQLRLARDWKMLADIGRQLVFPPEIATTTLRPDVVLWSRSLKKVFIIELTVPWEDSVDEAYERKHLRYADLAAEARHHGWNTEVRPVEVGCRGFVATSTTRLLRDLGIKGQSQRSAIKAVSEAAEGSSQWLWMKRKDPSWAPK

SEQ ID NO: 26545 - protein, 764 aa, Lethenteron reissneri
MRTAWQKKIIPKVWRKAGGVLIPKEKDAVNISQFRPISLLNVEGKIFFRIIAQRMAEYLQRNAYVDTSVQKAGISGFSGCLEHSSMIWHQIQMAKVEKRDLHVVFLDLANAFGSVPHELLWSAFRFFHIPDTITTLVKSYFQDLQFCFTTSEFTTSWQCLNVGIMAGCTISPLAFIMAMEVIIRSSKWVAGGQRVDSGFRLPPLRAYMDDITTLTTTVPCTRRLLRKLEENISWARMKIKPSKSRSISIVKGVLCDLKFFIGDDQIPTVSEQPVKSLGRWYDASLKDKDQVQQLRKDISSSLQSIDNTQLPGKLKAWCLQFGLLPRVLWPLAVYEVPISTVEKMERGATSYLKKWLGVPRCLTIIGLYGDGVLKLPLTSLTEEFKCAKTRLQMTLNESRDPVVSNNAPTLATGRKWRPGKAVQEATAALRHADIVGHVQQGRGGLGLTSRAAWSKATAPERRKMVVQEVRHQEEAARWAKAVFLAKQGQWTRWDSVEKRKISWKDLWAMEARRLSFSIRATYDILPTPVNLHQWYGEDPDCALCSMPANLRHILTGCKTSLTQGRYTWRHNQVLKNLASALEDKRAATNSLPPPAASHPLRTTFVREGAKPPKSGSTPIERDQLRLARDWKMLADIGRQLVFPPEIATTTLRPDMVLWSRSLKKVFIIELTVPWEDSVDEAYERKHLRYADLAAEARHHGWNTEVRPVEVGCRGFVATSTTRLLRDLGIKGQSQRSAIKAVSEAAEGSSQWLWMKRKDPSWAPK

SEQ ID NO: 26546 - protein, 1179 aa, Lethenteron reissneri
MLRSMLETPALATESQHTRIPLESARAGAEDDSSTDNMVTTGPETTTSNESTAQENTTATVTSSAAKVGHKQMQVCVCGWRKVTSHHGLRIHQGKKGCLGKERQRPRIDYFLRKRSNQSNEAQQLDANHSLQCISTTVMEDVNSSTEVTTEVEPTTGVELTQPPRPAIERRLPGHRPYVKWPGASDKKLWETVNTDLTLTLEKLRGTVEKKLERMGDIIYEYGAESFGVQEAKGGRKVPTPPVSRRQQEIKCLVQERRQLKKQWKKASEVEKEGIEALQADIKTRLASLRRAENLRKRRRKKEQTRTRFYKDPFKFLKSLFTKEKSGVLKTTKKDLEEHLRTTNFDSKRHEHLAIPSDIPPIEPPEHHIETSPPTWKEVENTVRRARTASAPGPNGVPYKVYKNAPDVLRFLWRLMRTAWQKKIIPKVWRRACGVLIPKEKDAVNISQFRPISLLNVEGKIFFRIIAQRMAEYLQRNAYVDTSVQKAGISGFSGCLEHSSMIWHQIQMAKVEKRDLHVVFLDLANAFGSVPHELLWSAFRFFHIPDTITTLVKSYFQDLQFCFTTSEFTTSWQCLNVGIMAGCTISPLAFIMAMEVIIRSSKWVAGGQRVDSGFRLPPLRAYMDDITTLTTTVPCTRRLLRKLEENISWARMKIKPSKSRSISIVKGVLCDLKFFIGDDQIPTVSEQPVKSLGRWYDASLKDKDQVQQLRKDISSSLQSIDNTQLPGKLKAWCLQFGLLPRVLWPLAVYEVPISTVEKMERGATSYLKKWLGVPRCLTTIGLYGDGVLKLPLTSLTEEFKCAKTRLQMTLNESRDPVVSNNAPTLATGRKWRPGKAVQEATAALRHADIVGHVQQGRGGLGLTSHAAWSKATAPERRKMVVQEVRHQEEAARWAKAVSLAKQGQWTRWDSVEKRKISWKDLWAMEARRLSFSIRATYDILPTPVNLHQWYGEDPDCALCSMPANLRHILTGCKTSLTQGRYTWRHNQVLKNLASALEDKRAATNSLPPPAASHPLRTTFVREGAKPPKSGSTPIERDQLRLARDWKMLADIGRQLVFPPEIATTTLRPDMVLWSRSLKKVFIIELTVPWEDSVDEAYERKHLRYADLAAEARHHGWNTEVRPVEVGCRGFVATSTTRLLRDLGIKGQSQRSAIKAVSEAAEGSSQWLWMKRKDPSWAPK

SEQ ID NO: 26547 - protein, 1158 aa, Lethenteron reissneri
MLRSMLETPDLATESQHTRIPLESARAGAEDDSSTDKMVTTGPETTTSNESTAQENTTATVTSSAATAGHKQMQVCVCGWRKVTSHHGLRIHQGKKGCLGKERQRPRIDYFLRKRSNQSNEAQQLDANHSLQCISTTVMEDVNSSTEVTTEVEPTTGVELTQPPRPAVERRLPGHRPYVKWPGASDKKLWETVNTDLTLTLEKHRGTVEKKLERMGDIIYEYGAESFGVQEAKGGRKVPTPPVSRRQQEIKRLVQERRQLKKQWKKASEVEKEGIEALEADIKTRLASLRRAENLRKRRRKKEQTRTRFYKDPFKFLKSLFTKEKSGVLKTTKKNLEEHLRTTNFDSKRHEHLAIPSDIPPIEPPEHHIETSPPTWKEVENTVRRARTASALGPNGVPYKVYKNAPDVLRFLWRLMRTAWQKKIIPKVWRRAGGVLIPKEKDAVNISQFCPISLLNVEGKIFFRVIAQRMAEYLQRNAYVDTSVQKAGISGFSGCLEHSSMIWHQIQMAKVEKRDLHVVFLDLANAFGSVPHELLWSAFRFFHIPDTITTLVKSYFQDLQFCFTNSEFTTSWQCLNVGIMAGCTISPLAFIMAMEVIIRSSKWVAGGQRVDSGFRLPPLRAYMDDITTLTTTVPCMRRLLKKLEENISWARMKIKPSKSCSISIVKGVLCDLKFFIGDDQIPTVSEQPVKSLGRWYDASLKDKDQVQQLRKDISSSLQSIDNTQLPGKLKAWCLQFGLLPRVLWPLAVYELPISTVEKMERGVTSYLKKWLGVPRCLTTIGLYGDGVLKLPLTSLTEEFKCAKTRLQMTLNESRDPVVSNNAPTLATGRKWRPGKAVQEATAALRHADIVGHVQQGRGGLGLTSRAAWSKATTPERRKMVVQEVRHHEEAARWAKAVSLAKQGQWTRWDSVEKRKISWKDLWAMEARRLSFSIRATYDVLPTPVNLHQWYGEDPDCALCSMPANLRHILTGCKTSLTQGRYTWRHNQVLKNLASVLEDKRAATNSLPPPAASHPSRTTFVREGAKPPKSGSTPIERDQLRLARDWKMLADIGPQLVFPPEIATTTLRPEMVLWSRSLKKVFIIELTVPWEDSVDEAYERKCLRYAGTQKSDQWRWAAEVLWQHLQPDCLETWELRARASVRQSELYWRRQKAAVSGSG

SEQ ID NO: 26548 - protein, 1179 aa, Lethenteron reissneri
MLRSMLETPALATESQHTRIPLESARAGAEDDSSTDNMVTTGPETTTSNESTAQENTTATVTSSAAKVGHKQMQVCVCGWRKVTSHHGLRIHQGKKGCLGKERQRPRIDYFLRKRSNQSNEAQQLDANHSLQCISTTVMEDVNSSTEVTTEVEPTTRVELTQPPRPAIERRLPGHRPYVKWPGASDKKLWETVNTDLTLTLEKLRGTVEKKLERMGDIIYEYGAESFGVQEAKGGRKVPTPPVSRRQQEIKCLVQERRQLKKQWKKASEVEKEGIEALQADIKTRLASLRRAENLRERRRKKEQTRTRFYKDPFKFLKSLFTKEKSGVLKTTKKDLEEHLRTTNFDSKRHEHLAIPSDIPPIEPPEHHIETSPPIWKEVENTVRRARTASAPGPNGVPYKVYKNAPDVLRFLWRLMRTAWQKKIIPKVWRRAGGVLIPKEKDAVNISQFRPISLLNVEGKIFFRIIAQRMAEYLQRNAYVDTSVQKAGISGFSGCLEHSSMIWHQIQMAKVEKRDLHVVFLDLANAFGSVPHELLWSAFRFFHIPDTITTLVKSYFQDLQFCFTTSEFTTSWQCLNVGIMAGCTISPLAFIMAMEVIIRSSKWVAGGQRVDSGFRLPPLRAYMDDITTLTTTVPCTRRLLRKLEENISWARMKIKPSKSRSISIVKGVLCDLKFFIGDDQIPTVSEQPVKSLGRWYDASLKDKDQVQQLRKDIRSSLQSIDNTQLPGKLKAWCLQFGLLPRVLWPLAVYEVPISTVEKMERGATSYLKKWLGVPRCLTTIGLYGDGVLKLPLTSLTEEVKCAKTRLQMTLNESRDPVVSNNAPTLATGRKWRPGKAVQEATAALRHADIVGHVQQGRGGLGLTSHAAWSKATAPERRKMVVQEVRHQEEAARWAKAVSLAKQGQWTRWDSVEKRKISWKDLWAMEARRLSFSIRATYDILPTPVNLHQWYGEDPDCALCSMPANLRHILTGCKTSLTQGRYTWRHNQVLKNLASALEDKRAATNSLPPPAASHPLRTTFVREGAKPPKSGSTPIERDQLRLARDWKMLADIGRQLVFPPEIATTTLRPDMVLWSRSLKKVFIIELTVPWEDSVDEAYERKHLRYADLAAEARHHGWNTEVRPVEVGCRGFVATSTTRLLRDLGIKGQSQRSAIKAVSEAAEGSSQWLWMKRKDPSWAPK

SEQ ID NO: 26549 - protein, 957 aa, Oncorhynchus mykiss
MGDIIYEYGTERFGVEEAKGGRKVPTPPVSRRQQEIKRLVQERRQLKKQWKKASEVEKEGIEALQADIKTRLASLRRAENLRKRRRKKEQTRTRFYKDPFKFLKSLFTKEKSGALKTTKKDLEEHLRTTNFDSKRHEHLAIPSDIPPIEPPEHHIETSPPTWKEVENTVRRARTASAPGPNGVPYKVYKNAPDILRFLWRLMRTAWKNKIIPKVWRRAGGVLIPKEKDAVNISQFRPISLLNVEGKIFFRVIAQRMAEYLQRNAYVDTSVQKAGISGFSGCLEHSSMIWHQIQMAKVEKRDLHVVFLDLTNAFGSVPHELLWSAFRFFHIPDTITTLVKSYFQDLQFCFTTSEFTTSWQCLNVGIMAGCTISPLAFIMAMEVIIRSSKWVAGGQRVDSGFRLPPLRAYMDDITTLTTTVPCTRRLLRKLEENISWARMKIKPSKSRSLSIVKGVLSDLKFFIGDDQIPTVSEQPVKSLGRWYDASLKDKDQVQQLRKDISSSLQSIDNTQLPGKLKAWCLQFGLLPRVLWPLAVYEVPISTVEKMERGVTGYLKKWLGVPRCLTTIGLYGDGVLKLPLTSLTEEFKCSKTRLQMTLNESRDPVVSNNAPTLATGRKWRPGKAVQEATAALRHADIVGHVQQGRGGLGLTSRAAWSEATAPERRKMVVQEVRHQEEAARWAKAVSLSKQGQWTRWDSVEKRKISWKDLWAMEARRLSFSIRATYDVLPTPVNLNQWYGEDPDCALCSMPANLRHILTGCKTSLTQGRYTWRHNQVLKNLASALEDKRAATNSLPPPAASHPLRTNFVREGAKPPKRGSTPLERDQLRLARDWKMLADIGRQLVFPPEIATTTLRPDMVLWSRSLKKVFIIELTVPWEDSVDEAYERKHLRYADLAAEARHHGWNTEVRPVEVGCRGFVATSTTRLLRDLGIKGQSQRSAIKAVSEAAEGSSQWLWAPK

SEQ ID NO: 26550 - protein, 1179 aa, Lethenteron reissneri
MLRSMLETPDLATESQHTRIPLESARAGAEDDSSTDNMVTTGPETTTSNESTAQENTTATVTSSAATAGHKQMQVCVCGWRKVTSHHGLRIHQGKKGCLGKERQRPRIDYFLRKRSNQSNEAQQLDANHSLQCISTTVMEDVNSSTEVTTEVEPTTGVELTQPPRPAIERRLPGHRPYVKWPGASDKKLWETVNTDLTLTLEKLRGTVEKKLERMGDIIYEYGAESFGVQEAKGGRKVPTPPVSRRQQEIKRLVQERRQLKKQWKKASEVEKEGIEALQADIKTRLASLRRAENLRKRRRKKEQTRTRFYKDPFKFLKSLFTKEKSGVLKTTKKDLEEHLRTTNFDSNRHEHLSIPSDIPPIEPPEHQIETSPPTWKEVENTVRRAHTASAPGPNGVPYKVYKNAPDVLRFLWRLMRTAWQKKIIPKVWRRAGGVLIPKEKDAVNISQFRPISLLNVEGKIFFRIIAQRMAEYLQRNAYVDTSVQKAGISGCSGCLEHSSMIWHQIQMAKVEKRDLHVVFLDLANAFGSVPHELLWSAFRFFHIPDTITTLVKSYFQDLQFCFTTSEFTTSWQCLNVGIMAGCTISPLAFIMAMEVIIRSSKWVAGGQRVDSGFRLPPLRAYMDDITTLTTTVPCTRRLLRKLEENISWACMKIKPSKSRSISFVKGVLCDLKFFIGDDQIPTVSEQPVKSLGRWYDASLKDKDQVQQLRKDISSSLQSIDNTQLPGKLKAWCLQFGLLPRVLWPLAVYEVPISTVEKMERGATSYLKKWLGVPRCLTTIGLYGDGVLKLPLTSLTEEFKCAKTRLQMTLNESRDPVVSNNAPTLATGRKWRPGKAVQEATAALRHADIVGHVQQGRGGLGLTSRAAWSKATAPERRKMVVQEVRHQEEAARWAKAVSLAKQGQWTRWDSVEKRKISWKDLWATEARRLSFSIRATYDILPTPVNLHQWYGEDPDCALCSMPANLRHILTGCKTSLTQGRYTWHHNQVLKNLASALEDKRAATNSLPPPAASHPLRTTFVREGAKPPKSGSTPIEQDQLRLARDWKMLADIGRQLVFPPEIATTTLRPDVVLWSRSLKKVFIIELIVSWEDSVDEAYERKHLRYADLAAEARHHGWNTEVRPVEVGCRGFVATSTTRLLRDLGIKGQSQRSAIKAVSEAAEGSSQWLWMKRKDPSWAPK

SEQ ID NO: 26551 - protein, 1179 aa, Lethenteron reissneri
MLRSMLETPDLATESQHTRIPLESARAGAEDDSSTDNMVTTGPETTTSNESTAQENTTATVTSSAATAGHKQMQVCVCGWRKVTSHHGLRIHQGKKGCLGKERQRPRIDYFLRKRSNQSNEAQQLDANHSLQCISTTVMEDVNSSTEVTTEVEPTTGVELTQPPRPAIERRLPGHRPYVKWPGASDKKLWETVNTDLTLTLEKLRGTVEKKLERMGDIIYEYGAESFGVQEAKGGRKVPTPPVSRRQQEIKRLVQERRQLKKQWKKASEVEKEGIEALQADIKTRLASLRRAENLRKRRRKKEQTRTRFYKDPFKFLKSLFTKEKSGVLKTTKKDLEEHLRTTNFDSKRHEHLAIPSDIPPIEPPEHHIETSPPTWKEVENTVRRARTASAPGPNGVPYKVYKNAPDVLRFLWRLMRTALQKKIIPKVWCRAGGILIPKEKDAVNISQFRPISLLNVEGKIFFRIIAQRMAEYLQRNAYVDTSVQKAGISGFSGCLEHSSMIWHQIQMAKVEKRDLHVVFLDLANAFGSVPHELLWSAFRFFHIPDTITTLVKSYFQDLQFCFTTSEFTTSWQCLNVGIMAGCTISPLAFIMAMEVIIRSSKWVAGGQRVDSGFRLPPLRAYMDDITTLTTTVPCTRRLLRKLEENISWARMKIKPSKPRSISIVKGVLCDLKFFIGDDQIPTVSEQPVKSLGRWYDASLKDKDQVQQLRKDISSSLQSIDNTQLPGKLKAWCLQFGLLPRVLWPLAVYEVPISTVEKMERGATSYLKKWLGVPRCLTTIGLYGDGVLKLPLTSLTEEFKCAKTRLQMTLNESRDPVVSNNAPTLATGRKWRPGKAVQEATAALRHADIVGHVQQGRGGLGLTSRAAWSKATAPERRKMVVQEVRHQEEAARWAKAVSLAKQGQWTRWDSVEKRKISWKDLWAMEARQLSFSIRATYDIHPTPVNLHQWYGEDPDCALCSMPANLRHILTGCKTSLTQGRYTWRHNQVLKNLASALEDKRAATNSLPPPAASHPLQTTFVREGAKPPKSGSTPIERDQLRLARDWKMLADIGRQLVFPPEIATTTLRPDMVLWSRSLKKVFIIELTVPWEDTVDEAYERKHLRYADLAAKARHHGWNTEVRPVEVGCRGFVATSTTRLLRDLGIKGQSQRSAIRAVSEAAEGSSQWLWMKRKDPSWAPK

SEQ ID NO: 26552 - protein, 1088 aa, Salvelinus namaycush
MLRSMLETPALATESQHTRIPLESARAGAEDDSSADNMVTTGPETTTSSAVTSSPATAGHKQMQVCVCGWRKVTSHHGLRIHQGKKGCLGKERQRPRIDHFLRKRSNQSNEAQQLDANHSLQCISTTVMEDVNSSTEVTTEVEPTTGVELTQPPRPAVERRLPGHRPYVKWPGASDKKLWEAVNTDLTLTLEKLRGTVEKKLERMGDIIYEYGAESFGVQEAKGGRKVPTPPVSRRQQEIKRLVQERRQLKKQWKKASEVEKEGIEALQADIKTRLASLRRAENLRKRRRKKEQTRTRFYKDPFKFLKSLFTKEKSGALKTTKKDLEEHLITTNFDSKRHEHLAIPSDIPPIEPPEHHIETSPPIWKEVENTVRRARTASAPGPNGVPYKVYKNAPDVLRFLWRLMRTAWQKKIIPKVWRRAGGVLIPKEKDAVNISQFRQISLLNVEGKIFFRVIAQRMAEYLQRNAYVDTSVQKAGISGFSGCLEHSSMIWHQIQMAKVEKRDLHVVFLDLANAFGSVPHELLWSAFRFFHIPDTITTLVKSYFQDLQFCFTTSEFTTSWQCLNVGIMAGCTISPLAFIMAMEVIIRSSKWVAGGQRVDSGFRLPPLRAYMDDITTLTTTVPCTRRLLRKLEENISWARMKIKPSKSRSISIVKGVLSDLKFFIGDDQIPTVSEQPVKSLGRWYDASLKDKDQVQQLRKDISSSLQSVDNTQLPGKLKAWCLQFGLLPRVLWPLAVYEVPISTVEKMERGVTGYLKKWLGVPRCLTTIGLYGDGVLKLPLTSLTEEFKCAKTRLHMTLNESRDPVVSNNAPTLATGHKWRPGKAVQEATAALRHADIVGHIQQGRGGLGLTSRAAWSKATAPERRKMVVQEVRHQEEAERWAKAVSLAKQGQWTRWDSVEKRKISWKDLWAMEARRLSFSIRATYDVLPTPVNLHQWYGEDPDCALCSMSANLRHILTGCKTSLTQGRYTWRHNQVLKNLASALEDKRAATNSLPPPAASHPLRTTFVRGGAKPPKSGSTPLERDQLRLARDWKMLADIGRQLVFPPEIATTTLRPDMVLWSRSLKKVFIIELTVPWEDSVDEAYE

SEQ ID NO: 26553 - protein, 1177 aa, Oncorhynchus kisutch
MRRSMLETPALATESQHTRIPLESARAEDDSSADNMVTTGPETTTSNESTAQENTTATVTSSAATAGHKQMQVCVCGWRKVTSHHGLRIHQGKKGCLGKERQRPRIDYFLRKRSNQSNEAQQLDANHSLQCISTTVMEDVNSSTEVTTEVEPTTGVELTEPPRPVVERRLPGHRPYVKWPGASDKKLWETVNTDLTLTLEKLRGTVEKKLERMGDIIYEYGTERFGVEEAKGGRKVPTPPVSRRQQEIKRLVQERQQLKKQWKKASEVEKEGIEALQADIKTRLASLRRAENLRKRRRKKEQTRTRFYKDPFKFLKSLFTKEKSGALKTTKKDLEEHLRTTNFDSKRHEHLAIPSDIPPIETTEHHIETSPPTWKEVENTVRGARTASAPGPNGVPYKVYKNAPDVLRFLWRLMRTAWKNKIIPKVWRRAGGVLIPKEKDAVNISQFRPISLLNVEGKIFFRVIAQRMAEYLQRNAYVDTSVQKAGISGFSGCLEHSSMIWHQIQMAKVEKRDLHVVFLDLANAFGSVPHELLWSAFIFFHIPDTITTLVKSYFQDLQFCFTTSEFTTSWQCLNVGIMAGCTISPLAFIMAMEVIIRSSKWVAGGQRVDSGFRLPPLRAYMDDITTLTTTVPCTRRLLRKLEENISWARMKIKPSKSRSISIVKGVLSDLKFFIGDDQIPTVSEQPVKSLGRWYDASLKDKDQVQQLRKDISSSLQSIDNTQLPGKLKAWCLQFGLLPRVLWPLAVYEVPISTVEKMERGVTGYLKKWLGVPRCLTTIGLYGDGVLKLPLTSLTEEFKCSKTRLQMTLNESRDPVVSNNAPNLATGRKWRPGKAVQEATAALRHADIVDHVQQGRGGLGLTSRAAWSKATAPERRKMVVQEVRHQEEAARWAKAVSLSKQGQWTRWDSVEKRKISWKDLWAMEARRLSFSIRATYDVLPTPVTLHQWYGEDPDCALCSMPANLRHILTGCKTSLTQGRYTWRHNQVLKNLASALEDKRAASNSLPPPAASHPLRTNFVREGAKPPKRGSTPLERDQLRLARDWKMLADIGRQLVFPPEIATTTLRPDMVLWSRSLKKVFIIELTVPWEDSVDEAYERKHLRYADLAAEARHHGWNTEVRPVEVGCRGFVATSTTRLLRDLGIKGQSQRSAIKAVSEAAEGSSQWLWMKRKDPSWAPK

SEQ ID NO: 26554 - protein, 1179 aa, Lethenteron reissneri
MLRSMLETPDLATESQHTRIPLESARAGAEDDSSTDNMVTTGPETTTSNESTAQENTTATVTSSAATAGHKQMQVCVCGWRKVTSHHGLRIHQGKKGCLGKERQRPRIDYFLRKRSNQSNEAQQLDANHSLQCISTTVMEDVNSSTEVTTEVEPTTGVELTQPPRPAIERRLPGHRPYVKWPGASDKKLWETVNTDLTLTLEKLRGTVEKKLERMGDIIYEYGAESFGVQEAKGGRKVPTPPVSRRQQEIKRLVQERRQLKKQWKKASEVEKEGIEALQADIKTRLASLRRAENLRKRRRKKEQTRTRFYKDPFKFLKSLFTKEKSGVLKTTKKDLEEHLRTTNFDSKRHEHLAIPSDIPPIEPPEHHIETSPPTWKEVENTVRRARTASAPGPNGVPYKVYKNAPDVLRFLWRLMRTAWQKKIIPKVWRRAGGVLIPKEKDAVNISQFRPISLLNVEGKIFFRIIAQRMAEYLQRNAYVDTSVQKAGISGFSGCLEHSSMIWHQIQMAKVEKRDLHVVFLDLANAFGSVPHELLWSAFRFFHIPDTITTLVKSYFQDLQFCFTASEFTTSWQCLNVGIMAGCTISPLAFIMAMEVIIRSSKWVAGGQRVDSGFCLPPLRAYMDDITTLTTTVPCTRRLLRKLEENISWARMKIKPSKSRSISIVKGVLCDLKFFIGDDQIPTVSEQPVKSLGRWYDASLKDKDQVQQLRKDISSSLQSINNTQLPGKLKAWCLQFGLLPRVLWPLAVYEVPISTVEKMERGATSYLKKWLGVPRCLTTIGLYGDGVLKLPLTSLTEEFKCAKTRLQMTLNESRDPVVSNNAPTLATGRKWRPGKAVQEATAALRPADIVGHVQQGRGGLGLTSRAAWSKATAPERRKMVVQEVRHQEEAARWAKAVSLAKQGQWTRWDSVEKRKISWKDLWAMEARRLSFSIRATYDILPTPVNLHQWYGEDPDCALCSMPANLRHILTGCKTSLTQGRYTWRHNQVLKNLASALEDKRAATNSLPPPAASHPLRTTFVREGAKPPKSGSTPIERDQLRLARDWKMLADIGRQLVFPPEIATTTLRPDMVLWSSSLKKVFIIELTVPWEDSVDEAYEQKHLRYADLAAEARHHGWNTEVRPVEVGCRGFVATSTTRLLRDLGIKGQSQRSAIRAVSEAAEGSSQWLWMKRKDPSWAPK

SEQ ID NO: 26555 - protein, 969 aa, Lethenteron reissneri
MLLERMGDIYEYGAERFGVQEANGGRKVPTPPVSRRQQEIKRLVQERRQLKKQWKKVSEVEKEGIEALQADIKTRLASLRRAENLRKRRRKKEQTRTRFYKDPFKFLKSLFTKEKSGVLKTTKKYLEEHLRTTNFDSKRHEHLAIPSDIPPIEPPEHHIETSPPTWKEVENTVRRARTASAPGPNGVPYNVYKNAPDVLRFLWRLMRTAWQKKIIPKVWRRAGGVLIPKEKDAVNISQFRPISLLNVEGKIFFRIITKRMAEYLQRNAYVDTSVQKAGISGFSGCLEHSSMIWHQIQMAKVEKRDLHVVFLDLANAFGSVPHELLWSAFRFFHIPDTITTLVKSYFQDLQFCFTTSEFTTSWQCLNVGIMAGCTISPLAFIMAMEVIIRSSKWVAGGQRVDSGFRLPPLRAYMDDITTLTTTVPCTRRLLRKLEENISWARMKIKPSKSRSISIVKGVLCDLKFFIGDDQIPTVSEQPVKSLGRWYDASLKDKEQVQQLRKDFSSSLQSIDNTQLPGKLKAWCLQFGLLPRVLWPLAVYEVPISTVEKMERGATSYLKKWLGVPRCLTTIGLYGDGVLKLPLTSLTEEFKCAKTRLQMTLNESRDPVVSNNAPTLATGCKWRPGKAVQEATAALRHADIVGHVQQGRGGLGLTSRAAWSKATAPERRKMVVQEVRHQEEAARRAKAVSLAKQGQWTRWDSVEKRKISWKDLWATEARRLSFSIRATYDILPTPVNLHQWYGEDPDCALCSMPANLRHILTGCKTSLIQGRYTWRHNQVLKNLASALEDKRAATNSLPPPAASHPLRTTFVREGAKPPKSGSTPIERDQLRLARDWKMLADIGRQLVFPPEIATTTLRPDVVLWSRSLKKVFIIELTVPWEDSVDEAYERKHLRYADLAAEARHHGWNTEVRPVEVECRCFVATSTTRLLRDLGIKGQSQRSAIKAVSEAAEGSSQWLWMKRKDPSWAPK

SEQ ID NO: 26556 - protein, 1131 aa, Oncorhynchus mykiss
MRAQHKRTPQQLSQVLQRTAGHKEMQVCVCGWRKVTSHHGLRIHQGKKGCLGKERQRPRIDYFLRKRSNQSKEAQQLDANHSLQCISTTVMEDINSSTEVTTEVEPTTGVELTEPPRPAVERRLPGHRPYVKWPGASDKKLWETVNTDLTLTLEKLRGTVEKKLERMGDIIYEYGTERFGVEEAKGGRKVPTPPVSRRQQEIKRLVQERRQLKKQWKKASEVEKEGIKALQADIKTRLASLRRAENLRKRRRKKEQTRTRFYKDPFKFLKSNFTKEKSGALKTTKKDLEEHLRKTNFDSKRHEHLAIPSDIPPIEPPEHRIETSPPTWKEVENTVRRARTASAPGPNGVPYKVYKNAPDVLRFLWRLMRTAWKNKIIPKVWRRAAGVLIPKEKDAVNISQFRPISLLNVEGKIFFRVIAQRMAEYLQRNAYVDTSVQKAGISGFSGCLEHSSKIWHQIQMAKVEKRDLHVVFLDLSNAFGSVPHELLWSAFRLFHIPDTITTLVKSYFQDLQFCFTTSEFTTSWQCLNVGIMAGCTISLLTFIMAMEVIIRSSKWVAGGQRVDSGFRLPPLRAYMDDITTLTTTVPCTRRLLRKLEENISWARMKIKPSKSRSISIVKGVLSDLKFFIGDDQIPTVSEQPLKSLGRWYDASLKDKDQVQQLRKDISSSLQSINNTQLPGKLKAWCLQFGLLPRVLWPLAVYEVPISTVEKMERGVTGYLKKWLGVPRCLTTIGLYGDGVLKLPLTSLTEEFKCSKTRLQMTLNESRDPVVSNNAPTLATGCKWRPGKAVQEATAALRHADNVGHVQQGRGGLGLTSRAAWSKATAPERQKMVVQEVRHQEEAARWAKAVSLSKQGQWTRWDSVEKRKISWKDLWAMEARRLSFSIRATYDILPTPVNLHQWYGEDPDCALCSMPANLRHILTGCKTSLTQGRYTWRHNQVLKNLASALEDKRAATNSLPPPAASHPLRTNFVREGAKPPKRGSTPLERDQLLLARDWKMLADIGRQLVFPPEIATTTLRPDMVLWSRSLKKVFIIELTVPWEDSVDEAYERKHLRYADLAAEARHHGWHTEVRPVEVGCRGFVATSTTRLLRDLGIKGQSQRSAIKAVSEAAEGSSQWLWMKRKDPSWAPK

SEQ ID NO: 26557 - protein, 1094 aa, Lethenteron reissneri
MHHGLRIHQGKKGCLGKERQRPRIDYFLRKRSNQSNEAQQLDANHSLQCISTTVMEDVNSSTEVTTEVEPTTGVELTQPPRPAIERRLPGHRPYVKWPGASDKKLWETVNTDLTLTLEKLRGTVEKKLERMGDIIYEYGAESFGVQEAKGGRKVPTPPVSRRQQEIKRLVQERRQLKKQWKKASEVEKEGIEALQADIKTRLASLRRAENLRKRRRKKEQTRTRFYKDPFKFLKSLFTKEKSGVLKTTKKDLEEHLRTTNFDSKRHEHLAIPSDIPPIEPPEHHIDTSPPTWKEVENTVRRARTASAPGPNGVPYKVYKNAPDVLRFLWRLMRTAWQKKIIPKVWRRAGGVLIPKEKDAVNISQFRPISLLNVEGKIFFRIIAQRMAEYLQRNSYVDTSVQKAGISGFSGCLEHSSMIWHQIQMVKVEKRDLQVVFLDLANAFGSVPHGLLWSAFRFFHIPDTITTLVKSYFQDLQFCFTTSEFTTSWQCLNVGIMAGCTISPLAFIMAMEVIIRSSKWVAGGQRVDSGFRLSPLRAYMDDITTLTTTVPCTRRLLRKLEENISWARMKIKPSKSRSISIVKGVLCDLKFFIGDDQIPTVSEQPVKSLGRWYDASLKDKDQVQQLRKDINSSLQSIDNTQLPGKLKTWCLQFGLLPRVLWPLAVYEVPISTVEKMERGATSYLKKWLEVPRCLTTIGLYGDGVLKLPFASLTEEFKCAKTRLQMTLNESRDPVVSNNAPTLATGRKWRPGKAVQEATAALRHADIVGHVQQGRGGLGLTSRAAWSKATAPERRKMVVQEVRHQEEAARWDKAVSLAKQGQWTRWDSVEKRKISWKDLWAMEARRLSFSIRATYDILPTPVNLHQWYGEDPDCALCSMQANLRHILTGCKTSLTQGRYTWRHNQVLKNLASALEDKRAATNSLPPPAASHPLRTTFVREGAKPPKSGSTPIERDQLRLARDWKMLADIGRQLVFPPEIATTTLRPDMVLWSHSLKKVFIIELTVPWEDSVDEAYERKHLRYADLAAEAWHHGWNTEVRPVEVGCRGFVATSTTRLLRDLGIKGQSQRSAIKAVSEAAEGSSQWLWMRKDPSWAPK

SEQ ID NO: 26558 - protein, 1179 aa, Lethenteron reissneri
MLRSMLETPDLATESQHTRIPLESARAGAEDDSSTDNMVTTGPETTTSNESTAQENTTATVTSSAATAGHKQMQVCVCGWRKVTSHHGLRIHRGKKGCLGKERQRPRIDYFLRKRSNQSNEAQQLDANHSLQCISTTVMEDVNSSTEVTTEVEPTTGVELTQPPRPAIERRLPGHRPYVKWRGASDKKLWETVNTDLTLTLEKLRGTVEKKLERMGDIIYEYGAESFGVQEAKGGRKVPTPPVSRRQQEIKRLVQERRQLKKQWKKASEVEKEGIEALQADIKTRLASLRRAENLRKRRRKKEQTRTRFYKDPFKFLKSLFTKEKSGVLKTTKKDLEEHLRTTNFDSKRHEHLAIPSDIPPIEPPEHHIETSPPTWKEVENTVRRARTASAPGPNGVPYKVYKNAPDVLRFLWRLMRTAWQKKIIPKVWRRAGGVLIPKEKDAVNISQFRPISLLNVEGKIFFRIIAQRMAEYLQRNAYVDTSVQKAGISGFSGCLEHSSMIWHQIQMAKVEKRDLHVVFLDLANAFGSVPHELLWSAFRFFHIPDTITTLVKSYFQDLQFCFTTSEFTTSWQCLNVGIMAGCTISPLAFIMAMEVIIRSSKWVAGGQQVDSGFRLPPLRAYMDDITTLTTTVPCTRRLLRKLEENISWARMKIKPSKSRSISIVKGVLCDLKFFIGDDQIPTVSEQPVKSLGRWYDASLKDKDQVQQLRKDISSSLQSIDNTQLPGKLKAWCLQFGLLPRVLWPLAVYEVPISTVEKMERGATSYLKKWLGVPRCLTTIGLYGDGVLKLPLTSLTEEFKCAKTRLQMTLNESRDPVVSNNAPTLATGRKWRPGKAVQEATAALRHTDIVGHVQQGRGGLGLTSRAAWSKATAPEWRKMVVQEVRHQEEAARWAKAVSLAKQGQWTRWDSVEKWKISWKDLWATEARRLSFSIRATYDILPTPVNLHQWYGEDPDCALCAMPANLRHILTGCKTSLTQGRYTWRHNQVLKNLASAMEDKRAATNSLPPPAASHPLRTTFVCEGAKPPKSGSTPIERDQLRLARDWKMLADIGRQLVFPPEIATTTLRPDVVLWSRSLKKVFIIELTVPWEDSVDEAYERKHLRYADLAAEARHHGWNTEVRPVEVGCRGFVATSTTRLLRDLGIKSQSQRSAIKAVSEAAEGSSQWLWMKRKDPSWAPK

SEQ ID NO: 26559 - protein, 1179 aa, Lethenteron reissneri
MLRSMLETPDLATESQHTRIPLESARAGAEDDSSTDNMVTTGPETTTRNESTAQENTTATVTSSAATAGHKQMQVCVCGWRKVTSHHGLRIHQGKKGCLGKERQRPRIDYFLRKRSNQSNEAQQLDANHSLQCISTTVMEDVNSSTEVTTEVEPTTGVELTQPPRPAIERRLPGHRPYVKWPGASDKKLWETVNTDLTLTLEKLRGTVEKKLERMGDIIYEYGAESFGVQEAKGGRKVPTPPVSRRQQEIKRLVQERRQLKKQWKKASEVEKEGIEALQADIKTRLASLRRAENLRKRRRKKEQTRTRFYKDPFKFLKSLFTKEKSGVLKTTKKDLEEHLRTTNFDSKRHEHLAIPSDIPPIEPPEHHIETSPPTWKEVENTVRRARTASAPGPNGVPYKVYKNAPDVLRFLWRLMRTAWQKKIIPKVWRRAGGVLIPKEKDAVNISQFRPISLLNVEGKIFFRIIAQRMAEYLQRNAYVDTSVQKAGISGFSGCLEHSSMIWHQIQMAKVEKRDLHVVFLDLANAFGSVPHELLWSAFRFFHIPDTITTLVKSYFQDLQFCFTTSEFTTSWQCLNVGIMAGCTISPLAFIMAMEVIIRSSKWVAGGQRVDSGFRLPPLRAYMDDITTLTTTVPCTRRLLRKLEENISWARMKIKPSKSRSISIVKGVLCDLKFFIGDDQIPTVSEQPVKSLGRWYDASLKDKDQVQQLRKDISSSLQSIDNTQLPGKLKAWCLQFGLLPRVLWPLAVYEVPISTVEKMERGATSYLKKWLGVPRCLTTIGLYGDGVLKLPLTSLTEEFKCAKTRLQMTLNESRDPVVSNNAPTLATGRKWRPGKAVQEATAALRHADIVGHVQQGRGGLGLTSRAAWSKATAPERRKMVVQEVRHQEEAARWAKAVSLAKQGQWTRWDSVEKRKISWKDLWAMEARRLSFSIRATYDILPTPVNLHQWYGEDPDCALCSMPANLRHILTGCKTSLTQGRYTWRHNQVLKNLAFALEDKRAATNSLPPPAASHPLRTTFVREGAKPPKSGSTPIERDQLRLARDWKMLADIGRQLVFPPEIATTTLRPDMVLWSRSLKKVFIIELTVPWEDSVDEAYERKHLRYADLAAEARHHGWNTEVRPVEVGCRGFVATSTTRLLRDLGIKGQSQRSAIKAVSEAAEGSSQWLWMKRKDPSWAPK

SEQ ID NO: 26560 - protein, 1179 aa, Lethenteron reissneri
MLRSMLETPALATESQHTRIPLESARAGAEDDSSTDNMVTTGPETTTSNESTAQENTTATVTSSAAKVGHKQMQVCVCGWRKVTSHHGLRIHQGKKGCLGKERQRPRIDYFLRKRSNQSNEAQQLDANHSLQCISTTVMEDVNSSTEVTTEVEPTTRVELTQPPRPAIERRLPGHRPYVKWPGASDKKLWETVNTDLTLTLEKLRGTVEKKLERMGDIIYEYGAESFGVQEAKGGRKVPTPPVSRRQQEIKCLVQERRQLKKQWKKASEVEKEGIEALQADIKTRLASLRRAENLRKRRRKKEQTRTRFYKDPFKFLKSLFTKEKSGVLKTTKKDLEEHLRTTNFDSKRHEHLAIPSDIPPIEPPEHHIETSPPTWKEVENTVRRARTASAPGPNGVPYKVYKNAPDVLRFLWRLMRTAWQKKIIPKVWRRAGGVLIPKEKDAVNISQFRPISLLNVEGKIFFRIIAQRMAEYLQRNAYVDTSVQKAGISGFSGCLEHSSMIWHQIQMAKVEKRDLHVVFLDLANAFGSVPHELLWSAFRFFHIPDTITTLVKSYFQDLQFCFTTSEFTTSWQCLNVGIMAGCTISPLAFIMAMEVIIRSSKWVAGGQRVDSGFRLPPLRAYMDDITTLTTTVPCTRRLLRKLEENISWARMKIKPSKSRSISIVKGVLCDLKFFIGDDQIPTVSEQPVKSLGRWYDASLKDKDQVQQLRKDISSSLQSIDNTQLPGKLKAWCLQFGLLPRVLWPLAVYEVPISTVEKMERGATSYLKKWLGVPRCLTTIGLYGDGVLKLPLTSLTEEFKCAKTRLQMTLNESRDPVVSNNAPTLATGRKWRPGKAVQEATAALRHADIVGHVQQGRGGLGLTSHAAWSKATAPERRKMVVQEVRHQEEAARWAKAVSLAKQGQWTRWDSVEKRKISWKDLWAMEARRLSFSIRATYDILPTPVNLHQWYGEDPDCALCSMPANLRHILTGCKTSLTQGRYTWRHNQVLKNLASALEDKRAATNSLPPPAASHPLRTTFVREGAKPPKSGSTPIERDQLRLARDWKMLADIGRQLVFPPEIATTTLRPDMVLWSRSLKKVFIIELTVPWEDSVDEAYERKHLRYADLAAEARHHGWNTEVRPVEVGCRGFVATSTTRLLRDLGIKGQSQRSAIKAVSEAAEGSSQWLWMKRKDPSWAPK

SEQ ID NO: 26561 - protein, 1181 aa, Oncorhynchus mykiss
MLRSMLETPALATESQHTRIPLESARAGAEDDSSADNMVTTGPETTKSNESTAQENTTATVTSSAATAGHKQMQVCVCGWRKVTSHHGLRIHQGKKGCLGKERQRPRIDYFLRKRSNQSNEAQQLDANHSLQCISTTVMEDVNSSTEVTTEVEPTTGVELTEPPRPAVERRLPGHRPYVKWPGASDKKLWETVNTDLTLTLEKLRGTVEKKLERMGDIIYEYGTERFGVEEAKGGRKVPTPPVSRRQQEIKRLVQERRQLKKQWKKASEVEKEGIEALQADIKTRLASLRRAENLRKRRRKKEQTRTRFYKDPFKFLKFLSLFTKEKSGALKTTKKDLEEHLRTTNFDSKRHEHLAIPSDIPPIEPQEHHIETSPPTWKEVENTVRRARTASAPGPNGVPYKVYKNAPDVLRFLWRLMRTAWKNKIIPKVWRRAGGVLIPKEKDAVNISQFRPISLLNVEGKIFFRVIAQRMAEYLQRNAYVDTSVQKAGISGFSGCLEHSSMIWHQIQMAKVEKRDLHVVFLDLANAFGSVPHELLWSAFRFFHIPDTITTLVKSYFQDLQFCFTTSEFTTSWQCLNVGIRAGCTISPLAFIMAMEVIIRSSKWVAGGQQVDSGFRLPPLRAYMDDITTLTTTVPCTRRLLRKLEETISWARMMIKPSKSRSISIVKGVLSDLKFFIGDDQIPTVSEQPVKSLGRWYDASLKDKDQVQQLRKDISSSLQSIDNTQLPGKLKAWCLQFGLLPRVLWPLAVYEVPISTVEKMERGVTGYLKKWLGVPRCLTTIGLYGDGVLKLPLTSLTEEFKCSKTRLQMTLNESRDPVVSNNAPTLATGRKWRPGKAVQEATAALRHADIVGHVQQGRGGLGLTSRAAWSKATAPERRKMVVQEVRHQEEAARWAKAVSLSKQGRWTRWDSVEKRKISWKDLWAMEARRLSFSIRATYDVLPTPVNLHQWYGEDPDCALCSMPANLRHILTGCKTSLTQGRYTWRHNQVLKNLASALEDKRAATNSLPPPAASHPLRTNFVREGAKPPKRGSTPLERDQLHLARDWKMLADIGRQLVFPPEIVTTTLRPDMVLWSRSLKKVFIIELTVPWEDSVDEAYERKHLRYADLAAEARHHGWNTEVRPVEVGCRGFVATSTIRLLRDLGIKGQSQRSAIKAVSEAAEGSSQWLWMKRKDPSWAPK

SEQ ID NO: 26562 - protein, 1142 aa, Salvelinus namaycush
MVTTGPETTTSNESTAQENTTATVTSSAATAGHKQMQVCVCGWRKVTSHHGLRIHQGKKGCLGKERQRPRIDHFLRKRSNQSNEAQQLDANHSLQCISTTVMEDVNSSTEVTPEVEPTTGVELTQPPRPAVERRLPGHRPYVKWPGASDKKLWEAVNTDLTLTLEKLRGTVEKKLERMGDIIYEYGAESFGVQEAKGGRKVPTPPVSRRQQEIKRLVQERRQLKKQWKKASEVEKEGIEAHQADIKTRLASLRRAENLRKRRRKKEQTRTRFYKDPFKFLKSLFTKEKSGALKTTKKDLEEHLITTNFDSKRHEHLAIPSDIPPIEPPEHHIETSPPTWKEVENTVRRARTASAPGPNGVPYKVYKNAPDVLRVLWRLMRTAWQKKIIPKVWRRAGGVLIPKEKDAVNISQFRPISLLNVEGKIFFRVIAQRMSEYLQRNAYVDTSVQKAGISGFSGCLEHSSMIWHQIQMAKVEKRDLHVVFLDLANAFGSVPHELLWSAFRFFHIPDTITTLVKSYFQDLQFCFTTSEFTTSWQCLNVGIMAGCTISPLAFIMAMEVIIRSSKWVAGGQRVDSGFRLPPLRAYMDDITTLTTTVPCTRRLLRKLEENISWARMKIKPSKSRSISIVKGVLSDLKFFIGDDQIPTVSEQPVKSLGRWYDASLKDKDQVQQLRKDISSSLQSIDNTQLPGKLKAWCLQFGLLPRVLWPLAVYEVPISTVEKMERGVTGYLKKWLGVPRCLTTIGLYGDGVLKLPLTSLTEEFKCAKTRLQMTLNESRDPVVSNNAPTLATGRKWRPGKAVQEATAALRHADIVGHVQQGRGGLGLTSRAAWSKATAPERRKMVVQEVRHQEEAARWAKAVSLAKQGQWTRWDSVEKRKISWKDLWAMEARRLSFSIRATYDVLPTPVNLHQWYGEDPDCALCSMPANLRHILTGCKTSLTQGRYTWRHNQVLKNLASALEDKRAATNSLPPPAASHPLRTTFVREGAKPPKSGSTPLERDQLRLARDWKMLADIGRQLVFPPEIATTTLRPDIVLWSRSLKKVFIIELTVPWEDSVDEAYERKHLRYADLAAEARHHGWNTEVRPVEVGCRGFVATSTTRLLRDLGIKGQSQRSAIKAVSEVAEGSSQWLWMKRKDPSWAPK

SEQ ID NO: 26563 - protein, 1179 aa, Lethenteron reissneri
MLRSMLETPDLATESQHTRIPLESARAGAEDDSSTDNMVTTGPETTTRNESTAQENTTATVTSSAATAGHKQMQVCVCGWRKVTSHHGLRIHQGKKGCLGKERQRPRIDYFLRKRSNQSNEAQQLDANHSLQCISTTVMEDVNSSTEVTTEVEPTTGVELTQPPRPAIERRLPGHRPYVKWPGASDKKLWETVNTDLTLTLEKLRGTVEKKLERMGDIIYEYGAESFGVQEAKGGRKVPTPPVSRRQQEIKRLVQERRQLKKQWKKASEVEKEGIEALQADIKTRLASLRRAENLRKRRRKKEQTRTRFYKDPFKFLKSLFTKEKSGVLKTTKKDLEEHLRTTNFDSKRHEHLAIPSDIPPIEPPEHHIETSPPTWKEVENTVRRARTASAPGPNGVPYKVYKNAPDVLRFLWRLMRTAWQKKIIPKVWRRAGGVLIPKEKDAVNISQFRPISLLNVEGKIFFRIIAQRMAEYLQRNAYVDTSVQKAGISGFSGCLEHSSLIWHQIQMAKVEKRDLHVVFLDLANAFGSVPHELLWSAFRFFHIPDTITTLVKSYFQDLQFCFTTSEFTTSWQCLNVGIMAGCTISPLAFIMAMEVIIRSSKWVAGGQRVDSGFRLPPLRAYMDDITTLTTTVPCTRRLLRKLEENISWARMKIKPSKSRSISIVKGVLCDLKFFIGDDQIPTVSEQPVKSLGRWYDASLKDKDQVQQLRKDISSSLQSIDNTQLPGKLKAWCLQFGLLPRVLWPLAVYEVPISTVEKMERGATSYLKKWLGVPRCLTTIGLYGDGVLKLPLTSLTEEFKCAKTRLQMTLNESRDPVVSNNAPTLATGRKWRPGKAVQEATAALRHADIVGHVQQGRGGLGLTSRAAWSKATAPERRKMVVQEVRHQEEAARWAKAVSLAKQGQWTRWDSVEKRKISWKDLWAMEARRLSFSIRATYDILPTPVNLHQWYGEDPDCALCSMPANLRHILTGCKTSLTQGRYTWRHNQVLKNLAFALEDKRAATNSLPPPAASHPLRTTFVREGAKPPKSGSTPIERDQLRLARDWKMLADIGRQLVFPPEIATTTLRPDMVLWSRSLKKVFIIELTVPWEDSVDEAYERKHLRYADLAAEARHHGWNTEVRPVEVGCRGFVATSTTRLLRDLGIKGQSQRSAIKAVSEAAEGSSQWLWMKRKDPSWAPK

SEQ ID NO: 26564 - protein, 1142 aa, Oncorhynchus mykiss
MVTTGPETTTSNESTAQENTTATVTSSAATAGHKQMQVCVCGWRKVTSHHGLRIHQGKKGCLGKERQRPRIDYFLRKRSNQSNEAQQLDANHSLQCISTTVMEDVNSSTEVTTEVEPTTGVELTEPPRPAVERRLPGHRPYVKWPGASDKKLWETVNTDLTLTLEKLRGTVEKKLERMGDIIYEYGTERFGVEEAKGGRKVPTPPVSRRQQEIKRLVQERRQLEKQWKKASEVEKEGIEALQADIKTRLASLRRAENLRKRRRKKEQTRTRFYKDPFKFLKSLFTKEKSGALKTTKKDLEEHLRTTNFDSKRHEHLAIPSDIPPIEPPEHHIETSPPTWKEVENTVRRARTASAPGPNGVPYKVYKNAPDVLRFLWRLMRTAWKNKIIPKVWRRAGGVLIPKEKDAVNISQFRPISLLNVEGKIFFRVIAQRMAEYLQKNAYVDTSVQKAGISGFSGCLEHSSMIWHQIQMAKVEKRDLHVVFLDLANAFGSVPHELLWSAFRFFHIPDTITTLVKSYFQDLQFCFTTSEFTTSWQCLNVGIMAGCTISPLAFIMVMEVIIRSSKWVAGGQRVDSGFRLPPLRAYMDDITTLTTTVPCTRRLLRKLEENISWARMKIKPSKSRSISIVKGVLSDLKFFIGDDQIPTVSEQPVKSLGRWYDASLKDKDQVQQLRKDISSSLQFIDNTQLPGKLKAWCLQFGLLPRVLWPLAVYEVPISTVEKMERGVTGYLKKWLGVPRCLTTIGLYGDGVLKLPLTSLTEEFKCSKTRLQMTLNESRDPVVSNNAPTLATGRKWRPGKAVQEATAALRHADIVGHVQQGRGGLGLTSRAAWSKATAPERRKMVVQEVRHQEEAARWAKAVSLSKQGQWTRWDSVEKRKISWKDLWAMEARRLSFSIRATYDVLPTPVNLHQWYGEDPDCALCSMPANLRHILTGCKTSLTQGRYTWRHNQVLKNLASALEDKRAATNSLPPPAASHPLRTNFVREGAKPPKRGSTPLERDQLRLARDWKMLADIGRQLVFPPEIATTTLRPDMVLWSRSLKKVFIIELTVPWEDSVDEAYERKHLRYADLAAEARHHGWNTEVRPVEVGCRGFVATSTTRLLRDLRIKGQSQRSAIKAVSEAAEGSSQWLWMKRKDPSWAPK

SEQ ID NO: 26565 - protein, 1179 aa, Lethenteron reissneri
MLRSMLETPDLATESQHTRIPLESARAGAEDDSSTDNMVTTGPETTTSNESTAQENTTATVTSSAATAGHKQMQVCVCGWRKVTSHHGLRIHQGKKGCLGKERQRPRIDYFLRKRSNQSNEAQQLDANHSLQCISTTVMEDVNSSTEVTTEVEPTTGVELTQPPRPAIERRLPGHRPYVKWPGASDKKLWETVNTDLTLTLEKLRGTVEKKLERMGDIIYEYGAESFGVQEAKGGRKVPTPPVSRRQQEIKRLVQERRQLKKQWKKASEVEKEGIEALQADIKTRLASLRRAENLRKRRRKKEQTITRFYKDPFKFLKSLFTKEKSGVLKTTKKDLEEHLRTTNFDSKRHEHLAIPSDIPPIEPPEHHIETSPPTWKEVENTVRRARTASAPGPNGVLYKVYKNAPDVLRFLWRLMITAWQKKIIPKVWRRAGGVLIPKEKDAVNISQFRPISLLNVEGKIFFRIIAQRMAEYLQRNAYVDTSVQKAGISGFSGCLEHSSMIWHQIQMAKVEKRDLHVVFLDLANAFGSVPYELLWSAFRFFHIPDTITTLVKSYFQDLQFCFTTSEFTTSWQCLDVGIMAGCTISPLAFIMAMEVIIRSSKWVAGGQRVDSGFRLPPLRAYMDDITTLTTTVPCTRRLLRKLEENISWARMKIKPSKSRSISIVKGVLCDLKFFIGDDQIPTVSEQPVKSLGRWYDASLKDKDQVQQLRKDISSSLQSIDNTQLPGKLKAWCLQFGLLPRVLWPLAVYEVPISTVEKMERGATSYLKKWLRVPRCLTTIGLYGDGVLKLPLTSLTEEFKCAKTRLQMALNESRDPVVSNNAPTLATGRKWRPGKAVQEATAALRHADIVGHVQQGRGGLGLTSRAAWSKATAPERRKMVVQEVRHQEEAARWAKAVSLAKQGQWTRWDSVEKRKISWKDLWATEARRLSFSIRATYDILPTPVNLHQWYGEDPDCALCSMPANLRHILTGCKTSLTQGRYTWRHNQVLKNLASALEDKRAATNSLPPPAASHPLRTTFVREGAKPPKSGSTPIERDQLCLARDWKMLADIGRQLVFSPEIATTTLRPDVVLWSRSLKKVFIIELTVPWEDSVDEAYERKHLRYADLAAEARHHGWNTEVRPVEVGCRGFVATSTTRLLRDLGIKGQSQRSAIKAVSEAAEGSSQWLWMKRKDPSWAPK

SEQ ID NO: 26566 - protein, 1139 aa, Lethenteron reissneri
MLRSMLETPALATESQHTRIPLESARAGAEDDSSTDNMVTTGPETTTSNESTAQENTTATVTSSAAKVGHKQMQVCVCGWRKVTSHHGLRIHQGKKGCLGKERQRPRIDYFLRKRSNQSNEAQQLDANHSLQCISTTVMEDVNSSTEVTTEVEPTTRVELTQPPRPAIERRLPGHRPYVKWPGASDKKLWETVNTDLTLTLEKLRGTVEKKLERMGDIIYEYGAESFGVQEAKGGRKVPTPPVSRRQQEIKCLVQERRQLKKQWKKASEVEKEGIEALQADIKTRLASLRRAENLRKRRRKKEQTRTRFYKDPFKFLKSLFTKEKSGVLKTTKKDLEEHLRTTNFDSKRHEHLAIPSDIPPIEPPEHHIETSPPTWKEVENTVRRARTASAPGPNGVPYKVYKNAPDVLRFLWRLMRTAWQKKIIPKVWRRAGGVLIPKEKDAVNISQFRPISLLNVEGKIFFRIIAQRMAEYLQRNAYVDTSVQKAGISGFSGCLEHSSMIWHQIQMAKVEKRDLHVVFLDLANAFGSVPHELLWSAFRFFHIPDTITTLVKSYFQDLQFCFTTSEFTTSWQCLNVGIMAGCTISPLAFIMAMEVIIRSSKWVAGGQRVDSGFRLPPLRAYMDDITTLTTTVPCTRRLLRKLEENISWARMKIKPSKSRSISIVKGVLCDLKFFIGDDQIPTVSEQPVKSLGRWYDASLKDKDQVQQLRKDISSSLQSIDNTQLPGKLKAWCLQFGLLPRVLWPLAVYEVPISTVEKMERGATSYLKKWLGVPRCLTTIGLYGDGVLKLPLTSLTEEFKCAKTRLQMTLNESRDPVVSNNAPTLATGRKWRPGKAVQEATAALRHADIVGHVQQGRGGLGLTSHAAWSKATAPERRKMVVQEVRHQEEAARWAKAVSLAKQGQWTRWDSVEKRKISWKDLWAMEARRLSFSIRATYDILPTPVNLHQWYGEDPDCALCSMPANLRHILTGCKTSLTQGRYTWRHNQVLKNLASALEDKRAATNSLPPPAASHPLRTTFVREGAKPPKSGSTPIERDQLRLARDWKMLADIGRQLVFPPEIATTTLRPDMVLWSRSLKKVFIIELTVPWEDSVDEAYERKHLRYADLAAEALASWLEHRSPTSGGGLQRFCGNIYNQTA

SEQ ID NO: 26567 - protein, 965 aa, Oncorhynchus gorbuscha
MGDIIYEYGTERFGVEEAKGGRKVPTPPVSRRQQEIKRLVQERRQLKKQWKKASEVEKEGIEALQADIKTRLASLRRAENLRKRRRKKEQTRTRFYKDPFKFLKSLFTKEKSGALKTTKKDLEEHLRITNVDSKRHEHLAIPSDIPPIEPPEHHIETSPPTWKEVEDTVRRARTASGPGPNGVPYKVYKNTPDVLRFLWRLMRTAWQKKIIPKVWRRAGGVLIPKEKDAVNISQFRPISLLNVEGKIFFRVIAQRMAEYLQRNTYVDASVQKAGISGFSGCLEHSSMIWHQIQMAKVEKRDLHVVFLDLANAFGSVPHELLWSAFRFFHIPDTITNLVKSYFQDLQFCFTTSEFTTSWQCLNVGIMAGCTISPLAFTMAMEVIIRSSKWVAGGQRVDSGFRLPPLRAYMDDITTLTTTVPCTRRLLRKLEENISWARMKIKPSKSRSISIVKGVLSDLKFFIGDDQIPTVSEQPVKSLGRWYDASLKDKDQVQQLRKDISSSLQSIDNTQLPGKLKAWCLQFGLLPRVLWPLALYEVPISTVEKMERGVTGYLKKWLGVPRCLTTIGLYGDGVLKLPLTSLTEEFKCAKTRLQMTLNESRDPVVSNNAPTLATGRKWRPGKAVQEATAALRHADIVGHVQQGRGGLGLTSRAAWSKATAPERRKMVVQEVRHQEEAARWAKAVSLAKQGQWTRWDSVEKRKISWKDLWAMEARRLSFSIRATYDVLPTPVNLHQWYGEDLDCALCSMPANLRHILTGCKTSLAQGRYTWRHNQVLKNLASALEDKRAATNSLPPTAASHSLRTNFVREGAKPPKSGSTPLERDQLRLARDWKMLADIGRQLVFPPEIATTTLRPDMVLWSRSLNKVFIIELTVPWENSVDEAYERKHLRYADLAAEARHHGWNTEVRPVEVGCRGFVATSTTRLLRDLGIKGQSQRSAIKAVSEAAEGSSQWLWMKRKDPSWAPK

SEQ ID NO: 26568 - protein, 1142 aa, Salvelinus namaycush
MVTTGPETTTSNESTAQEITTATVTSSAATAGHKQMQVCVCGWRKVTSHHGLRIHQGKKGCLGKERQRPRIDHFLRKRSNQSNEAQQLDANHSLQCISTTVMEDVNSSTEVTTEVEPTTGVELTQPPRPAVERRLPGHRPYVKWPGASDKKLWEAVNTDLTLTLEKLRGTVEKKLERMGDIIYEYGAESFGVQEAKGGRKVPTPPVSRRQQEIKRLVQERRQLKKQWKKASEVEKEGIEALQADIKTRLASLRRAENLRKRRRKKEQTRTRFYKDPFKFLKSLFTKEKSGALKTTKKDLEEHLITTNFDSKRHEHLAIPSDIPPIEPPEHHIETSPPTWKEVENTVRRARTASAPGPNGVPYKVYKNAPDVLRVLWRLMRTAWQKKIIPKVWRRAGGVLIPKEKDAVNISQFRPISLLNVEGKIFFRVIAQRMSEYLQRNAYVDTSVQKAGISGFSGCLEHSSMIWHQIQMAKVEKRDLHVVFLDLANAFGSVPHELLWSAFRFFHIPDTITTLVKSYFKDLQFCFTTSEFTTSWQCLNVGIMAGCTISPLAFIMAMEVIIRSSKWVAGGQRVDSGFRLPPLRAYMDDITTLTTTVPCTRRLLRKLEENISWARMKIKPSKSRSISIVKGVLSDLKFFIGDDQIPTVSEQPVKSLGRWYDASLKDKDQVQQLRKDISSSLQSIDNTQLPGKLKAWCLQFGLLPRVLWPLAVYEVPISTVEKMERGVTGYLKKWLGVPRCLTTIGLYGDGVLKLPLTSLTEEFKCAKTRLQMTLNESRDPVVSNNAPTLATGRKWRPGKAVQEATAALRHADIVGHVQQGRGGLGLTSRAAWSKATAPERRKMVVQEVRHQEEAARWAKAVSLAKQGQWTRWDSVEKRKISWKDLWAMEARRLSFSIRATYDVLPTPVNLHQWYGEDPDCALCSMPANLRHILTGCKTSLTQGRYTWRHNQVLKNLASALEDKRAATNSLPPPAASHPLRTTFVREGAKPPKSGSTPLERDQLRLARDWKMLADIGRQLVFPPEIATTTLRPDMVLWSHSLKKVFIIELTVPWEDSVDEAYERKHLRYANLAAEARHHGWNTEVRPVEVGCRGFVATSTTRLLRDLGIKGQSQRSAIKAVSEAAEGSSQWLWMKRKDPSWAPK

SEQ ID NO: 26569 - protein, 965 aa, Lethenteron reissneri
MGDIIYEYGAESFGVQEAKGGRKVPTPPVSRRQQEIKRLVQERRQLKKQWKKASEVEKEGIEALQADIKTRLASLRRAENLRKRRRKKEQTRTRFYKDPFKFLKSLFTKEKSGVLKTTKKDLEEHLRTTNFDSKRHEHLAIPSDIPPIEPPEHHIETSPPTWKEVENTVRRARTASAPGPNGVPYKVYKNAPDVLRFLWRLMRTAWQKKIIPKVWHRAGGVLIPKEKDAVNISQFRPISLLNVEGKIFFRIIAQRMAEYLQRNAYVDTSVQKAGISGFSGCLEHSSMIWHQIQKAKVEKRDLHVVFLDLANAFGSVPHELLWSAFRFFHIPDTITTLVKSYFQDLQFCFTTSEFTTSWQCLNVGIMAGCTISPLAFIMAMEVIIRSSKWVAGGQRVDSGFRLPPLRAYMDDITTLTTTVPCTRRLLRKLEENISWARMKIKPSKSRSISIVKGVLCDLKFFIGDDQIPTVSEQPVKSLGRWYDASLKDKDQVQQLRKDISSSLQSIDNTQLPGKLKAWCLQFGLLPRVLWPLAVYEVPISTVEKMERGATSYLKKWLGVPRCLTTIGLYGDGVLKLPLTSLTEEFKCAKTRLQMTLNESRDPVVSNNAPTLATGRKWRPGKAVQEATAALRHADIVGHVQQGRGGLGLTSRAAWSKATAPERRKMVVQEVRHQEEAARWAKAVSLAKQGQWTRWDSVEKRKISWKDLWAMEARRLSFSIRATYDILPTPVNLHQWYGEDPDCALCSMPANLRHILTGCKTSLTQGRYTWRHNQVLKNLASALEDKRAATNSLPPPAASHPLRTTFVREGAKPPKSGSTPIERDQLRLARDWKMLADIGRQLVFPPEIATTTLRPDMVLWSRSLKKVFIIELTVPWEDSVDEAHERKHLRYADLAAEARHHGWNTEVRPVEVGCRGFVATSTTRLLRDLGIKGQSQRSAIKAVSEAAEGSSQWLWMKRKDPSWAPK

SEQ ID NO: 26570 - protein, 764 aa, Oncorhynchus mykiss
MRTAWKNKIIPKVWRRAGGVLIPKEKDAVNISQFRPISLLNVEGKIFFRVIAQRMAEYLQRNAYVDTFVQKAGISGFSGCLEHSSMIWHQIQMAKVEKRDLHVVFLDLANAFGSVPHELLWSAFRFFHIPDTITTLVKSYFQDLQFCFTTSEFTTSWQCLNVGIMAGCTISPLAFIMAMEVIIRSSKWVAGGQRVDSGFRLPPLRAYMDDITTLTTTVPCTRRLLRKLEENISWARMKIKPSKSRSISIVKGVLSDLKFFIGDDQIPTVSEQPVKSLGRWYDASLKDKDQVQQLRKDISSSLQSIDNTQLPGKLKAWCLQFGLLPRVLWPLAVYEVPISTVEKMERGVTGYLKKWLGVPRCLTTIGLYGDGVLKLPLTSLTEEFKCSKTRLQMTLNESRDPVVSNNAPTLATGRKWRPGKAVQEATAALRHADIVGHVQQGRGGLGLTSRAAWSKATAPERRKMVVQEVRHQEEAARWAKAVSLSKQGQWTRWDSVEKRKISWKDLWAMEARRLSFSIRATYDVLPTPVNLHQWYGEDPDCALCSMPANLRHILTGCKTSLTQGRYTWRHNQVLKNLASALEDKRAATNSLPPPAASHPLRTNFVREGAKPPKRGSTPLERDQLRLARDWKMLADIGRQLVFPPEIATTTLRPDMVLWSRSLKKVFIIELTVPWEDSVDEAYERKHLRYADLAAEARHHGWNTEVRPVEVGCRGFVATSTTRLLRDLGIKGQSQRSAIKAVSEAAEGSSQWLWMKRKDPSWAPK

SEQ ID NO: 26571 - protein, 1175 aa, Oncorhynchus gorbuscha
MLETPALATESQNTRIPLESARAGAEDDSSADNMVTTGLETTTSNESTAQENTTATVTSSAATVGHKQMQVCVCGWRKVTSHHGLRIHQGKKGCLGKERQRTRIDYFLRKRSNQSNEAQQLDANHSLQCISTTVMEDVNSSTEVATEVEPTTGVELTQPPRPAVERRLPGHRPYVKWPGASDKKLWETVNTDLTLTLEKLRGTVEKKLERMGDIIYEYGTERFGVEEAKGGRKVPTPPVSRRQQEIKRLVQERRQLKKQWKKASEVEKEGIEALQADIKTRLASLRRAENLRKRRRKKEQTRTRFYKDPFKFLKSLFTKEKSGALKTTKKDLEEHLRITNVDSKRHEHLAIPSDIPPIEPPEHHIETSPPTWKEVEDTVRRARTASGPGPNGVPYKVYKNTPDVLRFLWRLMRTAWQKKIIPKVWRRAGGVLIPKEKDAVNISQFRPISLLNVEGKIFFRVIAQRMAEYLQRNTYVDASVQKAGISGFSGCLEHSSMIWHQIQMAKVEKRDLHVVFLDLANAFGSVPHELLWSAFRFFHIPDTITNLVKSYFQDLQFCFTTSEFTTSWQCLNVGIMAGCTISPLAFTMAMEVIIRSSKWVAGGQRVDSGFRLPPLRAYMDDITTLTTTVPCTRRLLRKLEENISWARMKIKPSKSRSISIVKGVLSDLKFFIGDDQIPTVSEQPVKSLGRWYDASLKDKDQVQQLRKDISSSLQSIDNTQLPGKLKAWCLQFGLLPRVLWPLALYEVPISTVEKMERGVTGYLKKWLGVPRCLTTIGLYGDGVLKLPLTSLTEEFKCAKTRLQMTLNESRDPVVSNNAPTLATGRKWRPGKAVQEATAALRHADIVGHVQQGRGGLGLTSRAAWSKATAPERRKMVVQEVRHQEEAARWAKAVSLAKQGQWTRWDSVEKRKISWKDLWAMEARRLSFSIRATYDVLPTPVNLHQWYGEDPDCALCSMPANLRHILTGCKTSLAQGRYTWRHNQVLKNLASALEDKRAATNSLPPTAASHSLRTNFVREGAKPPKSGSTPLERDQLRLARDWKMLADIGRQLVFPPEIATTTLRPDMVLWSRSLNKVFIIELTVPWENSVDEAYERKHLRYADLAAEARHHGWNTEVRPVEVGCRGFVATSTTRLLRDLGIKGQSQRSAIKAVSEAAEGSSQWLWMKRKDPSWAPK

SEQ ID NO: 26572 - protein, 1036 aa, Oncorhynchus kisutch
MEDVNSSTEVTTVVEPTTVVELTEPPRTADERRLPGHRPYVKWPGASDKKLWETVNTDLTLTLETLRGTVEKKLERMGDIIYEYGTERFGVEEAKGGRKVPTPPVSRRQQEIKRLVQERRQLKKQWKKASEVEKEGIEALQADIKTRLASLRRAENLRKRRRKKEQTRTRFYKDPFKFLKSLFTKEKSGALKTTKKDLEEHLRTTNFDSKRHEHLAIPSDIPPIEPPEHHIETSPPTWKEVENTVRRARTASAPGPNGVPYKVYKNAPDVLRFLWRLMRTAWKNKIIPKVWRRAGGVLIPKEKDAVNISQFRPISLLNVEGKIFFRVIAQRMAEYLQRNAYVDTSVQKAGISGFSGCLEHSSMIWHQIQMAKVEKRDLHVVFLDLANAFGSVPHELLWSAFRFFHIPDTITTLVKSYFQDLQFCFTTSWQCLNVGIMAGCTISPLAFIMAMEVIIRSSKWVAGGQRVDSGFRLPPLRAYMDDITTLTTTVPCTRRLLRKLEENISWARMKIKPSKSRSISIVKGVLSDLKFFIGDDQIPTVSEQPVKSLGRWYDASLKDKDQVQQLRKDISSSLQSIDNTQLPGKLKAWCLQFGLLPRVLWPLAVYEVPISTVEKMERGVTGYLKKWLGVPRCLTTIGLYGDGVLKLPLTSLTEEFKCSKTRLQMTLNESRDPVVSNNAPTLATGRKWRPGKAVQEATAALRHADIVGHVQQGRGGLGLTSRAAWSKATAPERRKMVVQEVRHQEEAARWAKAVSLSKQGQWTRWDSVEKRKISWKDLWAMEARRLSFSIRATYDVLPTPVNLHQWYGEDPDCALCSMPANLRHILTGCKTSPTQGRYTWRHNQVLKNLASALEDKRAATNSLPPPAASHPLRTNFVREGAKPPKRGSTPLERDQLRLARDWKMLADIGRQLVFPPEIATTTLRPDMVLWSRSLKKVFIIELTVPWEDSVDEAYERKHLRYADLAAEARHHGWNTEVRPVEVGCRGFVATSTTRLLRDLGIKGQSQRSAIKAVSEAAEGSSQWLWMKRKDPSWAPK

SEQ ID NO: 26573 - protein, 1041 aa, Lethenteron reissneri
MEDVNSSTEVTTEVEPTTGVELTQPPRPAIERRLPGHRPYVKWPGASDKKLWETVNTDLTLTLEKLRGTVEKKLERMGDIIYEYGAESFGVQEAKGGRKVPTPPVSRRQQEIKCLVQERRQLKKQWKKASEVEKEGIEALQADIKTRLASLRRAENLRKRRRKKEQTRTRFYKDPFKFLKSLFTKEKSGVLKTTKKDLEEHLRTTNFDSKRHEHLAIPSDIPPIEPPEHHIETSPPTWKEVENTVRRARTASAPGPNGVPYKVYKNAPDVLRFLWRLMRTAWQKKIIPKVWRRAGGVLIPKEKDAVNISQFRPISLLNVEGKIFFRIIAQRMAEYLQRNAYVDTSVQKAGISGFSGCLEHSSMIWHQIQMAKVEKRDLHVVFLDLANAFGSVPHELLWSAFRFFHIPDTITTLVKSYFQDLQFCFTTSEFTTSWQCLNVGIMAGCTISPLAFIMAMEVIIRSSKWVAGGQRVDSGFRLPPLRAYMDDITTLTTTVPCTRRLLRKLEENISWARMKIKPSKSRSISIVKGVLCDLKFFIGDDQIPTVSEQPVKSLGRWYDASLKDKDQVQQLRKDISSSLQSIDNTQLPGKLKAWCLQFGLLPRVLWPLAVYEVPISTVEKMERGATSYLKKWLGVPRCLTTIGLYGDGVLKLPLTSLTEEFKCAKTRLQMTLNESRDPVVSNNAPTLATGRKWRPGKAVQEATAALRHADIVGHVQQGRGGLGLTCRAAWSKATAPERRKMVVQEVRHQEEAARWAKAVSLAKQGQWTRWDSVEKRKISWKDLWAMEARRLSFSIRATYDILPTPVNLHQWYGEDPDCALCSMPANLRHILTGCKTSLTQGRYTWRHNQVLKNLASALEDKRAATNSLPPPAASHPLRTTFVREGAKPPKSGSTPIERDQLCLARDWKMLADIGRQLVFPPEIATTTLRPDMVLWSSSLKKVFIIELTVPWEDSVDEAYERKHLRYADLAAEARHHGWNTEVRPVEVGCRGFVATSTTRLLRDLGIKGQSQRSAIRAVSEAAEGSSQWLWMKRKDPSWAPK

SEQ ID NO: 26574 - protein, 1041 aa, Lethenteron reissneri
MEDVNSSTEVTTEVEPTTGVELTQPPRPAIERRLPGHRPYVKWPGASDKKLWETVNTDLTLTLEKLRGTVEKKLERMGDIIYEHGAESFGVQEAKGGRKVPTPPVSRRQQEIKRLVQERRQLKKQWKKASEVEKEGIEALQADIKTRLASLRRAENLRKRRRKKEQTRTRFYKDPFKFLKSLFTKEKSGVLKTTKKDLEEHLRTTNFDSKRHEHLAIPSDIPPIEPPEHYIETSPPTWKEVENTVRRARTASAPGPNGVPYKVYKNAPDVLSFLWRLMRTTWQKKIIPKVWRRAGGVLIPKEKDAVNISQFRPISLLNVEGKIFFRIIAQRMAEYLQRNAYVDTSVQKAGISGFSGCLEHSSMIWHQIQMAKVEKRDLHVVFLDLANAFGSVPHELLWSAFRFFHIPDTITTLVKSYFQDLQFCFTTSEFTTSWQCLNVGIMAGCTISPLAFIMAMEVIIRSSKWVAGGQRVDSGFRLPPLRAYMDDITTLTTTVPCTRRLLRKLEENISWARMKIKPSKSRSISIVKGVLCDLKFFIGDDQIPTVSEQPVKSLGRWYDASLKDKDQVQQLRKDISSSLQSIDNTQLPGKLKAWCLQFGLLPRVLWPLAVYEVPISTVEKMERGATSYLKKWLGVPRCLTTIGLYGDGVLKLPLTSLTEEFKCAKTRLQMALNESRDPVVSNNAPTLATGRKWRPGKAVQEATAALRHADIVGHVQQGRGGLGLTSRATWSKATAPERRKMVVQEVRHQEEAARWAKAVSLAKQGQWTRWDSVEKRKISWKDLWAMEARRLSFSIRATYDILPTPVNLHQWYGEDPDCALCSMPANLRHILTGCKTSLTQGRYTWRHNQVLKNLASALEDKRAATNSLPPPAASHPLRTTFVREGAKPPKSGSTPIERDQLRLARDWKMLADIGLQLVFPPEIATTTLRPDMVLWSRSLKKVFIIELTVPWEDSVDEAYERKHLRYADLAAEARHHGWNTEVQPVEVGCRGFVATSTTRLLRDLGIKGQSQRLAIKAVSEAAEGSSQWLWMKRKDASWAPK

SEQ ID NO: 26575 - protein, 1157 aa, Oncorhynchus mykiss
MSFHFMIVSHSSADNMVTTGPETTTSNESTAQENTTATVTSSAATAGHKQMQVCVCGWRKVTSHHGLRIHQGKKGCLGKERQRPRIDYFLRKRSNQSNEAQQLDANHSLQCISTTVMEDVNSSTEVTTEVEPTTGVELTEPPRPAVERRLPGHRPYVKWPGASDKKLWETVNTDLTLTLEKLRGTVEKKLERMGDIIYEYGTERFGVEEAKGGRKVPTPPVSRRQQEIKRLVQERRQLKKQWKKASEVEKEGIEALQADIKTRLASLRRAENLRKCRRKKEQTRTRFYKDPFKFLKSLFTKEKSGALKTTKKDLEEHLRTTNFDSKRHEHLAIPSDIPPIEPPEHHIETSPPTWKEVENTVRRARTASAPGPNGVPYKVYKNAPDVLRFLWRLMRTAWKNKIIPKVWRRAGGVLIPKEKDAVNISQFRPISLLNVEGKIFFRVIAQRMAEYLQRNAYVDTSVQKAGISGFSGCLEHSSMIWHQIQMAKVEKRDLHVVFLDLANAFGSVPHELLWSAFRFFHIPDTITTLVKSYFQDLQFCFTTSEFTTSWQCLNVGIMAGCTISPLAFIMAMEVIIRSSKWVAGGQRVDSGFRLPPLRAYMDDITTLTTTVPCTRRLLRKLEENISWARMKIKPSKSRSISIVKGVLSDLKFFIGDDQIPTVSEQPVKSLGRWYDASLKDKDQVQQLRKDISSSLQSIDNTQLPGKLKAWCLQFGLLPRVLWPLAVYEVPISTVEKMERGVTGYLKKWLGVPRCLTTIGLYGDGVLKLPLTSLTEEFKCSKTRLQMTLNESRDPVVSNNAPTLATGRKWRPGKAVQEATAALRHADIVGHVQQGRGGLGLTSRAAWSKATAPERRKMVVQEVRHQEEAARWAKAVSLSKQGQWTRWDSVEKRKISWKDLWAMEARRLSFSIRATYDVLPTPVNLHQWYGEDPDCALCSMPANLRHILTGCKTSLTQGRYTWRHNQVLKNLASALEDKRAATNSLPPPAASHPLRTNFVREGAKPPKRGSTPLERDQLRLARDWKMLADIGRQLVFPPEIATTTLRPNMVLWSRSLKKVFIIELTVPWEDSVDEAYERKHLRYADLAAEARHHGWNTEVRPVEVGCRGFVATSTTRLLRDLGIKGQSQRSAIKAVSEAAEGSSQWLWMKRKDPSWAPK

SEQ ID NO: 26576 - protein, 764 aa, Oncorhynchus kisutch
MRTAWKNKIIPKVWRRAGGVLIPKEKDAVNISQFRPISLLNVEGKIFFRVIAQRMAEYLQRNAYVDTSVQKAGISGFSGCLEHSSMIWHQIQMAKVEKRDLHVVFLDLANAFGSVPHELLWSALRFFHIPDTITTLVKSYFQDLQFCFTTSEFTTSWQCLNVGIMAGCTISPLAFIMAMEVIIRSSKWVAGGQQVDSGFRHPPLRAYMDDITTLTTTVPCTRRLLRKLEENISWDRMKIKPSKSRSISIVKGGLSDLKFFIGDDQIPTVSEQPVKSLGRWYDASLKDKDQVQQLRKDISSSLQSIDNTQLPGKLKAWCLQFGLLPWVLWHLAVYEVPISTVEKMERGVTGYLKKWLGVPRCLTTIGLYGDGVLKLPLTSLTEEFKCSKTRLQMTLNESRDPVVSNNAPTLATGRKWRPGKAVQEATAALRHADIVGHVQQGRGGLGLTSRAAWSKATAPERRKMVVQEVRHQEEAARWAKAVSLAKQGQWTRWDSVEKRKISWKDLWAMEARRLSFSIRATYDVLPTPVNLHQWYGEDPDCALCSMPANLRHILTGCKTSLTQGRYTWRHNQVLKNLASALEDKRAATNSLPPPAASHPLRTNFVREGAKPPKRGSTPLERDQLRLARDWKMLADIGRQLVFPPEIATTTLRPDMVLWSRSLKKVFITELTVPWEDSVDEAYERKHLRYADLAAEARHHGWNTEVRPVEVGCRGFVATSTTRLLRDLGIKGQSQRSAIKAVSEAAEGSSQGLWMKRKDPSWAPK

SEQ ID NO: 26577 - protein, 1105 aa, Lethenteron reissneri
MQVCVCGWRKVTSHHGLRIHQGKKGCLGKERQRPRIDYFLRKRSNQSNEAQQLDANHSLQCISTTVMEDVNSSTKVTTEVEPTTGVELTQPPRPAIERRLPGHRPYVKWPGTSDKKLWETVNTDLTLTLEKLRGTVEKKLERMGDIIYEYGAESFGVQEAKGGRKVPTPPVSRRQQEIKRLVQERRQLKKQWKKASEVEKEGIEALQADIKTRLASLRRAENLRKRRRKKEQTRTRFYKDPFKFLKSLFTKEKSGVLKTTKKDLEEHLRTTNFDSKRHEHLAIPSDIPPIEPPEHHIETSPPTWKEVENTVRRARTASAPGPNGVPYKVYKNAPDVLRFLWRLMRTTWQNKIIRKVWRRACGVLIPKEKDAVIISQFRPISLLNVEGKIFFIAQRMAEYLQRNAYVDTSVQKAGISGFSGCLEHSSMIWHQIQMAKVEKRDLHVVFLDLANAFGSVPHELLWSAFRFFHIPDTITTLVKSYFQDLQFCFTTSEFTTSWQCLNVGIMAGCTISPLAFIMAMEVIIRSSKWVAGGQRVDSGFRLPPLRAYMDDITTLTTTVPCTRRLLRKLEENISWARMKIKPSKSRSISIVKGVLCDLKFFIGDDQIPTVSEQPVKSLGRWYDASLKDKDQVQQLRKDISSSLQSIDNTQLPGKLKAWCLQFGLLPRVLWPLAVYEVPISTVEKMERGATSYLKKWLGVPRCLTTIGLYGDGVLKLPLTSLTEEFKCAKTRLQMTLNESRDPVVSNNAPTLATGRKWRPGKAVQEATAAFRHADIVGHVQQGRGGLGLTSRAAWSKATAPERRKMVVQEVRHQEEAARWAKAVSLAKQGQWTRWDSVEKRKISWKDLWATEARRLSFSIRATYDILPTPVNLHQWYGEDPDCALCSMPANLRHILTGCKTSLTQGRYTWRHNQVLKNLASALEDKRAATNSLPPPAASHPLRTTFVREGAKPPKSGSTPIERDQLRLARDWKMLADIGRQLVFPPEIATTTLRPDVVLWSRSLKKVFIIELTVPWEASVDEAYERKHLRYADLAAEARHHGWNTEVRPVEVGCRGFVATSTTRLLRDLGIKGQSQRSAIKAVSEAAEGSSQWLWMKRKDPSWAPK

SEQ ID NO: 26578 - protein, 1041 aa, Lethenteron reissneri
MEDVNSSTEVTTEVEPTTGVELTQPPRPAVERRLPGHRLYVKWPGASDKKLWETVNTDLTLTLEKLRGTVEKKLERMGDIIYEYGAESFGVQEAKGGRKVPTPPVSRRQQEIKRLVQERRQLKKQWKKASEVEKEGIEALQADIKIRLASLRRAENLWKRRRKKEQTRTRFYKDPFKFLKSLFTKEKSGVLKTTKKDLEEHLRTTNFDSKRHEHLAIPSDIPPIEPLEHHIETSPPTWKEVENTVRRARTASAPGPNGVPYKVYKNTPDVLRFLWRLMGTAWQKKIIPKVWRRAGGVLIPKEKDAVNNSQFRPISLLNVEGKIFFRVIAQRMAEYLQRNAYVDTSVQKAGISAFSGCLEHSSIIWHQIQMAKVEKRDLHVVFLDLANTFGSVPHELLWSAFNFFHIPDTITTLVKSYFQDLQFCFTTSEFTTSWQCLNVGIMAGCTISPLAFIMAMEVIIRSSKWVAGGQRVDSGFRLPPLRAYMDDITTLTTTVPCTRRLLRKLEENISWARMKIKPSKSRSISIVKGVLCDLKFFIGDDQIPTVSEQPVKSLGRWYDASLKDKDQVQQLRKDISSSLQSIDNTQLPGKLKAWCLQFGLLPRVLWPLAVYEVPISTVEKMERGVTSYLKKWLGVPRCLTTIGLYGDGVLKLPLTSLTEEFKCAKTRLQMTLNESRDPVVSNNAPTLATGRKWRPGKAVQEATAALRHADIVGHVQQGRGGLGLTSRAAWSKATAPERRKMVVQEVRHQEEAARWAKAVSLAKQGQWTRWDSVEKRKISWKDLWAMEARRLSFSIRATYDVLPTPVNLHQWYGEDPDCALCSMPANLRHILTGCKTSLTQGRYTWRHNQVLKNIESALEDKRAATNSLPPPAASHPLRMTFVREGAKPPKSGSTPIERDQLRLARDWKMLSDIGRQLVFPPEIATTTLRPDMVLWSRSLKKVFIIELTVPWEDPVDEAYERKHLRYADLAAEARHHGWNIEVRPVEVGCRGFVATSTTRLLRDLGIKGQSQRSAIRAVSEAAEGSSQWLWMKRKDPSWAPK

SEQ ID NO: 26579 - protein, 1137 aa, Oncorhynchus mykiss
MVTTGPETTTSNESTAQENTTATVTSSAATAGHKQMQVCVCGWRKVTSHHGLRIHQGKKGCLGKERQRPRIDYFLRKRSNQSNEAQQLDANHSLQCISTTVMEDVNSSTEVTTEVEPTTGVELTEPPRPAVERRLPGHRPYVKWPGASDKKLWETVNTDLTLTLEKLRGTVEKKLERMGDIIYEYGTERFGVEEAKGGRKVPTPPVSRRQQEIKRLVQERRQLKKQWKKASEVEKEGIEALQADIKTRLASLRRAENLRKRRRKKEQTRTRFYKDPFKFLKSLFTKEKSGALKTTKKDLEEHLRTTNFDSKRHEHLAIPSEPPEHHIETSPPTWKEVENTVRWARTASAPGPNGVPYKVYKNAPDVLRFLWRLMRTAWKNKIIPKVWRRAGGVLIPKEKDAVNISQFRPISLLNVEGKIFFRVIAQRMAEYLQRNAYVDTSVQKAGISGFSGCLEHSSMIWHQIQMAKVEKRDLHVVFLDLANAFGSVPHELLWSAFRFFHIPDTITTLVKSYFQDLQFCFTTSEFTTAWQCLNVGIMAGCTISPLAFIMAMEVIIRSSKWVAGGQRVDSGFRLPPLRAYMDDITTLTTTVPCTRRLLRKLEENISWARMKIKPSKSRSISIVKGVLSDLKFFIGDDQIPTVSEQPVKSLGRWYDASLKDKDQVQQLRKDISSSLQSIDNTQLPGKLKAWCLQFGLLPRVLWPLAVYEVPISTVEKMERGVTGYLKKWLGVPRCLTTIGLYGDGVLKLPLTSLTEEFKCSKTRLQMTLNESRDPVVSNNAPTLATGRKWRPGKAVQEATAALRHADIVGHVQQGRGGLGLTSRAAWSKATAPERRKMVVQEVRHQEEAARWAKAVSLSKQGQWTRWDSVEKRKISWKDLWAMEARRLSFSIRATYDVLPTPVNLHQWYGEDPDCALCSMPANLRHILTGCKTSLTQGRYTWRHNQVLKNLASALEDKRAATNSLPPPAASHPLRTNFVREGAKPPKRGSTPLERDQLRLARDWKMLADIGRQLVFPPEIATTTLRPDMVLWSRSLKKVFIIELTVPWEDSVDEAYERKHLRYADLAAEARHHGWNTEVRPVEVGCRGFVATSTTRLLRDLGIKGQSQRSAIKAVSEAAEGSSQWLWMKRKDPSWAPK

SEQ ID NO: 26580 - protein, 1053 aa, Oncorhynchus gorbuscha
MTLILQCISTTVMEDVNSSTEVATEVEPTTEVELTQPPRPAVERRLPGHRPYVKWPGASDKKLWETVNTDLTLTLEKLRGTVEKKLERMGDIIYEYGTERFGVEEAKGGRKVPTPPVSRRQQEIKRLVQERRQLKKQWKKASEVEKEGIEALQADIKTRLASLRRAENLRKRRRKKEQTRTRFYKDPFKFLKSLFTKEKSGALKTTKKDLEEHLRITNVDSKRHEHLAIPSDIPPIEPPEHHIETSPPTWKEVEDTVRRARTASGPGPNGVPYKVYKNTPDVLRFLWRLMRTAWQKKIIPKVWRRAGGVLIPKEKDAVNISQFRPISLLNVEGKIFFRVIAQRMAEYLQRNTYVDASVQKAGISGFSGCLEHSSMIWHQIQMAKVEKRDLHVVFLDLANAFGSVPHELLWSAFRFFHIPDTITNLVKSYFQDLQFCFTTSEFTTSWQCLNVGIMAGCTISPLAFTMAMEVIIRSSKWVAGGQRVDSGFRLPPLRAYMDDITTLTTTVPCTRRLLRKLEENISWARMKIKPSKSRSISIVKGVLSDLKFFIGDDQIPTVSEQPVKSLGRWYDASLKDKDQVQQLRKDISSSLQSIDNTQLPGKLKAWYLQFGLLPRVLWPLALYEVPISTVEKMERGVTGYLKKWLGVPRCLTTIGLYGDGVLKLPLTSLTEEFKCAKTRLQMTLNESRDPVVSNNAPTLATGRKWRPGKAVQEATAALRHADIVGHVQQGRGGLGLTSRAAWSKATAPERRKMVVQEVRHQEEAARWAKAVSLAKQGQWTRWDSVEKRKISWKDLWAMEARRLSFSIRATYDVLPTPVNLHQWYGEDPDCALCSMPANLRHILTGCKTSLAQGRYIWRHNQVLKNLASALEDKRAATNSLPPTAASHSLRTNFVREGAKPPKSGSTTLERDQLRLARDWKMLADIGRQLVFPPEIATTTLRPDMVLWSRSLNKVFIIELTVPWENSVDEAYERKHLRYADLAAEARHHGWNTEVRPVEVGCRGFVATSTTRLLRDLGIKGQSQRLAIKAVSEAAEGSSQWLWMKRKDPSWAPK

SEQ ID NO: 26581 - protein, 1179 aa, Oncorhynchus kisutch
MRRSMLETPALATESQHTRIPLESARAGAEDDSSADNMVTTGPETTTSNESTAQENTTATVTSSAATAGHKQMQVCVCGWRKVTSHHGLRIHQGKKGCLGKERQRPRIDYFLRKRSNQSNEAQQLDANHSLQCISTTVMEDVNSSTEVTTEVEPTTVVELTEPPRPAVERRLPGHRPYVKWPGASDKKLWETVNTDLTLTLETLRGTVEKKLERMGDIIYEYGTERFGVEEAKGGRKVPTPPVSRRQQEIKRLVQERRQLKKQWKMASEVEKEGIEALQADIKTRLASLRRAENLRKHRRKKEQTRTRFYKDPFKFLKSLFTKEKSGALKTTKKDLEEHLRTTNFDSKRHEHLAIPSDIPPIEPPEHHIETSPPTWKEVENRVRRARTASAPGPNGVPYKVYKNAPDVLRFLWRLMRTVWKNKIIPKVWRRAGGVLIPKEKDAVNISQFRPISLLNVECKIFFRVIAQRMAEYLQRNAYVDTSVQKAGISGFSGCLEHSSMIWHQIQMAKEEKRDLHVVFLDLANAFGSVPHELLWSAFRFFHIPDTITTLVNSYFQDLQFCFTTPEFTTSWQCLNVGIMAGCTISPLAFIMAMEVIIRSSKWVAGGQRVDSGFRLPPLRAYMGDITTLTTTVPCTRRLLRKLEENISWARMKIKPSKSRSISIVKGVLSDLKFFIGDDQIPTVSEQPVKSLGRWYDASLKDKDQVQQLRKDISSSLQSIDNTQLPGKLKAWCLQFGLLPRVLWPLAVYEVPISTVEKMERGVTGYLKKWLGVPRCLTTIGLYGDGVLKLPLTSLTEEFKCSKTRLQMTLNESRDPVVSNNAPTLATGRKWRPGKAVQEATAALRHADIVGHVQQGRGGLGLTSRAAWSKATAPERRKMVVQEVRHQEEAARWAKAVSLSKQGQWTRWDSVEKRKISWKDLWAMEARRLSFSIRATYDVLPTPVNLHQWYGEDPDCALCSMPANLRHILTGCKTSLTQGRYTWRHNQVLKNLASALEDKRAATNSLPPPAASHPLRTNFVREGAKPPKRGSTPLERDQLRLALDWKMLADIGRQLVFPPEIATTTLRPDMVLWSRLLKKVFIIELTVPWEDSVDEAYERKHLRYADLAAEARHHGWNTEVRPVEVGCRGFVATSTTRLLRDLGIKGQSQRSAIKAVSEAAEGSSQWLWMKRKDPSWAPK

SEQ ID NO: 26582 - protein, 1179 aa, Lethenteron reissneri
MLRSMLETPDLATESQHTRIPLESARAGAEDDSSTDNMVTTGPETTTSNESTAQENTTATVTSSAATAGHKQMQVCVCGWRKVTSHHGLRIHQGKKGCLGKERQRPRIDYFLRKRSNQSNEAQQLDANHSLQCISTTVMEDVNSSTEVTTEVEPTTGVELTQPPRPAIERRLPGHRPYVKWPKASDKKLWETVNTDLTLTLEKLRGTVEKKLERMGDIIYEYGAESFGVQEAKGGRKVPTPPVSRRQQEIKRLVQERRQLKKQWKKASEVEKEGIEALQADIKTRLASLRRAENLRKRRRKKEQTRTRFYKDPFKFLKSLFTKEKSGVLKTTKKDLEEHLRTTNFDSKRHEHLAIPSDIPPIEPPEHHIETSPPTWKEVENTVRRARTASAPGPNGVPYKVYKNAPDVLRFLWRLMRTAWQKKIIPKVWRRAGGVLIPKEKDAVNISQFRPISLLNVEGKIFFRIIAQRMAEYLQRNAYVDTSVQKAGISGFSGCLEHSSMIWHQIQMAKVEKRDLHVVFLDLANAFGSVPHELLWSAFRFFHIPDTITTLVKSYFQDLQFCFTTSEFTTSWQCLNVGIMAGCTISPLAFIMAMEVIIRSSKWVAGGQRVDSGFRLPPLRAYMDDITTLTTTVPCTRRLLRKLEENISWARMKIKPSKSRSISIVKGVLCDLKFFIGDDQIPTVSEQPVKSLGRWYDASLKDKDQVQQLRKDISSSLQSINNTQLPGKLKAWCLQFGLLPRVLWPLAVYEVPISTVEKMERGATSYLKKWLGVPRCLTTIGLYGDGVLKLPLTSLTEEFKCAKTRLQMTLNESRDPVVSNNAPTLATGRKWRPGKAVQEATAALRHADIVGHVQQGRGGLGLTSRAAWSKATAPERRKMVVQEVRHQEEAARWAKAVSLAKQGQWTRWDSVEKRKISWKDLWAMEARRLSFSIRATYDILPTPVNLHQWYGEDPDCALCSMPANLRHILTGCKTSLTQGRYTWRHNQVLKNLASALEDKRAATNSLPPPAASHPLRTTFVREGAKPPKSGSTPIERDQLRLARDWKMLADIGRQLVFPPEIATTTLRPDMVLWSSSLKKVFIIELTVPWEDSVDEAYERKHLRYADLAAEARHHGWNTEVRPVEVGCRGFVATSTTRLLRDLGIKGQSQRSAIRAVSEAAEGSSQWLWIKRKDPSWAPK

SEQ ID NO: 26583 - protein, 1041 aa, Lethenteron reissneri
MEDVNSTTEVTTEVEPTTEVELTQPPRPTVERRLPGYRPYVKWPGASDKKLWETVNTDLTLTLEKLRGTVEKTLERMGDIIYEYGAESFGVQEAKGGRKVPTPPVSRRQQEIKRLVQERRQLKKQWKKASEVEKEGIEALQADIKTRLASLRRAENLRKRIRKKEQTRTRFYKDPFKFLKSLFTKEKIGALKTTKKDLEEHLRTTNFDSKRHEHLAIPSDIPPIEPPEHHIETSPPTWKEVENTVRRARTASAPGPNGVPYKVYKNAPDVLRFLWRLMRTAWQKKIIPKVWHRAGGVLIPKEKDAVNISQFRPISLLNIEGKIFFRVIAQRMTEYLQRNTYVDTSVQKAGISGFSSCLEHSSMIWHQIKMAKVEKRDLHVVFLDLANAFGSVPHELLWSAFRFFHIPDTITTLVKSFFQDLQFCFTTSEFTTSWQCLNVGIMAGCTISPLAFIMAMEVIIRSSKWVAGGQRVDSGFRLPPLRAYMNDITTLTTTVPCTRRLRRKLEENISWARMKIKPSKSRSISIVKGVLSDLKFFIGDDQIPTVSEQPVKSLGRWYDASLKDKDQVQQLRKDISSSLQSIENTQLAGKLKAWCLQFGLLPRVLWPLAVYEVPISTVEKMERGVTGYLKKWLGVPRCLTSIGLYGDGVLKLPLTSLTEEFKCAKTRLQMTLNASRDPVVSNNALTLATGRKWRPGKAVQEATAALRHADIVGHVQQGRGGLGLTSRAAWSKATAPERREMVVQEVRHQEEVARWAKAVSLAKQGQWTRWDRVDKRKISWKDLWAMEVRRLSFSIRATYDVLPTPVNLHQWYGEDPDCALWSMPANLRHILTGCITSLTQGRYTWRHNQVFKNLVSALEDKRAATNSLPPPAASHPLRTTFVREGAKPPKSGSTPLERDQLRLARDWKMLADIGRQLVFPPEIATTPLRPDMVLWSRSLKKVFIIELTVPWEDSVDEAYERKHLRYADLAAEALHHGWNTEVRPVEVGCRGFMATSTSRLLRDLGIKGESQRSTIRAVSEAAEGSSQWLWMKRKDPSWAPK

SEQ ID NO: 26584 - protein, 1099 aa, Oncorhynchus gorbuscha
MCLWLEESYITPWVEDPPGKKGCLGKERQRTRIDYFLRKRSNQSNEAQQLDANHSLQCISTTVMEDVNSSTEVATEVEPTTGVELTQPPRPAVERRLPGHRPYVKWPGASDKKLWETVNTDLTLTLEKLRGTVEKKLERMGDIIYEYGTERFGVEEAKGGRKVPTPPVSRRQQEIKRLVQERRQLKKQWKKASEVEKEGIEALQADIKTRLASLRRAENLRKRRRKKEQTRTRFYKDPFKFLKSLFTKEKSGALKTTKKDLEEHLRITNVDSKRHEHLAIPSDIPPIEPPEHHIETSPPTWKEVEDTVRRARTASGPGPNGVPYKVYKNTPDVLRFLWRLMRTAWQKKIIPKVWRRAGGVLIPKEKDAVNISQFRPISLLNVEGKIFFRVIAQRMAEYLQRNTYVDASVQKAGISGFSGCLEHSSMIWHQIQMAKVEKRDLHVVFLDLANAFGSVPHELLWSAFRFFHIPDTITNLVKSYFQDLQFCFTTSWQCLNVGIMAGCTISPLAFTMAMEVIIRSSKWVAGGQRVDSGFRLPPLRAYMDDITTLTTTVPCTRRLLRKLEENISWARMKIKPSKSRSISIVKGVLSDLKFFIGDDQIPTVSEQPVKSLGRWYDASLKDKDQVQQLRKDISSSLQSIDNTQLPGKLKAWCLQFGLLPRVLWPLALYEVPISTVEKMERGVTGYLKKWLGVPRCLTTIGLYGDGVLKLPLTSLTEEFKCAKTRLQMTLNESRDPVVSNNAPTLATGRKWRPGKAVQEATAALRHADIVGHVQQGRGGLGLTSRAAWSKATAPERRKMVVQEVRHQEEAARWAKAVSLAKQGQWTRWDSVEKRKISWKDLWAMEARRLSFSIRATYDVLPTPVNLHQWYGEDPDCALCSMPANLRHILTGCKTSLAQGRYTWRHNQVLKNLASALEDKRAATNSLPPTAASHSLRTNFVREGAKPPKSGSTPLERDQLRLARDWKMLADIGRQLVFPPEIATTTLRPDMVLWSRSLNKVFIIELTVPWENSVDEAYERKHLRYADLAAEARHHGWNTEVRPVEVGCRGFVATSTTRLLRDLGIKGQSQRSAIKAVSEAAEGSSQWLWMKRKDPSWAPK

SEQ ID NO: 26585 - protein, 1179 aa, Oncorhynchus kisutch
MRRSMLETPALATESQHTRIPLESARAGAEDDSSADNMVTTGPETTTSNESTAQENTTATVTSSAATAGHKQMQVCVCGWRKVTSHHGLRIHQGKKGCLGKERQRPRIDYFLRKRSNQSNEAQQLYANHSLQCISTTVMDDVNSSTEVTTEVEPTTGVELTEPPRPAVERRLPGHRPYVKWPGASDKKLWETVNTDLTLTLEKLRGTVEKKLERMGDIIYEYGTERFGVEEAKGGRKVPTPPVSRRQQEIKRLVQERRQLKKQWKKASEVEKEGIEALQADIKTRLASLRRAENLRKRRRKKEQTRTRFYKDPFKFLKSLFTKEKSGALKTTKKDLEEHLRTTNFDSKRHEHLAIPSDIPPIEPPEHHIETSPPTGKEVENTVRGARTASAPGPNGVPYKVYKNAPDVLRFLWRLMRTAWKNKIIPKVWRRAGGVLIPKEKDAVNISQFRPISLLNVEGKIFFRVIAQRMAEYLQRNAYVDTSVQKAGISGFSGCLEHSSMIWHQIQMAKVEKRDLHVVFLDLTNAFGSVPHELLWSAFRFFHIPDTITTLVKSYFQDLQFCFTTSEFTTSWQCLNVGIMAGCTISPLAFIMAMEVIIRSSKWVAGGQRVDSGFRLPPLRAYMDDITTLTTTVPCTRRLLRKLEENISWARMKIKPSKSRSISIVKGVLSDLKFFIGDDQIPTVSEQPVKSLGRWYDASLKDKDQVQQLRKDISSSLQSIDNTQLPGKLKAWCLQFGLLPRVLWPLAVYEVPISTVEKMERGVTGYLKKWLGVPRCLTTIGLYGDGVLKLPLTSLTEEFKCSKTRLQMTLNESRDTVVSKNAPTLATGRKWRPGKAVQEATAALRHADIVGHVQQGRGGLGLTSRAAWSKATAPERRKMVVQEVRHQEEAARWAKAVSLAKQGQWTRWDSVEKRKISWKDLWAMEARRLSFSIRATYDVLPTPVNLHQWYGEDPDCSLCSMPANLRHILTGCKTSLTQGRYTWRHNQVLKNLASALEDKRAATNSLPPPAASHPLQTNFVREGAKPPKRGSTSLERDQLRLARDWKMLADIGRQLGFPPEIATTTLRPDMVLWSRSLKKVFIIELTVPWEDSVDEAYERKHLRYADLAAEARHHGWNTEVRPVEVGCRGFVATSTTRLLRDLGIKGQSQRSAIKAVSEAAEGSSQWLWMKRKDPSWAPK

SEQ ID NO: 26586 - protein, 1119 aa, Lethenteron reissneri
MFSSAATAGHKQMQVCVCGWRKVTSHHGLRIHQGKKGCLGKERQRPRIDYFLRKRSNQSNEAQQLDANHSLQCISTTVMEDVNSSTEVTTEVEPTTGVELTQPPRPAIERRLPGHRPYVKWPGASDKKLWETVNTDLTLTLEKLRGTVEKKLERMGNIIYEYGAESFGVQEAKGGRKVPTPPVSRRQQEIKRLVQERRQLKKQWKKASEVEKEGIEALQADIKTRLASLRRAENLRKRRRKKEQTRTRFYKDPFKFLKSLFTKEKSGVLKTTKKDLEEHLRTTNFDSKRHEHLAIPSDIPPIEPPEHHIETSPPTWKEVENTVRRARTASAPGPNGVPYKVYKNAPDVLRFLWRLMRTAWQKKIIPKVWRRAGGVLIPKEKDAVNISQFRPISLLNVEGKIFFRIIAQRMAEYLQRNAYVDTSVQKAGISGFSGCLEHSSMIWHQIQMAKVEKRDLHVVFLDLANAFGSVPHELLWSAFRFFHIPDTITTLVKSYFQDLQFCFTTSEFTTSWQCLNVGIMAGCTISPLAFIMAMEVIIRSSKWVAGGQRVDSGFRLPPLRAYMDDITTLTTTVPCTRRLLRKLEENISWARMKIKPSKSRSISIVKGVLCDLKFFIGDDQIPTVSEQPVKSLGRWYDASLKDKDQVQQLRKDISSSLQSIDNTQLPGKLKAWCLQFGLLPRVLWPLAVYEVPISTVEKMERGATSYLKKWLGVPRCLTTIGLYGDGVLKLPLTSLTEEFKCAKTRLQMTLNESRDPVVSNNAPTLATGRKWRPGKAVQEATAALRHADIVGHVQQGRGGLGLTSRAAWSKATAPERRKMVVQEVRHQEEAARWAKAVSLAKQGQWTRWDSVEKRKISWKDLWAMEARRLSFSIRATYDILPTPVNLHQWYGEDPDCALCSMPANLRHILTGCKTSLTQGRYTWRHNQVLKNLASALEDKRAATNSLPPSAASHPLRTTFVREGAKPPKSGSTPIERDQLRLACDWKMLADIGRQLVFPPEIATTTLRPDMVLWSRSLKKVFIIELTVPWEDSVDEAYERKHLRYADLAAEAHHHGWNTEVRPVEVGCRGFVATSTTRLLRDLGIKGQSQRSAIKAVSEAAEGSSQWLWMKRKDPSWAPK

SEQ ID NO: 26587 - protein, 1041 aa, Lethenteron reissneri
MEDVNSTTEVTTEVEPTTEVELTQPPRPTVERRLPGYRPYVKWPGASDKKLWETVNTDLTLTLEKLRGTVEKTLERMGDIIYEYGAESFGVQEAKGGRKVPTPPVSRRQQEIKRLVQERRQLKKQWKKASEVEKEGIEALQADIKTRLASLRRAENLRKRIRKKEQTRTRFYKDPFKFLKSLFTKEKIGALKTTKKDLEEHLRTTNFDSKRHEHLAIPSDIPPIEPPEHHIETSPPTWKEVENTVRRARTASAPGPNGVPYKVYKNAPDVLRFLWRLMRTAWQKKIIPKVWHRAGGVLIPKEKDAVNISQFRPISLLNIEGKIFFRVIAQRMTEYLQRNTYVDTSVQKAGISGFSSCLEHSSMIWHQIKMAKVEKRDLHVVFLDLANAFGSVPHVLLWSAFRFFHIPDTITTLVKSFFQDLQFCFTTSEFTTSWQCLNVGIMAGCTISPLAFIMAMEVIIRSSKWVAGGQRVDSGFRLPPLRAYMNDITTLTTTVPCTRRLRRKLEENISWARMKIKPSKSRSISIVKGVLSDLKFFIGDDQIPTVSEQPVKSLGRWYDASLKDKDQVQQLRKDISSSLQSIENTQLAGKLKAWCLQFGLLPRVLWPLAVYEVPISTVEKMERGVTGYLKKWLGVPRCLTSIGLYGDGVLKLPLTSLTEEFKCAKTRLQMTLNASRDPVVSNNALTLATGRKWRPGKAVQEATAALRHADIVGHVQQGRGGLGLTSRAAWSKATAPERREMVVQEVRHQEEVARWAKAVSLAKQGQWTRWDRVDKRKISWKDLWAMEVRRLSFSIRATYDVLPTPVNLHQWYGEDPDCALWSMPANLRHILTGCITSLTQGRYTWRHNQVFKNLVSALEDKRAATNSLPPPAASHPLRTTFVREGAKPPKSGSTPLERDQLRLARDWKMLADIGRQLVFPPEIATTPLRPDMVLWSRSLKKVFIIELTVPWEDSVDEAYERKHLRYADLAAEALHHGWNTEVRPVEVGCRGFMATSTSRLLRDLGIKGESQRSTIRAVSEAAEGSSQWLWMKRKDPSWAPK

SEQ ID NO: 26588 - protein, 1107 aa, Oncorhynchus gorbuscha
MQVCVCGWRKVTSHHGLRIHQGKKGCLGKERQRTRIDYFLRKRSNQSNEAQQLDANHSLQCISTTVMEDVNSSTEVATEVEPTTGVELTQPPRPAVERRLPGHRPYVKWPGASDKKLWETVNTDLTLTLEKLRGTVEKKLERMGDIIYEYGTERFGVEEAKGGRKVPTPPVSRRQQEIKRLVQERRQLKKQWKKASEVEKEGIEALQADIKTRLASLCRAENLRKRRRKKEQTRTRFYKDPFKFLKSLFTKEKSGALKTTKKDLEEHLRITNVDSKRHEHLAIPSDIPPSEPPEHHIETSPPTWKEVEDTVRRARTASGPGPNGVPYKVYKNTPDVLRFLWRLMRTAWQKKIIPKVWRRAGGVLIPKEKDAVNISQFRPISLLNVEGKIFFRVIAQRMAEYLQRNTYVDASVQKAGISGFSGCLEHSSMIWHQIQMAKVEKRDLHVVFLDLANAFGSVPHELLWSAFRFFHIPDTITNLVKSYFQDLQFCFTTSEFTTSWQCLNVGIMAGCTISPLAFTMAMEVIIRSSKWVAGGQRVDSGFRLPPLRAYMDDITTLTTTVPCTRRLLRKLEENISWARMKIKPSKSRSISIVKGVLSDLKFFIGDDQIPTVSEQPVKSLGRWYDASLKDKDQVQQLRKDISSSLQSIDNTQLPGKLKAWCLQFGLLPRVLWPLALYEVPISTVEKMERGVTGYLKKWLGVPRCLTTIGLYGDGVLKLPLTSLTEEFKCAKTRLQMTLNESRDPVVSNNAPTLATGRKWRPGKAVQEATAALRHADIVGHVQQGRGGLGLTSRAAWSKATAPERRKMVVQEVRHQEEAARWAKAVSLAKQGQWTRWDSVEKRKISWKDLWAMEARRLSFSIRATYDVLPTPVNLHQWYGEDPDCALCSMPANLRHILTGCKTSLAQGRYTWRHNQVLKNLASALEDKRAATNSLPPTAASHSLRTNFVREGAKPPKSGSTPLERDQLRLARDWKMLADIGRQLVFPPEIATTTLRPDMVLWSRSLNKVFIIELTVPWENSVDEAYERKHLRYADLAAEARHHGWNTEVRPVEVGCRGFVATSTTRLLRDLGIKGQSQRSAIKAVSEAAEGSSQWLWMKRKDPSWAPK

SEQ ID NO: 26589 - protein, 1179 aa, Oncorhynchus kisutch
MRHSMLETPALATESQHTRIPLESARAGAEDDSSADNMVTTGPETTTSNESTAQENTTATVTSSAATAGHKQMQVCVCGWRKVTSHHGLRIHQGKKGCLGKERQRPRIDYFLRKRSNQSNEAQQLDANHSLQCISTTVMEDVNSSTEVTTEVEPTTGVELTEPPRPAVERRLPGHRPYVKWPGASDKKLWETVNTDLTLTLEKLRGTVEKKLERMGDIIYEYGTERFGVEEAKGRRKVPTPPVSRRQQEIKRLVQERQQLKKQWKKASEVEKEGIEALQADIKTRLASLRRAENLRKRRRKKEQTRTRFYKDPFKFLKSLFTKEKSGALKTTKKDLEEHLRTTSFDSKRHEHLAIPSDIPPIEPPEHHIETSPPTWKEVENTVRGARTASAPGPNGVPYKVYKNAPDVLRFLWRLMRTAWKNKIIPKVWRRAGGVLIPKEKDAVNISQFRPISLLNVEGKIFFRVIAQRMAEYLQRNAYVDTSVQKAGISWFSGCLEHSSMIWHQIQMAKVEKRDLHLVFLDLANVFGSVPHELLWSAFRFFHIPDTITTLVKSYFQDLQFCFTTSEFTTSWQCLNVGIMAGCTISPLAFIMAMEVIIRSSKWVAGGQRVDSGFRLPPLRAYMDDITTLTTTVPCTRRLLRKLEENISWARTKIKPSKSRSISIVKGVLSDLKFFIGDDQIPTVSEQPVKSLGRWYDASLKDKDQVQQLRKDISSSLQSIDNTQLPGKLKAWCLQFGLLPRVLWPLAVYEVPISTVEKMERGVTGYLKKWLGVPRCLTTIGLYGDGVLKLPLTSLTEEFKCSKTRLQMTLNESRDPVVSNNAPTLATGRNWRPGKAVQEATAALRHADIVGHVQQGRGGLGLTSRAAWSKATAPERRKMVVQEVRHQEEAARWAKAVSLSKQGQWTRWDSVEKRKISWKDLWAMEARRLSFSIRATYDVLPTPVNLHQWYGEDPDCALCSMPANLRHILTGCKTSLTQGRYTWRHNQVLKNLASALEDKRAATNSLPPPAASHPLWTNFVREGAKPPKRGSTPLERDQLRLARDWKMLADIGRQLVFPPEIATTTLRPDMVLWSRSLKKVFIIELTVPWEDSVDEAYERKHLRYADLAAEARHHGWNTEVRPVEVGCRGFVATSTTRLLRDLGIKGQSQRSAIKAVSEAAEGSSQWLWMKRKDPSWAPK

SEQ ID NO: 26590 - protein, 1179 aa, Lethenteron reissneri
MLRSMLETPALATESQHTRIPLESARAGAEDDSSTDNMVTTGPETTTSNESTAQENTTATVTSSAATAGHKQMQVCVCGWRKVTSHHGLRIHQGKKGCLGKERQRPRIDYFLRKRSNQSNEAQQLDANHSLQCISTTVMEDVNSSTEVTTEVEPTTGVELTQPPRPAVERRLPGHRPYVKWPGASDKKLWETVNTDLTLTLEKLRGTVEKKLERMGDIIYEYGAESFGVQEAKGGRKVPTPPVSRRQQEIKRLVQERRQLKKQWKKASEVEKEGIEALQADIKTRLASLRRAENLRKRRRKKEQTRTRFYKDPFKFLKSLFTKEKSGVLKTTKKDLEEHLRTTNFDSKRHEHLAIPSDIPPIEPPEHHIETSPPTWKEVENTVRRARTASAPGPNGVPYKVYKNAPDVLRFLWRLMGIAWKKKIIPKVWRRAGGVLIPKEKDAVNISQFRPISLLNVEGKIFFRVIAQRMAEYLQRNAYVDTSVQKAGISGFSGCLEHSSMIWHQIQMAKVEKRDLHVVFLDLANAFGSVPHELLWSAFRFFHIPDTITTLVKSYFQDLQFCFTTSEFTTSWQCLNVGIMAGCTISPLAFIMAMEVIIRSSKWVAGGQRVDSGCRLPPLRAYMDDITTLTTTVPCTRRLLRKLEENISWARMKIKPSKSRSISIVKGVLCDLKFFIGDDQIPTVSEQPVKSLGRWYDSSLKDKDQVQQLRKDISSSLQSIDNTQLPGKLKAWCLQFGLLPRVLWPLAVYEVPISTVEKMERGVTGYLKKWLGVPRCLTTIGLYGDGVLKLPLTSLTEEFKCAKTRLQMTLNESRDPVVSNNAPTLATGRKWRPGKAVQEATAALRHADIVGHVQQGRGGFGLTSRAAWSKATAPERRKMVVQEVRHQEEAARWAKAVSLAKQGQWTRWDSVGKRKISWKDLWAMEARRLSFSIRATYDVLPTPVNLHQWYGEDPDCALCSMPANLRHILTGCKTSLTQGRYTWRHNQVLKNLASALEDKRTATNSLPPPAASHPLRMTFVREGAKPPKSGSTPIERDQLRLARDWKMLADIGRQLVFPPEIATTTLRPDMVLWSRSLKKVFIIELTVPWEDSVDEAYERKHLRYADLAAEARHHGWNTEVRPVEVGCRGFVATSTTRLLRDLGIKGQSQRSAIRAVSEAAEGSSQWLWMKRKDPSWAPK

SEQ ID NO: 26591 - protein, 1027 aa, Sander lucioperca
MEEVPSSTETVTSENPTQLSRPTIKRRLVGHRTRVKWPAAADKKQWEAINSDLSQTLKQLNGTVEKKLERMGDIIRQYGAERFGIQEGKGQKKSPTAPTSRRQQEIKCLIQQRRQLRKQWKKALEGEKEGIEVLQADIKKRVASLRRAENLRKRRRKKERSRTQFYKDPFKFLKSLFIREKSGSLKAARKDLEDHLKMTHSDPRRHERMTIPPDIPPIRSPGHQMETGPLTWREVEKAVQRARAASAPGPNGVPYKVYKNAPDVLRFLWKVMRTVWQRKMVPKVWRRAGGVLIPKEKKAENISPFRPISLLNVEGKIFFSVIAKRMSEYLQRNKYIDTSVQKAGISGFSGCLEHSSMIWHQIQTAKERKNDLHVVVLDLANAFGSVPHELLWTAFTFFHIPDTITTLVKSYFQDLQFCFTTADFTTSWQSLEVGIMAGCTISPLAFTMAMEVIIRASKWVVGGQRLNSGTRLPPLRAFMDDITTLTTTAPCTRKLLGKLEENIRACMKIKPSKSRSISIVKGLLSDCRFFIGEEPIPTVSDQPVKSLRRSQDQVQQLRKEIRSGLQAIDNTQLPGRLKAWCLQFGLLPRVLWPLTIFEVPISTVEKLERGITGYINKWLGVPRCLTTICLYGDCALKLPLTSLIEEFKCAKVRLQITLNESCDAMVGNNAPSLVAGRKWRPASPVEDAAASLRLADIVGHVQQGRGGLGLTTRLPAWNTAAPLWNGGNWWWRKYIGRRKQQGGPRQSHLVNRDSGHVGSVERRRISWKELWSMEAKRISFIIRATYDVLPTPTNLHQWLGEDPGCALCSRPASHKHILTGCRVSLTQGCYTWRHNQVLKILAATLENKRTASNSLPPSALNLPQINFVRMGAKVARCSPSSMEHGQLRGVCDWKMLVDVGRRLVFPPEIAITTLRPDIVLWSPSLKKVFIIELTVPWEDSVDEAYERKQLRYAELAAEAQYRGWKTEVRPVEVGYRGFVAVSTTRMLRDLEIRSQNLRQAIKAMSEATERSSQWLWIKRQDSCWAPA

SEQ ID NO: 26592 - protein, 932 aa, Styela clava
MTLGTAKILPHRTLDAIKSRTKRAEFKSMKLQIVKPTETTTEDSRTPEKQSSEEHPEVAASESSWKEVIWTYLDSLGRADHTSWGAPLLDEAIHHRLDGDELRSILDEHASEMTSRSSASHRGSHKPSGRKPPSGKLSNRLQRRLEYKKVQALYRKKRTSCAELVLSGGWKTNTNARNGPTKEELTSFWKKTMEAPKIEDNRPVTPIRSTAWETVKPITRETILDTIKGSCESSPGPDGVSLRMLKSIPLTTITKMFNLWMLSCSQPRALRRSRTILIPKVPSPTNPGEFRPITIGPMISRVYHKILGRRLGECFPLQPVQRAFRPTDGCAENIMLLDALLDNARQLHNPLQIAFLDLRKAFDSVHHSSIRRAAIRMGTPPPMVAYLTSCYIEATTTIHGVEIHQTTGVKQGDPLSPILFNAVLDEAFSALEDLGPTIEGQRVPALGLADDAIIATETGTALQHQVDLFLEETRKSGLRPNASKCSTLSIKVDGKRKRWVVDKEQSITVEGEVVPTMGPEGVYKYLGINIGAQGRRGMLGSKLHQGLEQLSHAPLKPQQRLYLLRAHLIPKVSYVGVLGRTSMTELRRLDRHLRHRVRAWLRLPKDTPTPYFHADAKDGGLGIPSLATSIGLMKTVRFSRMATSNEPIVQAISRHPHIQRLLTRWSSAKVQGTPVNNKEETKKTWAKNLHNTIDGAGLAEAGLVSHVHRWVTDGTKLLSGRNFIDAVKIRGNLVGTRSRSSRGRPETDPYCPHQHCHPHKRRETLGHISQQCPGLWGLRIRRHNRLLQLVAGRLKQKGMRTLIEPSIPTPAGVRKPDLICWSQLQDAWVLDAQVISDSSAGPISSGHKRKIDYYNNTSIRQYVARETNVPADRVKFSSITINWRGCWCPQSAKDLERLGIRRADLMLMSVRTLEDTSYMCNTRRRASGRQGE

SEQ ID NO: 26593 - protein, 911 aa, Conopomorpha cramerella
MGRMHRRDNSNIQSHSAPLSGVVPSSCSTDSPLSHIDILKKNSRVLKHIPKGARNLAAGKLADLIDICVRDNGTDDWGALLSFAFTALRIPSKDVRQSLTSKVKQNILGIHAADDNNTVDGNRFTSRRSLQSLVEGKVYEGDLRGAVRLLLSDCTIAQPSADIVEILKDKHPSPSRPLDFPEEPNSTSAYLSVELEDVAKSISSFYNGSAAGLDGLRPEHLKELTSVSAGDNGVRLLGSITKLCNAMLRGLVNREVCPYLYGASLCALTKSDGGIRPIAIGNTFRRLVAKLCCHSVRDDISTYLQPQQLGFGTAGGCEAAIHATRAFSFASAGTNDVLVKLDVENAFNSVERDVLLSKARIRVPSLYPFLFQCYSVPTNLFYNEHLISSQVGAQQGDPLGSLLYSLVIHDVVQRLASPLNIWYLDDGVLGGSPEVVCRDIHVLIREFELFGLKFNPTKCEIYSYRQDNTASLNLISSVLPGVRVLSKESLTILGAPILSEAIPHVMRDKITALEAACKMLKQLSAHVALTLLRGCLSLPMVTYTLRTAPVWRCSLEIANYDGILKSILEDILNVHLDQSQWQQAVLPVRHGGLGIRCIRDAGLPAFLASAHGVEDLVARILPSHGDKNPLPHVSEGLTIWQSQHENCGIPEQPAIQRQWDDLSSKFILDRLLSGVGGADLARLRAASLPESGSWLHALPSPSLGTYLDDGTLRIAVALRLGCTVCEPHRCACGEWVAANGHHGLSCRRSAGPFSRHYAINDIIKRSLVAANVPCTLEPSGLSRSDGKRPDGLTLIPWEKGRCLLWDATCVSTFAASHLPKCTVSAGSAAETAAVNKHHKYSCLTNSYLFVPIAVEVTGVWCQEGRQFVKKIGQRLRRLGQDNRSGAFLFQRLSLAVQRGNAASVMGTFALT

SEQ ID NO: 26594 - protein, 938 aa, Conopomorpha cramerella
MSTVRSTCPQCPGSTRQFVIPHGLSVHMGRMHRRDNSNIQSHSAPLSGVVPSSCSTDSPLSHIDILKKNSRVLKHIPKGARNLAAGKLADLIDICVRDNGTDDWGALLSFAFTALRIPSKDVRQSLTSKVKQNILGIHAADDNNTVDGNRFTSRRSLQSLVEGKVYEGDLRGAVRLLLSDCTIAQPSADIVEILKDKHPSPSRPLDFPEEPNSTSAYLSVELEDVAKSISSFYNGSAAGLDGLRPEHLKELTSVSAGDNGVRLLESITKLCNAMLRGLVNREVCPYLYGASLCALTKSDGGIRPIAIGNTFRRLVAKLCCHSVRDDISTYLQPQQLGFGTAGGCEAAIHATRAFSFASAGTNDVLVKLDVENAFNSVERDVLLSKARIRVPSLYPFLFQCYSVPTNLFYNEHLISSQVGAQQGDPLGSLLYSLVIHDVVQRLESPLNIWYLDDGVLGGSPEVVCRDIHVLIREFELFGLKFNPTKCEIYSYRQDNTASLNLISSVLPGVRVLSKESLTILGAPILSKAIPHVMRDKITALEAACKMLKQLSAHVALTLLRGCLSLPMVTYTLRTAPVWRCSLEIANYDGILKSILEDILNVHLDQSQWQQAVLPVRHGGLGIRCIRDAGLPAFLASAHGVEDLVARILPSHGDKNPLPHVSEGLTIWQSQHENCGIPEQPAIQRQWDDLSSKFILDRLLSGVGGADLARLRAASLPESGSWLHALPSPSLGTYLDDGTLRIAVALRLGCTVCEPHRCACGEWVAADGHHGLSCRRSAGRFSRHYAINDIIKRSLVAANVPCTLEPSGLSRSDGKRPDGLTLIPWEKGRCLLWDATCVSTFAASHLPKCTVSAGSAAETAAVNKHHKYSCLTNSYLFVPIALEVTGVWCQEGRQFVKKIGQRLRRLGQDNRSGAFLFQRLSLAVQRGNAASVMGTFALT

SEQ ID NO: 26595 - protein, 941 aa, Conopomorpha cramerella
MSVSRGTCPQCPGSSRLFVTPHGLNVHIGRMHSRRVDDQAQQILPEGRTQTTLSPNRSLSNIQVLKRGTRVLKHIPKGARSLAAGSLADIIDKCVRDNNTDDWYSLLSFAYTALKTPGRDNHQSLTSKVKQNILGSVNSDDLAAPVSARPPWFKCRNRKGLVEGKVYEGDVRGAVRILLSDTTIASPSTEVLDALRSKHPSPSRSLLLPEEPNSSSAFLTVQSSDILEALTSFYNGSAAGLDGLRPEHLKELTSTITAGDNGGRLLESLTRLSNFLLQGLLNPEVCPFLYGASLCALSKKCGDIRPIAVGNTFRRLVAKLACRSVKNDVSPFLQPQQLGFGTPLGCEAIIHATRTFAYARKGTDDVVVKLDVRNAFNSVERDVLLSKARERVPTLYPFLYQCYSSPSNLFYDEHVILSQVGVQQGDPLGPLLFSLAIHDVVRRLESPLNAWYLDDGTLGGSPHIVSKDVELLASEFKNLGLRFNVDKCEVFVCDQTKTQSTDLIPLALSGASVLRKENFTILGGPIFPEAIPGVFKQKIKALENARGVLKDVSAHVALILLRSCLSIPMVTYALRTAPVWLCSEEILEYDSLLKSILEEILNVHLDDSQWQQAVLPVRHGGLGVRCTRDTGLPAFLASAHGVGDLVAHILNFNGDVGQLPHVPQALSAWRLRCRDSGVPENPMIQREWDDLLSKTVIGQLMSQFSGANLARLRAVSLPESGQWLHALPSPVLGTLLDDSTLRIAVALRLGSDVCQPHQCVCGAWVEANGHHGLSCRKSAGRFSRHCALNDILKRALATANVPCTLEPSGLSRTDGKRPDGLTLIPWERGRCLLWDATCVSTFAASHLPLTTVSPGAAAESAAGNKHVKYSALTNSYLFVPVAVEVSGVWCRESRKFISEIGRRLRSLGHDDRSTAFLYQRSLAVQRGNAASVMGTFSVQRH

SEQ ID NO: 26596 - protein, 912 aa, Limonius californicus
MQRIERKIKQIRQDLSRMVEYSRGNQRCRLKRQVNDICKRYKIHSIHENENNNLEEFIDTLKQKLAVQSGRLKRYTKSLQRKNQNYQFQNNEKGFYRMMKAATNNNQDNQHIQQNDIPSQQSLHQFWSLMWTHRTEHNDNAQWIKTETNTVTQMDEMVENNINMETFEEIIKNTHNWKAPGSDCIHNYWYKKFTCTYTYILKYINKWLQNPQELPSFLTQGITYLLPKGSITNDPSKYRPITCLQTLYKIITACITKLINSHIETNNILTEEQNGCKKGARGCKEQLIIDAVILKQAQLKHRNLYMSYIDYRKAYDSVPHSWLAKILEIYKINPVIRQFLNHAMEKWQTVIHLKTEQEHVTTDPINIKRGIFQGDSLSALWFCLALNPLSKTLNASKYGFDLKNQVQNHVISHLLYMDDLKIYARTGTQLRQLLRLVELYTADIKMELGLEKCRTLSIQKGKIELIGFETQSGDRIEPMDETDTYKYLGLLQSKQMEHSSIKRLIKDNFTKRLKTILNTKLNTRNIVKAINTYAIPLLTYSFGIVNWTCTDLENLARTIRTKMTDNCMRHKNSSVERCTLPNSEGGMGIIDIQNTYNNQITNLQTYFQNRRNNSQLHKAVCEADIKYTPLNLHDPIIRQVENNNILTEKINRWKSKALHGRHALDLERPEVDKNASNAWLKVGELFPETTGHMIAIQDQVISTKNYKKYILKDATIENDKCRMCHEGTESIQHIIGGCPLLAPNEYLHRHNQVANIIHQALLIKSGLAIGRPTPYYKYTPVKTIEDDNYKLYYDRTIITDRTIQNNRPDIVLQDKVNRVTYIIDIAIPNTHRLRDTLQEKIRKYTELKDEIRRIWDMKKVYIIPIIISATGVIPTALHNYLRILDLNPNIYIQMQKAVILNTCRTVRKFLQQ

SEQ ID NO: 26597 - protein, 1126 aa, Nilaparvata lugens
MKWTREMNISIMHAYYRSTKVETEKEGYRQRMCAEWKQIYPESNLDEQRVCSQLNSIQRRRVLSEAELHQLKQEILIQLEIVPDVLDIEPQGEEQLEEREATEQEIGEAVDERVIMFTEIEDEDNELQMLRDLHIENKLLYTGIDVQDRPHIPRAYCNLKFHQMCTRMDHLLSEEVYTSLEELVSGVQIGALTVCMSLGLKVRKRQTRSETQQKRAKNEESHPPWRRRIEEKIKKARKVISHIAEFLTDGRGCGKKTLSGVKSIAWRMGLRMKDKFFLQKLREEDEHLRQRIAALGSRIRRYNEAAKRRKDETDFATRQRDLYRQLEGDKGSTQQHFPDKKSMEEFWGGIWSVPKQHSQSYWLQDENVALQDVPRMAEVVITAADVKKAISKTQNWKAPGIDGIHNVWWKYLPSTHPVLANLFQEAIQQPDVLKDSFSMGITYMLPKKKDSLDPKDYRPITCLPTIYKLLTSVLTANIHEHLANNELLAPEQNGCRKGSQGCKELLLIDGIISQQVRKRSHNVSVGWVDYRKAFDSVPHSWLRHVLDLYKVSPGIVNFLSGVMTQWTTTLQVGWGSESYRTQGIPIRRGIFQGDSLSPLWFCMALNPLSRMLRDSGYGYVLKRNPQVKVSHSLYMDDLKVYAANQDQLKNMLQLVKNFSDSICMEFGLEKCKVLHVKRGQISGEGDGAIQLTEEVLIQSLGRPHECKYLGLAQLLCRADTVIRREFQRKTVQRLEKVCRTGLSSRNKISAINTWAVPVAMYTFGIVKWTDTALQEFDRKVRTTLTKNRLHHPRSSIQRLYLPRGVGGRGLLSLETMCRQQEDRLRKYFQNANSGLLKAVCLVDREYSPLQLAHGVQQLTASTVEERLEAWKQKELHGRFAAALHSDCVDRKESIEWLQTSGIFGETEGFMFAIQDQVISTRAYKRYVMGLTVDSSCRLCRKAIESIQHICGGCSVLANTEYLQRHNDVAKVVHQAMAKRYELIASEVPYYKCKPEMVLNGEKGRLLWDCCKTTDRAVEANRPDIVLFDRKNKEAYIIDVAVPLDENLVSTIAEKKRKYQPLSVELKDMYKLRKVVIIPIVVSANGLVTKEWRQAMEQLQLENWHMRIMQKAAVLGTTNIVCKFLSL

SEQ ID NO: 26598 - protein, 786 aa, Tenebrio molitor
MNDFDVKGSVRLLSSNDTLATFDDETLEIVKSKHPQPSRKLIFPNVNLTDCQILNVNEIEVKKAINSFPCGSAAGIDGFRPQFLKDMISVSAGEAGQRALSSITLLCNFLLSGKIINEMCPFIFGASLCALKKKDGGIRPIAIGNIFRRLAAKIGCYKLQSDLHSCLTPNQLGVATKLGCESCIHSVRTYVHNPENFGKILLKIDFSNAFNSIERDSMLQQVKDKTPSLFPFLNQCYREPSHLFFGNYIIPSVVGCQQGDPCGPMAFSLTVHPIVESITTELNVWYLDDATIADVPGIVFENFKRIINTAKEVGLHINPNKCELFFCSDTVDEDVLRKFKSLTSEILVVNKNNLELLGSPIFEDGFDFIAKKKIEKVFLLLKNIEQENLNSHTAYFLVKNCLFVPRLNFLLRTSPFWKFPNCIKSIDNAIRNSLQKFLNIKFNENQWTLASLPISNGGLGIRKIQDISLPAFLGSIHGVHDLVFQILPKTDKKVSVHFAEEAIGLWIELNGKTFPTETFLQKRWDIINTTRIIANEINLCDKIDSARFLAAQRKESNAWLHAFPSRNICTFMDNKILQICVANRFGVEIFEKHTCHCGFTVSNDGRHGLSCAKNKGRFSRHSDLNQIIQRALSSIHISSSLEPCGLLRDDGKRPDGATLIPWSKGQRLIWDVTSVDTLADSYIRKTSIIAGSAAEEASKRKHDKYKNLKSANYIFKALAFETLGAWSLECKTFIDFIGAKLMIESGDSRAKFFFYQRISLAIQRGNAASMLGTLPYVTPLEEVHCL

SEQ ID NO: 26599 - protein, 1016 aa, Tenebrio molitor
MSDTDFSEDEYLPLKYPSSGKFAEKISSFKISEKDSIEAGPSKEYVSSGNVKKNTFEKVCSQCDKSFKSEKGLKIHNGRIHRAQKYFSTGNNKFEDIKSSPEEKLKKHTQILNINDHSKIYEGKQLLILLKENLANAKSHIKTIRRIPKGARYSAAVKLCTIIKECLDSNSITASSNLLLFSYKVFNISEKSLKKSLTSVIKENVINFNLQENGIKKINKPSLSKIIEAKMNDFDVKGSVRLLSSNDTLATFDDETLEILKSKHPQPSRKLIFPNINLTDCQILNVNEIEVKKAINSFPCGSAAGIDGFRPQFLKDMISVSAGEAGQRALSSITLLCNFLLSGKIINEMCPFIFGASLCALKKKDGGIRPIAIGNIFRRLAAKIGCYKLQSDLHSYLTPNQLGVATKLGCESCIHSVRTYVHNPENFGKILLKIDFSNAFNSIERDSMLQQVKDKTPSLFPFLNQCYREPSHLFFGNYIIPSVVGCQQGDPCGPMAFSLTVHPIVESITTELNVWYLDDATIADVPDIVFENFKRIIKTAKEVGLHINPNKCELFFCSDTFDEDVSRKFKSLTSEILVVNKNNLELLGSPIFEDGFDFIAKKKIEKVFLLLKNIEQENLNSHTAYFLVKNCLFVPRLNFLLRTSPFWKFPICIKSIDNAIRNSLQKFLNIKFNENQWTLASLPISNGGLGIRKIQDISMPAFLGSIHGVHDLVFQILPKTDKKVSVHFAEEAIGLWIELNGKTFPTETFLQKGWDIINTTRIIANEINLCDKIGSARFLAAQRKESNAWLHAFPSRNIGTFMDNKILQICVANRFGVEIFEKHTCHCGFTVSNDGRHGLSCAKNKGRFSRHSDLNQIIQRALSSIHISSSLEPCGLLRDDGKRPDGATLIPWSKGQRLIWDVTCVDTLADSYIRKTSKIAGSAAEEASKRKHDKYKNLKSANYIFKALAFETLGPWSLECKTFIDFIGAKLMIESGDSRAKFFFYQRISLAIQRGNAASMLGTLPYVTPLEEVHCL

SEQ ID NO: 26600 - protein, 782 aa, Tenebrio molitor
MNDFDVKLLSSNDTLATFDDETLEILKSKHPQPSRKLIFPNINLTDCHILNVNEIEVKKAINSFPCGSAAGIDGFRPQFLKDMISVSAGEAGQRALSSITLLCNFLLSGKIINEMCPFIFGASLCALKKKDGGIRPIAIGNIFRRLAAKIGCYKLQSDLHSYLTPNQLGVATKLGCESCIHSVRTYVHNPENFGKILLKIDFSNAFNSIERDSMLQQVKDKTPSLFPFLNQCYREPSHLFFGNYIIPSVVGCQQGDPCGPMAFSLTVHPIVESITTELNVWYLDDATIADVPDIVFENFKRIINTAKEVGLHINPNKCELFFCSDTVDEDVLRKFKSLTSEILVVNKNNLELLGSPIFEDGFDFIAKKKIEKVFLLLKNIEQENLNSHTAYFLVKNCLFVPRLNFLLRTSTFWKFPSCIKSIDNAIRNSLQKFLNIKFNENQWTLASLPISNGGLGIRKIQDISLPAFLGSIHGVHDLVFQILPKTDKKVSVHFAEEAIGLWIELNGKTFPTETFLQKGWDIINTTRIIANEINLCDKIGSARFLAAQRKESNAWLHAFPSRNIGTFMDNKILQICVANRFGVEIFEKHTCHCGFTVSNDGRHGLSCAKNKGRFSRHSDLNQIIQRALSSIHISSSLEPCGLLRDDGKRPDGATLIPWSKGQRLIWDVTCVDTLADSYIRKTSIIAGSAAEEASKRKHDKYKNLKSANYIFKALAFETLGPWSLECKKIIDFIGAKLMTESGDSRAKFFFYQRISLAIQRGNAASILGTLPYVTPLEEVHCL

SEQ ID NO: 26601 - protein, 1205 aa, Rotylenchulus reniformis
MARIRRSGPMKQPPPLRTVRRSQADNSTKRVLIKGRAKIPIRTIEEETPERPGTSEAALDDPVPAAGEPGSPEVNEQQSPQQQRDRSTLSTRRERRGSVNVAKEKADSSEKGPDKAPKGMSDSERSSTREMFWSHFARNRWSALTNRPALKINPAKVTPDKWEFLDNCIAEACKRHRRCKDRMRLLNTAVYSAGQVLARDDRERRDIARQKSNEWVQSQRLELGNLRRHIGWITDELDRRKAVVQPTARQRRNFYALQRCFRIAGKPIRSTHDLEAKRERLVTHLHLVQSRIQYRLDREARAVKRAKPLKRRLEEPAGDSKLKPDQARDFWTKVIGERKKFVELPELAEWRREMGEKIPKVQSFASNEVDLKVWRKMLGKTRPLKAPGPDGIPNLLWKRFGKANRALFNWLMRVKQKQLQIPAWLTEGRVVLIPKGGNPEEPSNYRPIACLNTMYKLVTGMVTSWISEHLSQHKVLPEEQRAMVKGTWGCTHAMVLDRVMTTYSKSTGLPLHAAWVDFEKAFDSVSQPWVKNALKAVKVNPRLRSLVGALMASWKVRYEVANDGKVCKSAQLAVRNGLLQGDTLSPLLFCLSVAVVSSSVNKLPRVEVSVPGRGVMLRTNHLFYMDDFKGFASNGEDLSRMVKVVKRVAGSIGLRINARKSASVNTQGQSESEEAVLPQLGARDSYKYLGVEERIGVSFGDAWDRVKASMTEKLRKMLRTESTFGELRAAIRTVVTPVAKYLFLNVIAGGPAWTSLRDQAANYDKFVRKLLCESNGDDCGWRFAACSRARLYLKPADGGLGWASIEDGLIESLVYCWAYMQCTPGLGVARELFGSAGRSGIAESVSKGMRVLVLKPLGLLSEDSDQRVMVPDCPARGFSIGDKYYGNPTLGARALMKIVREERNNQRLAEWKGLEMAGSVANRPELDQAHSYHWLKKANVGRREFRDCIAAQEGQLKAVELFDPKRPAREKECRRCHAGRETEQHILTGCPWSRTGLMLERHNRVVRQIHTYLCRKFDLPVAHHTLPLHAVLENDRAKLIHDVPLFTPNVRSTQDDEGLVQHHGLRSNRPDLVVFDKKARSINVIEVSVPWRENLVTQELIKWRKYAMNSEIEPLELASKEVPGPNLRAQLGELYGAAYPGGVTVTPIVIGALGEVLPNVMDRLKEIGADGKRKAPDLLESMQRAALIGSGRLIRAHLCLPRTGV

SEQ ID NO: 26602 - protein, 1130 aa, Dermatophagoides pteronyssinus
MEGVDVSFQQNSQSPNLGNQSIQSLNNEHSRVHGSHSVVTFDVDSATSSNNGIFNGMSNKQILTEICKIIDNFDDPNEWFKNLYRNIDTELTRIPKGGWDIVTNVFNQKFNSNKSKKDIQNLYNQIKNRMISNKDGRNNQSELGLISDDYNMVTNVTLYENIKHELAKSIKMYCTDAHPKTYHHSLQSTKINYQVLNFINIIIKKDKISNEIKSLCDYIDVIYACQATYYSYIDQKKKNPSGNYFQSMQKKIDINKMKMELIENHDQNKIPDQRLVKLCKMNGIHSNDSQALQELKCKFEDKITNIETKLNKIKNKSLFSKVNYMFENNRKKFYRQLQNQNNIIGDNLNHDETLSFWNELWSQPNQSKDWTDLVNTFEPIQNNTNMCRERIKELTMKVINNLHFIKWKAPGNDFVYNFFIDKIDSLHDKLCDLVTEAILDPDSIPDKLYNGVTFLIPKVMVANKPDELRPITCLSNTYKIISKVMNFFLREICTLNDIISDNQMGARPGMSAKLQILVNKCLNQDNDNQLKTAYVDVKKAYDSIQHKYIHDILEKLELPTNIKKFINRMLALQKTTLKVGNCEIGTISILNGILQGDSLSPQLFILALEPLSRILNLKCDMVYTSDYGIGRNHLSFIDDIKLIANNQSDLNSLCKLTNEIFESIGLSINEQKSANNTGDIESFGDMVNDDIGYKYLGILEDSNNLFHENNKIAIREKVFGRVESICNSKLSAKNLFHAINEFAIAPLNYYLGIIDFTEGELEEFDKGIRRILAKYQITRRSSNMDRLYLHRKELGRGLQNIVEKNEIVSLNLAESLDGNLYFHTIWESEKTNNTSLGNIKEKIKYKYQMSDDEVNLNSLKIKQKEKRMNIIGSKQLHSKLFDDDDNIIDKVQSSLWLRKLNITPQEEAMLCKLQDRNMYFPGLNKKCPHCNQGKKTVDHLATYCGKMLNFDYKKRHDEVVRLIHYSKLIEFGINKCKKLNSHRMQKLVVNDRVKIKSDMEIVTTNKIDHNKPDLLIHDSKINEITLIEIGITNKDLLPRTETTKGRKYDLLGNELKLLHKGVKIRAVPVVITWDALVTKFFKKHLSLLGISLIGQAYIQYKVLKKTLESILIDVRGDYDVDIDNNEIFDE

SEQ ID NO: 26603 - protein, 1074 aa, Brachyptera putata
MKCPHCSKSDVRNLEKHVKNHHMDVYATSSQTQGTSSTFKSVIPSQESIKCVLCDKICKNVRGMNVHVRLIHPNISVNNTGIENTHTKIVSKISPCVNGVEQEKMPDENSNDNDKEDNHTRGKSPCPHCGKMYKGVRAHITRAHPEKHREIISAKYATTGIDLTTNDDQVENSVEQDVIRKRNEETEKLHSKLDEYITSFDSIFTQDDFNTYVQDFSKYLAEAINLLPGPKNPATRFYEARKKQTFKSDRRQFKETTNPMRKSKREKEFRKEKYLFQKTQYFYYNQRKKALNLVINSNDPKCRIDSSTLNRSFQDRYGEPNNHTREEYSDRLTSDERHLMNDCFSSTITPENIQSALNSIRIDTAPGPDKVIMRVVKSERVAKIISLIATQMLTQGWVPACFRRARTVLIYKTGDVKNPSNWRPITICSVLRRVIEKVLDKQVRRYITFNDNQKGFTQSPGTYINVSIVNAILEKAKEKKENCTLIFLDITKAFDNVGHQHLTSTLRASTIPKKLQDLIIKLQSGNNTQIEANNQKTKPILLNRGVMQGAPLSPTLYNLATDHILQELSEYDVANTHGFRVNDELNCVSVLGFADDTVVVGKNIESAKILTQIVRSRLSELGLTINDRKSFAINIQNGRLQETKIEMDDTTIIRAIGPDETIKYLGVNFRTCVVFDSGKLINDLKMKLQELSVSPLLMPDQKLNILNQYIWPTLIYPLQNAPISKLPISFLDDLDKIIKSTIKEILSLPFDTPDAMLYTSHKFRGLNIFRAKWEAYIQKFNICNVLEKDMNPYVLATRNLVEEKRQCIEKLALTFNDIGGERTKSELIRAHLRKLEYTKWCELPQKGQGVILFQEYTPVNNWISKKKGLSCSEWRDAIKMTANVAPVRALHGRSQNGNLCRRCGKETETLPHVLGSCPHGSLLRNSRHHSIRTVIADEFRNSGWEVAEEVHGLADDGSNRRIDIIVLNPITRDAFILDPTIRFEKNEGQAEEVDKEKKLIYNATIPYYTEKYNAKNIIVIGLLVGARGTITKFFTNFCEKFKIKKRTIHQVAMLALRGSITILRNHLYGQQLRI

SEQ ID NO: 26604 - protein, 943 aa, Brachyptera putata
MYKGVRAHITRAHPEKHREIISAKYATTGIDLTTNDDQVENSVEQDVIRKRNEETEKLHSKLDEYITSFDSIFTQDDFNTYVQDFSKYLAEAINLLPGPKNPATRFYEARKKQTFKSDRRQFKETTNPMRKSKREKELRKEKYLFQKTQYFYYNQRKKALNLVINSNDPKCRIDSSTLNRSFQDRYGEPNNHTREEYSDRLTSDERHLMNDCFSSTITPENIQSALNSIRIDTAPGPDKVIMRVVKSERVAKIISLIATQMLTQGWVPACFRRARTVLIYKTGDVKNPSNWRPITICSVLRRVIEKVLDKQVRRYITFNDNQKGFTQSPGTYINVSIVNAILEKAKEKKENCTLIFLDITKAFDNVGHQHLTSTLRASTIPMKLQDLIIKLQSGNNTQIEANNQKTKPILLNHGVMQGGPLSPTLYNLATDHILQELSEYDVANTHGFRVNDELNCVSVLGFADDTVVVGKNIESAKILTQIVRSRLSELGLTINDRKSFAINIQNGRLQETKIEMDDTTIIRAIGPDETIKYLGVNFRTCVVFDSGKLINDLKMKLQELSVSPLLMPDQKLNILNQYIWPTLIYPLQNAPISKLPISFLDDLDKIIKSTIKEILSLPFDTPHAMLYTSHKFRGLNIFRAKWEAYIQKFNICNVLEKDMNPYVLATRNLVEEKRQCIEKLALTFNDIGGERTKSELIRAHLRKLEYTKWCELPQKGQGVILFQEYTPVNNWISKKRGLSCSEWRDAIKMTANVAPVRALHGRSQNGNLCRRCGKETETLPHVLGSCPHGSLLRNSRHHSIRTVIADEFRNSGWEVAEEVHGLADDGSNRRIDIIVLNPIMRDAFILDPTIRFEKNEGQAEEVDKEKKLIYNATIPYYTEKYNAKNIIVIGLLVGARGTITKFFTNFCEKFKIKKRTIHQIAMLALRGSITILRNHLYGQQLRI

SEQ ID NO: 26605 - protein, 1074 aa, Brachyptera putata
MKCPHCSKSDVRNLEKHVKNHHMDVYATSSQTQGTSSTFKSVIPSQESIKCVLCDKICKNVRGMNVHVRLIHPNISVNNTGIENTHTKIVSKISPCVNGVEQEKMPDENSNDNDKEDNHTRGKSPCPHCGKMYKGVRAHITRAHPEKHREIISAKYATTGIDLTTNDDQVENSVEQDVIRKRNEETEKLHSKLDEYITSFDSIFTQDDFNTYVQDFSKYLAEAINLLPGPKNPATRFYEARKKQTFKSDRRQFKETTNPMRKSKREKEFRKEKYLFQKTQYFYYNQRKKALNLVINSNDPKCRIDSSTLNRSFQDRYGEPNNHTREEYSDRLTSDERHLMNDCFSSTITPENIQSALNSIRIDTAPGPDKVIMRVVKSERVAKIISLIATQMLTQGWVPACFRRARTVLIYKTGDVKNPSNWRPITICSVLRRVIEKVLDKQVRRYITFNDNQKGFTQSPGTYINVSIVNAILEKAKEKKENCTLIFLDITKAFDNVGHQHLTSTLRASTIPMKLQDLIIKLQSGNNTQIEANNQKTKPILLNRGVMQGAPLSPTLYNLATDHILQELSEYDVANTHGFRVNDELNCVSVLGFADDTVVVGKNIESAKILTQIVRSRLSELGLTINDRKSFAINIQNGRLQETKIEMDDTTIIRAIGPDETIKYLGVNFRTCVVFDSGKLINDLKMKLQELSVSPLLMPDQKLNILNQYIWPTLIYPLQNAPISKLPISFLDDLDKIIKSTIKEILSLPFDTPDAMLYTSHKFRGLNIFRAKWEAYIQKFNICNVLEKDMNPYVLATRNLVEEKRQCIEKLALTFNDIGGERTKSELIRAHLRKLEYTKWCELPQKGQGVILFQEYTPVNNWISKKKGLSCSEWRDAIKMTANVAPVRALHGRSQNGNLCRRCGKETETLPHVLGSCPHGSLLRNSRHHSIRTVIADEFRNSGWEVAEEVHGLADDGSNRRIDIIVLNPITRDAFILDPTIRFEKNEGQAEEVDKEKKLIYNATIPYYTEKYNAKNIIVIGLLVGARGTITKFFTNFCEKFKIKKRTIHQVAMLALRGSITILRNHLYGQQLRI

SEQ ID NO: 26606 - protein, 1082 aa, Brachyptera putata
MEKCATGTIKCPQCSKDNILNLREHIEQYHIDVYLMSSQTPGTSSTSNVLTLSQLSSTCVLCDKTFKTARGLNVHIRKIHPQTSSSVPVRHLSCDNVSSNIILADNNDDTGDSTSLHETSQISNTTSDKIPCPYCGKLYKGVRAHITRAHPEQHRELISSKYATNKVITTTDGESEENSTIRNSEVKCENETLKLHSELDNYIVNFESVFSKEDFNVYVDQLSVYLAQAIALLPGPKNPATRYYNARKKDTFKSDKRKYNETTNPMRKTKRESALRKEKYLYQKAQYLYYNMRKKAVNMVLNSKNPSCKIDSSLLYSSFAERYTKPNLRIREEYPETLTVEERTSINNSFTCNITPDHIQSAIHSIRTDTAPGPDHVIMRVVKSERVAKLLSLIATKMMMNGWVPECFHKARTVLIYKTGIIDNPSNWRPITICSVLRRVIERVLDKRMRQYITFNENQKGFTQNPGTYINISIINAILERAKIKKESCTLIFLDITKAFDNIGHQHLASTLRASNLPTKLRDLVIELQTGNSTQIEANHQKTKPISLNRGVMQGAPLSPTLYNLATDHILQELSEDSVANTNGFRVVDDLNSISVLGFADDTVVVGKSVESAKILTRMVRRRLCELGLEVNDSKSFAINIIKGQLKEINIPLDDITTIRSIGPQETIKYLGVNFNTSAVFDSMKLITNLKDTLQHLSASPLLVPDQKLSILNQYIWPTLIYPLQNAPVSKLPITFLDDLDKIIKSTIKEIVSLPFDTPDSMLYTSSKFKGLNVFRAKWEAYIQKLNICNVLERDGNPYVLATRDLCGEKSVCLEKLAITLTDLGVQSNKSIKPLSVRTHLRKLEYIKWCKLPQKGQGAILYQEYTPANKWLSHKKGLSSSEWRDAIKMTANVAPVRALHGRTQDSNLCRRCGKEIETLPHVLGSCPHGSLLRNSRHHAIRSVIANELKKKGWEVAEEVHGLADDGSNRRIDIIAIHPITRKGYIMDPTVRFERNENQATEVDEEKKAIYNPTIPYYTEKYNASDITVVGLCIGARGTITSFFVNFCKEFLIEKDIIEHISLLALRGSITILRNHLYGQHII

SEQ ID NO: 26607 - protein, 1080 aa, Brachyptera putata
MEKCATIKCPQCSKDNILNLREHIEQYHIDVYLMSSQTPGTSSTSNVLTLSQLSSTCVLCDKTFKTARGLNVHIRKIHPQTSSSVPVRHLSCDNVSSNIILADNNDNTEDSTSLHETLQISNTTSDKIPCPYCGKLYKGVRAHITRAHPEQHRELISSKYATNKVITTTDGEFEENSTIRNSEVKCENETLKLHSELDNYIVNFESVFSKEDFNVYVDQLSVYLAQAIALLPGPKNPATRYYNARKKDTFKSDERKYNETTNPMRKTKRESALRKEKYLYQKAQYLYYNMRKKAVNMVLNSKNPSCKIDSSLLYSSFAERYTKPNLRIREEYPETLTVEERTSINNSFTCNITPDHIQSAIHSIRTDTAPGPDHVIMRVVKSERVAKLLSLIATKMMMNGWVPECFHKARTVLIYKTGIIDNPSNWRPITICSVLRRVIERVLDKRMRQYITFNENQKGFTQNPGTYINISIINAILERAKIKKENCTLIFLDITEAFDNIGHQHLASTLRASNLPTKLRDLVIELQTGNSTQIEANHQKTKPISLNRGVMQGAPLSPTLYNLATDHILQELSEDSVANTNGFRVVDDLNSISVLGFADDTVVVGKSVESAKILTRMVRRRLCELGLEVNDSKSFAINIIKGQLKEINIPLDDITTIRSIGPQETIKYLGVNFNTSAVFDNMKLITNLKDTLQHLSASPFLVPDQKLSILNQYIWPTLIYPLQNAPVSKLPITFLDDLDKIIKSTIKEIVSLPFDTPDSMLYTSSKFKGLNVFRAKWEAYIQKLNICNVLERDGNPYVLATRDLCGEKSVCLEKLAITLTDLGVQSNKSIKPLSVRTHLRKLEYIKWCKLPQKGQGAILYQEYTPANKWLSHKKGLSSSEWRDAIKITANVAPVRALHGRTQDSNLCRRCGKEIETLPHVLGSCPHGSLLRNSRHHAIRSVIANELKKKGWEVAEEVHGLADDGSNRRIDIIAIHPITRKGYIMDPTVRFERNENQATEVDEEKKAIYNPTITYYTEKYNASDITVVGLCIGARGTITSFFVNFCKEFLIEKDIIEHISLLALRGSITILRNHLYGQHII

SEQ ID NO: 26608 - protein, 1082 aa, Brachyptera putata
MEKCATGTIKCPQCSKDNILNLREHIEQYHIDVYLMSSQTPGTSSTSNVLTLSQLSSTCVLCDKTFKTARGLNVHIRKIHPQTSSSVPVRHLSCDNVSSNIILADNNDDTEDSTSLHETSQISNTTSDKIPCPYCGKLYKGVRAHITRAHPEQHRELISSKYATNKVITTTDGESEENSTIRNSEVKCENETLKLHSELDNYIVNFESVFSKEDFNVYVDQLSVYLAQAIALLPGPKNPATRYYNARKKDTFKSDKRKYNETTNPMRKTKRESALRKEKYLYQKAQYLYYNMRKKAVNMVLNSKNPSCKIDSSLLYSSFAERYTKPNLRIREEYPETLTVEERTSINNSFTCNITPDHIQSAIHSIRTDTAPGPDHVIMRVVKSERVAKLLSLIATKMMMNGWVPECFHKARTVLIYKTGIIDNPSNWRPITICSVLRRVIERVLDKRMRQYITFNENQKGFTQNPGTYINISIINAILERAKIKKESCTLIFLDITKAFDNIGHQHLASTLRASNLPTKLRDLVIELQTGNSTQIEANHQKTKPISLNRGVMQGAPLSPTLYNLATDHILQELSEDSVANTNGFRVVDDLNSISVLGFADDTVVVGKSVESAEILTRMVRRRLCELGLEVNDSKSFAINIIKGQLKEINIPLDDITTIRSIGPQETIKYLGVNFNTSAVFDSMKLITNLKDTLQHLSASPLLVPDQKLSILNQYIWPTLIYPLQNAPVSKLPITFLDDLDKIIKSTIKEIVSLPFDTPDSMLYTSSKFKGLNVFRAKWEAYIQKLNICNVLERDGNPYVLATRDLCGEKSVCLEKLAITLTDLGVQSNKSIKPLSVRTHLRKLEYIKWCKLPQKGQGAILYQEYTPANKWLSHKKGLSSSEWRDAIKMTANVAPVRALHGRTQDSNLCRRCGKEIETLPHVLGSCPHGSLLRNSRHHAIRSVIANELKKKGWEVAEEVHGLADDGSNRRIDIIAIHPITRKGYIMDPTIRFERNENQATEVDEEKKAIYNPTIPYYTEKYNASDITVVGLCIGARGTITSFFVNFCKEFLIEKDIIEHISLLALRGSITILRNHLYGQHII

SEQ ID NO: 26609 - protein, 1050 aa, Brachyptera putata
MEKCATGTIKCPQCSKDNILNLREHIEQYHIDVYLMSSQTPGTSSTSNVLTLSQLSSTCVLCDKTFKTARGLNVHIRKIHPQTSSSVPVRHLSCDNVSSNIILADNNDDTEDSTSLHETSQISNTTSDKIPCPYCGKLYKGVRAHITRAHPEQHRELISSKYATNKVITTTDGESEENSTIRNSEVKCENETLKLHSELDNYIVNFESVFSKEDFNVYVDQLSVYLAQAIALLPGPKNPATRYYNARKKDTFKSDKRKYNETTNPMRKTKRESALRKEKYLYQKAQYLYYNMRKKAVNMVLNSKNPSCKIDSSLLYSSFAERYTKPNLRIREEYPETLTVEERTSINNSFTCNITPDHIQSAIHSIRTDTAPGPDHVIMRVVKSERVAKLLSLIATKMMMNGWVPECFHKARTVLIYKTGIIDNPSNWRPITICSVLRRVIERVLDKRMRQYITFNENQKGFTQNPGTYINISIINAILERAKIKKESCTLIFLDITKAFDNIGHQHLASTLRASNLPTKLRDLVIELQTGNSTQIEANHQKTKPISLNRGVMQGAPLSPTLYNLATDHILQELSEDSVANTNGFRVVDDLNSISVLGFADDTVVVGKSVESAKILTRMVRRRLCELGLEVNDSKSFAINIIKGQLKEINIPLDDITTIRSIGPQETIKYLGVNFNTSAVFDSMKLITNLKDTLQHLSASPLLVPDQKLSILNQYIWPTLIYPLQNAPVSKLPITFLDDLDKIIKSTIKEIVSLPFDTPDSMLYTSSKFKGLNVFRAKWEAYIQKLNICNVLERDGNPYVLATRDLCGEKSVCLEKLAITLTDLGVQSNKSIKPLSVRTHLRKLEYIKWCKLPQKGQGAILYQEYTPANKWLSHKKGLSSSEWRDAIKMTANVAPVRALHGRTQDSNLCRRCGKEIETLPHVLGSCPHGSLLRNSRHHAIRSVIANELKKKGWEVAEEVHGLADDGSNRRIDIIAIHPITRKGYIMDPTVRFERNENQATEVDEEKKAIYNPTIPYYTEKYNASDITVVGLCIGARGTITSFFVNFCKEF

SEQ ID NO: 26610 - protein, 1037 aa, Brachyptera putata
MEKCATIKCPQCSKDIILNLREHIDVYLMSSQTPGSSSTSNVLTLSQLSSTCVLCDKTFKTARGLNVHIRKIHPQTSSSVPVRHLSRDNVSSNIILADNNDNTEDSTSLHETSQISNTTSDKIPCPYCGKLYKGVRAHITRAHPEQHRELISSKYATNKVITTTDGEFEENSTIRNSEVKCENETLKLHSELDNYIVNFESVFSKEDFNVYVDQLSVYLAQAIALLPGPKNPATRYYNARKKDTFKSDKRKYNETTNPMRKTKRESALRKEKYLYQKAQYLYYNMRKKAVNMVLNSKNPSCKIDSSLLYSSFAERYTKPNLRIREEYPETLTVEGRTSINNSFTCNITPDHIQSAIHSIRTDTAPGPDHVIMRVVKSERVAKLLSLIATKMMMMNGWVPECFHKARTVLIYKTGIIDNPSNWIPITMCSVLRRVIERVLDKRMRQYITFNENQKGFTQNPGTYINISNINAILERAQIKKESCTLIFLDITKAFDNIGHQHLASTLRASNLPTKLRDLVIELQTGNSTQIEANHQKTKPIPLNRGVMQGAPLSPTLYNLATDHILQELSEDSVANTKGFRVVDDLNSISVLGFADDTVVVGKSVESAKILTRMVRRRLCELGLEVNDSKSFAINIIKGQLKEINIPLDDIPTIRSIGPQETIKYLGVNFNTSAVFDSMKLITNLNDTLQHLSASPLLVPDQKLSILNQYIWPTLIYPLQNAPVSKLPITFLDDLDKIIKSTIKEIVSLPFDTPDSMLYTSSKFKGLNVFRAKWEAYIQKLNICNVLERDGNPYVLATRDLCGEKSVCLEKLAITLTDLGVQSNKSLKPLSVRTHLRKLEYIKWCKLPQKGQGAILYQEYTPANKWLSHKKGLSSSEWRDAIKMTANVAPVRALHGRTQDSNLCRRCGKEIETLPHVLGSCPHGSLLRNSRHHAIRSVIANELKKKGWEVAEEVHGLADDGSNRRIDIIVIHPITRKGYIMDPTVNFERNENQATEVDEEKKAIYNPTIPYYTEKYNASDITVVGLCIGARGTITSFL

SEQ ID NO: 26611 - protein, 989 aa, unidentified
MMAREEALAVHRGVRFINQHLLAVVPNRTLDAIKGMRRNDGYRRLVTAALEDLSATSGDSSILSCGGSSPSASPQASAISPQASPGSPPLTPSSPGWGEAYGNFAGAIRALIPVVESIQGWSSRVLAQIGAGVLDGQRSVDAIGPWITGVFPPTAPRARPPGRHCAVNPGRRARRRAEYARVQRMFRSNMSRAAKEILDGATEMDAVPDVRLMAAHWGPFVAQASMPVPPAPRLPPKRELGGTWSPISCEEAAAINLPLNSAPGLDGISVRLWRAMPASIKALLFNIVLHCGGFPAAMLVSRTVFIPKKGDCSLPGDFRPISITSVAVRHLHKILAQRLRESRLVDLRQRCFDDGCGENVAVLASLLMDARSRRRELHVASLDFAKAFDSVSHGAIASALAGVGLPHGLIDYIGRIYAQSSTVFEVRGARSELSRIGRGVRQGDPLSPMLFCLVVDVIMRSIPADVGYQLGEHRINSIAYADDVLLFAATKWGLQSSIRMVEDTAGEMGLFQMIIRASVCSTLLLLAVFQAKKCSVLSFVPSGREKKVKILTTPQFQLRDGSWLAQLDTSAEWRYLGVNFRPAGPKKVGSDISEYLSRLSRAPLKPQQRLKIIRCFLLPRLYHSLVLGRATLGKLRALDVTTRAAVRKWLRLPNDVPTAFFHSPVSSGGLGIPALATTVPGLLLQRLRSLESSTVPQMQAIANYTWAVRRHDWARRALTRDGVCLASKRLRDGWWSRRLYQSVDGFELRECQDSNLSSWWVDHGSHAIPGRDFAQYVHVRANTLPTRIRTSRGVRRELYATRCRAGCNSSETAAHVIQGCFRTHGGRVLRHNAVCKVIAAGLRNAGWVVREEPAYITAEGKRKPDLVCLRDSKAVVVDAQVVSGATPLVEAHERKVRYYADNATLVGAVARETGVQPRDVEFSSCTISWRGVWCLASADWLVGMGLTKGLLRGLTTRVLQGSHTNWTRWNQMTSVVPTGPPRRDREGIG

SEQ ID NO: 26612 - protein, 972 aa, Formica exsecta
MMAREEALAVHRGVRFINRHLLTVVPNRTLDAIKGMRKNDGYRRLVTAALEDLSATSGDSSILSCGGGGPSASPQASAISPQASPGSPPLTPSSPSWGEAYGNFAGAIRALIPVVESIQGWSSRVLAQIGAGVLDGQRSVDAIGPWITGVFPPTAPRARPPGRHCAVNPGRRARRRAEYARVQRMFRSNMSRAAKEILDGATGMDAVPDVRLMAAHWGPFVAQASMPVPPAPRLPPKRELGGTWSPISCEEVAAINLPLNSAPGLDGISVRLWRAMPASIKALLFNIVLHCGGFPAAMLVSRTVFIPKKGDCSLPGDFRPISITSVAVRHLHKILAQRLRESRLVDLRQRCFDDGCGENVAVLASLLMDARSRRRELHVASLDFAKAFDSVSHGAIASALAGVGLPHGLIDYIGRIYAQSSTVFEVRGARSELSRIGRGVRQGDPLSPMLFCLVVDVIMRSIPADVGYQLGEHRINSIAYADDVLLFAATRWGLQASIRMVEDTAGEMGLLFQAKKCSVLSFVPSGREKKVKILTTPQFQLRDGSWLAQLDTSAEWRYLGVNFRPAGPKKVGSDISEYLSRLSRAPLKPQQRLKITRCFLLPRLYHSLVLGRATLGKLRALDVTTRAAVRKWLRLPNDVPTAFFHSPVSSGGLGIPALATTVPGLLLQRLRSLESSTVPQMQAIANYTWAVRRHDWARRALTRDGVCLASKRLRDGWWSRRLYQSVDGFELRECQDSSLSSWWVDHGSHAVPGRDFAQYVHVRANTLPTRIRTSRGVRRELYATRCRAGCNSSETAAHVIQGCFRTHGGRVLRHNAVCKVIAAGLRSAGWVVREEPAYITAEGKRKPDLVCLRDSKAVVVDAQVVSGATPLVEAHERKVRYYADNATLVEAVARETGVQPRDVGFSSCTISWRGIWCLASADWLVGMGLTKGLLRGLTTRVLQGSHTNWTRWNQMTSVVPTGPPRRDREGIG

SEQ ID NO: 26613 - protein, 973 aa, Nylanderia fulva
MMAREEALAANRGVRFMNQHLLAVVPNRTLDAIKGMRKNGGYQRLIAAALEDLAAASSSESSFLLAGGSSPPASPRSIAISPHGSPGSPPLSPSSPGWGDAYGSFAGVIRALIPVVEAIQGWKSHILIQIGSGILDGQRSVEDLGPWVSSVFPPTPPRVRPPVQNRVVNPGRKARRRAEYARIQRLFRSSMSRAAKEILDGATEADVVPGVRQMAAHWGPFVTQESAPVAPAPRLPPKAELSGTWSPVSCEEAAAINLPLNSTPGLDGIGVRIWRAVPASIKALLFNIVLQCGGFPASMLVSRTVFIPKRGECSLPGDFRPISITSVVVRHLHKILAQRLRESKLVDLRQRCFDDGCGDNVAVLASLLMDARSRRREMHVASLDFAKAFDSVSHGAITNALAGLGVPHGLIDYIARSYARSGTMFEVRGDRSELSGIGRGVRQGDPLSPVLFFLVVDVIIRSIPADVGYQLGEHRINSLAYADDVLLFAATKWGLQTSIRVVEDTARESGLLFQAKKCSVLSLVPSGREKKIKILTAPEFRLRDGTFLPQLDTTAEWRYLRVDFRPAGPKKVGSNIFIYLSRLSRAPLKPQQRLKIVRCFLLPRLYHSLVLGRATLGKLRALDVTTRAAVRRWLRFPHDVPTAFFHSPVSSGGLGIPALATTVPGLLLSRLRSLESSTAPQVKAIAHYIWAERRREWAQRALTRDGVCLASKHRRDVWWSRRLHQSVDGYELQECPGSNLSSWWVDHGSHAIPGRDYVQYVHVLANTLPTRIRTSRGVRREQYATGCRAGCNSTETAAHVIQGCFRTHGGRVLRHNAVCRVLASGLRNAGWTVREEPSYVTTEGKRKPDLLCLRGPKAVVVDAQVVSGATPLSDAHERKVRYYADNVSLGEAISRETGVQQPDIEFSSCTISWRGIWCVKSADWLLGMGLTKGLLRGITTRVLQGSHTNWTRWNQMTALVPTGSVQRDREGIG

SEQ ID NO: 26614 - protein, 912 aa, unidentified
MMAREEAHAVHRGVRFINQHLLAVIPDRSIDAIKGMRKNGEYRRLVAAALEDLSATSDESSFLSGGGSSPSASPQASAISTRGSPGSPPQSLSSPGWGEMYGSFAGAIRALIPVVEAIQGWNSRLLVQIGSEVLDGQRSAGSVGPWLSSVFPPTAPHLRPPRRVITNPGRKARRRAEYARVQRLFRSHMSRAAKEILDGAQKTDIVPGVRQMAEHWGPFVAQASVPVEAAPRLPPKRELLGTWSPISCEEVAAINLPLNSAPGLDGVSMRLWRAIPASIKALLFNIVLHCGGFPADMLVSRTVFIPKKGECSRPGDFRPISITSVAVRHLHKILAQRLRDSRIVDLRQRCFDDGCGDNVAVLASLLMDARSRRREMHVASLDFAKAFDSVSHGAITNALVGQGLPHGLIEYIGQVYAHSSTMFEVRGDRSELSRIGRGVRQGDPLSPVLFCLVVDVIMRSIPADVGYQLGEHRINSIAYADDVLLFAATKWGLQTSLRVVEDKAREMGLLFQGKKCSVLSLVPSGREKKIKILTTPQFQLRDGSWLPQLDTTAEWRYLGVDFRPAGPRKVGSDISFYLDRLSRAPLKPQQRLKIIRCFLLPRLYHSLVLGRATLGKLRALDVQTRAAVRRWLRVPNDVPTAFFHSPVLSGGLGIPALATTVPGLLFLRLRSLETSSAPQVQAIAHHTWVTRRREWARHALTRDGVCLATKHLRDGWWSRRLYQSVDGYELRECRDSNLSSWWVDHGSHAVPGRDYVQYVHVRANTLPTRIRTSRGVRRELYATKCRAGCNSTESAAHVIQGCFRTHGGRVLRHNAVCRVLAGGLRNAGWTVREEPAYVTTEGKRKPDLLCLRGSRAVVLDAQVVSGATPLGDAHERKRRYYGNNASLCDAISRETGIQRPDIEFSSCTISWR

SEQ ID NO: 26615 - protein, 972 aa, Nylanderia fulva
MMAREEALAVYRGVRFINQHLLTVVPSRSLDAIKGMRKNGGYRRLVAAALEDLSATSGDSSFLSAGGSSPSASPQASAISPRGSPGSPPLSPSSPGWGDAYGTFAGAIRALVPVVEAIQGWSSRVLTQIGLGVLDGQRSVDAVGPWITGVFPPTVSRLRPPMRRFAANPSKKARRRAEYARVQRLFRSNMSRVAKEILDGADHAGVVPDVQRMSAHWGPFVAQASVPVAPAPRVPSKRELGGTWAPISCEEVAAINLPLNSAPGLDGISVRLWRAMPASIKALLFNIVLHCGGFPVSMLVSRTVFIPKKGECALPGDFRPISITSVAVRHLHKILAQRLRESKLVDLRQRCFDDGCGENVAVLASLLMDARSRRRELHVASLDFAKAFDSVSHGAITNSLAGLGLPHGLIDYIGRIYANSSTVFEVRGVRSELSKAGRGVRQGDPLSPVLFCLVVDEIMRSIPADVGYQLGEHRINSIAYADDVLLFAATKWGLQTGVRVVEDMAGERGLLLQARKCSVLSLVPSGREKKIKILTAPQFQLRDGSWLSQLDTSAEWQYLGVNFRPAGPKKVGSDISVLLGRLGRAPLKPQQRLKIIRCFFLPRLYHSLVLGRATLGKLRALDVMTRAAVRKWLRLPHDVPTAFFHSSVASGGLGIPAMATTVPGLMLHRLRGLENSAVPQIQAIANYTWAMRRREWARRALTRDGVCLASKYLREKWWSHRLYQSVDGYELRECSKSNLSSWWVDNGSHAVPGRDFVQYVHVRANTLPTRIRTSRGMRRERYATGCRAGCNSTETAAHVIQGCFRTHGGRVLRHNAVCKVLAAGLRNVGWTVREEPAYVTVEGKRKPDLLCLRDSKAVVLDAQVVSGANVLEDAHERKVRYYADNASLVEAISRETGVKQPDVDFSSCTITWRGIWCLASADWLLGMGLAKGLLRGITTRVLQGSHTNWTRWNQMTSVVHTGNMQRDREGIG

SEQ ID NO: 26616 - protein, 972 aa, Nylanderia fulva
MMAREEALAANRGVRFMNQHLLAVVPNRTLDAIKGMRKNGGYQRLVAAALEDLAAASSSESSFLSAGGSSPPASPRSIAISPHGSPGSPPLSPSSPGWGDAYGSFAGAIRALIPVVEAIQGWKSHILIQIGSGILDGQRSVEDLGPWVSSVFPPTPPRVRPPVQNRVVNPGRKARRRAEYARVQRLFRSSMSRAAKEILDGATEADVVPGVRQMAAHWGPFVTQESAVAPAPRLPPKAELSGTWSPVSCEEAAAINLPLNSAPGLDGIGVRIWRAVPASIKALLFNIVLQCGGFPASMLVSRTVFIPKRGECSLPGDFRPISITSVVVRHLHKILAQRLRESKLVDLRQRCFDDGCGDNVAVLASLLMDARSRRREMHVASLDFAKAFDSVSHGAITNALAGLGVPHGLIDYIARSYARSGTMFEVRGDRSELSGIGRGVRQGDPLSPVLFCLVVDVIIRSIPADVGYQLGEHRINSLAYADDVLLFAATKWGLQTSIRVVEDTARVSGLLFQAKKCSVLSLVPSGREKKIKILTAPEFRLRDGTFLPQLDTTAEWRYLGVDFRPAGPKKVGSNISIYLSRLSRAPLKPQQRLKIVRCFLLPRLYHSLVLGRATLGKLRALDVTTRAAVRRWLRLPHDVPTAFFHSPVSSGGLGIPALATTVPGLLLSRLRSLESSTAPQVGAIAHYTWAERRREWAQRALTRDGVCLASKHRRDVWWSRRLHQSVDGYELRECPGSNLSSWWVDHGSHAIPGRDYVQYVHVLANTLPTRIRTSRGVRREQYATGCRAGCNSTETAAHVIQGCFRTHGGRVLRHNAVCRVLASGLRNAGWTVREEPSYVTTEGKRKPDLLCLRGPKAVVVDAQVVSGATPLSDAHERKVRYYADNVSLGEAISRETGVQQPDIEFSSCTISWRGIWCVKSADWLLGMGLTKGLLRGITTRVLQGSHTNWTRWNQMTALVPTGSVQRDREGIG

SEQ ID NO: 26617 - protein, 1029 aa, Crematogaster levior
MSQGKRIYNLRRQPRAAGPAACSSPSAEPIPGPSRPTAATSRRRPPSAVPVPASPRASQFVCPECGRAFSTKTGLGVHRRRAHEATVNEEINVERVKRQWSAEEQRMMTREEALAEHRGVRFVNQYLLGVIPNRTLDAIKGMQKNAEYRRLVAAALENLSATSGENSFLSGGGSSPSASPQFVAISRRGSPGSPPWTPSSPGWGEAYCSFAGAIRALIPVVEAIHGWNSHILTQVGSGILDGQRNVDDVDPWLAGVFPPTAPRARPPGRRYVANPSKKARRRAEYARVQRVFRTNMSRAAKEILDGAADVRTVPDVQQMVEHWGPFFAQASAPVASAPQVPSKRELRGAWSPISCEEVAATNLPLNSAPGLDGISARLWRADTSIDQSSPLQHRAALRKVAGSYAGGSDGFYPEEGRMLSSGGLPSDLYTFVAVRHLHKIRRLLESGLVDLRQRCFDDGCGDNVAVLATLLMDARSRRRELHVASLDFAKGFDSVSHGAIANVLTGLGLPHGLIEYIGRIYARSSTVFEVRGVRSELSRIGRGVRQGDPLSPVLFCLVVDAIMSAIPADVGYQLGEHRINCIAYADDVLFFAATKWGLQTSIQVVEDSVQKMGLIFQVKKCSVLSFVSSSREKKIKIITTPQFRLRDGSWLPQLDTSAEWRYLGVDFRPAGPKRVGSDISTYLSRLSRAPLKPQQRLKILRCFLLPRLYHSLVLGRATLGKLRALDVSTRTAVRKWLRLPKDVSTAFFHSPASSGGLGIPAMATTVPGLLFQRLRSLESSTAPQIRAVADSTWATRYREWARRALTQDGVCLALRHLRNGWWFRRLHQSVDGFELRECSGSNLSSWWVDNGSHAIPGRDFVQYVHVRANSLPTRIRTSRGVRRGLYPTRCRAGCNSTETAANVIQGCFRTHGGRVLRHNAVCRVLAAGLRNAGWTVREEPAYVTAEGKRKPDLVCLRGPRAVVLDAQVVSGATPLTEAHERKFRYYADNVSLVGAISRETGANQPDSLSSPPVPSLGGEFGVSRPLIGC

SEQ ID NO: 26618 - protein, 969 aa, Pogonomyrmex californicus
MMAREEALAVHRGVRFINQHLLTIVPNRTLDAIKGMRKNAEYRRLVAAALEDLSATSGESSFLSGGGSSPSTSPQATAIASHGSASPPSTPSSPGWGEMYGSFAGAIRALIPVVEAIQGWNSRALVQIGTGVLDGGRCAEAIGPWLAGVFPPTAPRQPRRHRVANPSRKARRRAEYARIQRLFRSQMSRVAREILDGAPVSDVVPDVQQMAAHWGPFVAQASVPIALAPRLPPKRELLGAWSPISCEEVAAVNLPLNSAPGLDGIGVRLWRAMPSSIKALLFNIVLHCGGFAASMLVSRTVFIPKKGECSLPGDFRPISITSVVVRHLHKILAQRLRGYRIVDLRQRCFDDGCGENVAVLASLLMDARSRRREMHVASLDFAKAFDSVSHGAIINALTGVGLPHGLVDYIQRTYARSSTMFEVRGVRSELSGIGRGVRQGDPLSPVLFCLVVDEIIRSIPADVGYQLGEHRINSIVYADDVLLFAATRWGLQTSIQVVEERARAMGLLFHAKKCSVLSLVPSGREKKIKIITAPQVRLRDGTWLPQLDTAAEWRYLGVDFRPAGPRRVGSDISIYLSRLSRAPLKPQQRLKIVRCFLLPRLYHALVLGRATLGKLRALDVQTRAAVRRWLRLPNDVPTAFFHSPVSSGGLGIPAMATTVPGLLFDRLGSLESSTAPQVQAIAQYTWAVRRREWARRALTRDGVCLATKHRRDGWWSHRLYQSVDGFELRECRGSNLSSWWVDLGSHAIPGRDFVQYVHVRANTLPTRIRTSRGVRRELYATRCRAGCNSTETAAHVIQGCFRTHGGRVLRHNAVCRVLASGLRNAGWTVHEEPVYVTAEGKRKPDLLCLRDSRVVVLDTQVVSGATPLGDAHERKVRYYGDNASLCGAISRETGVQRPDIEFSSCTISWRGIWCLASADWLLGMGLTKGLLRGITTRVLQGSHTNWTRWNQMTSMVPIGPVQRDREGIG

SEQ ID NO: 26619 - protein, 973 aa, Nylanderia fulva
MMAREEALAANRGVRFMNQHLLAVVPNRTLDAIKGMRKNGGYQRLVAAALEDLAAASSSESSFLSAGGSSPPASPRSIAISPHGSPGSPPLSPSSPGWGDAYGSFAGAIRALIPVVEAIQGWKSHILIQIGSGILDGQRSVEDLGPWVSSVFPPTPPRVRPPVQNRVVNPGRKARRRAEYARIQRLFRSSMSRAAKEILDGATEADVVPGVRQMAAHWGPFVTQESASVAPAPRLPPKAELSGTWSPVSCEEAAAINLPLNSAPGLDGIGVRIWRAVPASIKALLFNIVLQCGGFPASMLVSRTVFIPKRGECSLPGDFRPISITSVVVRHLHKILAQRLRESKLVDLRQRCFDDGCGDNVAVLASLLMDARSRRREMHVASLDFAKAFDSVSHGAITNALAGLGVPHGLIDYIARSYARSGTMFEVRGDRSELSGIGRGVRQGDPLSPVLFCLVVDVIIRSIPADVGYQLGEHRINSLAYADDVLLFAATKWGLQTSIRVVEDTARESGLLFQAKKCSVLSLVPSGREKKIKILTAPEFRLRDGTFLPQLDTTAEWRYLGVDFRPAGPKKVGSNISIYLSRLSRAPLKPQQRLKIVRCFLLPRLYHSLVLGRATLGKLRALDVTTRAAVRRWLRLPHDVPTAFFHSPVSSGGLGIPALATTVPGLLLSRLRSLESSTAPQVGAIAHYTWAERRREWAQRALTRDGVCLASKHRRDVWWSRRLHQSVDGYELRECPGSNLSSWWVDHGSHAIPGRDYVQYVHVLANTLPTRIRTSRGVRREQYATGCRAGCNSTETAAHVIQGCFRTHGGRVLRHNAVCRVLASGLRNAGWTVREEPSYVTTEGKRKPDLLCLRGPKAVVVDAQVVSGATPLSDAHERKVRYYADNVSLGEAISRETGVQQPDIEFSSCTISWRGIWCVKSADWLLGMGLTKGLLRGITTRVLQGSHTNWTRWNQMTALVPTGSVQRDREGIG

SEQ ID NO: 26620 - protein, 830 aa, Nylanderia fulva
MMAREEALAANRGVRFMNQHLLAVVPNRTLDAIKGMRKNGGYQRLVAAALEDLAAASSSESSFLSAGGSSPPASPRSIAISPHGSPGSPPLSPSSPGWGDAYGSFAGAIRALIPVVEAIQGWKSHILIQIGSGILDGQRSVEDLGPWVSSVFPPTPPRVRPPVQNRVVNPGRKARRRAEYARVQRLFRSSMSRAAKEILDGATEADVVPGVRQMAAHWGPFVTQESAPVAPAPRLPPKAELSGTWSPVSCEEAAAINLPLNSAPGLDGIGVRIWRAVPASIKALLFNIVLQCGGFPASMLVSRTVFIPKRGECSLPGDFRPISITSVVVRHLHKILAQRLRESKLVDLRQRCFDDGCGDNVAVLASLLMDARSRRREMHVASLDFAKAFDSVSHGAITNALAGLGVPHGLIDYIARSYARSGTMFEVRGDRSELSGIGRGVRQGDPLSPVLFCLVVDVIMRSIPADVGYQLGEYRINSLAYADDVLLFAATKWGLQTSIRVVEDTARESGLLFQAKKCSVLSLVPSGRKKKIKILTAPEFRLRDGTFLPQLDTTAEWRYLGVDFRPAGPKKVGSNISIYLSRLSRAPLKPQQRLKIVRCFLLPRLYHSLVLGRATLGKLRALDVTTRAAVRRWLRLPHDVPTTFFHSPVSSGGLGIPALATTVPGLLLSRLRSLESSTAPQVGAIAHYTWAERRREWAQRALTRDGVCLASKHRRDVWWSRRLHQSVDGYELRECPGSNLSSWWVDHGSHAIPGRDYVQYVHVLANTLPTRIRTSRGVRREQYATGCRAGCNSTETAAHVIQGCFRTHGGRVLRHNAVCRVLASGLRNAG

SEQ ID NO: 26621 - protein, 1101 aa, Tetramorium simillimum
MGCSHPIRTRGVASPSGLYSAGTSQRNEMYNFRRQPRVAGPAAHLSSSPDPSPGPSRRVPTRARQPPCAAVPGPASAHAREMFPCAECGREFTTRSGLGLHRRRAHEAVFNEEINVERVKRQWSAEEQRMMAREEALAVHRGVRFLNQHLLAVIPNRTLDAIKGMRRNGEYKRLVAAALEDLSATSGDNSLVSCGSSSPSASPQVTAISSRGSPGSPPLSPLSTSWAEAYGSFAGAIRALIPVVEVIQGWSAGVLAQIGYGVLDDRRSVGAIGPWITGVFPPIAPRLRPPGRCDAANLSRRARRRVEYRHVQRLFRSNMSRVAKEILDGATGGDVTPDAQQMAAHWGPFVSQTSVPVVPAERIPPKYELRGTWSPISCEEVAATNLPLNSAPGLDGITVRQWRAIPASIKALLFNIVLHCGGFPASLLVSRTVFIPKKGECSRPGDFRPISITSVVVRHLHKILAQRLRESRLVDLRQRCFDDGCGDNVAVLASLLMDARSRRREMHVASLDFAKAFDSVSHGALSNALAGLGLPHGLIDYIEHIYVHSSTVFEVRGVRSELSSIGRGVRQGDPLSPVLFCLVVDVILQSIPADVGYQLGEHRINSIAYADDVLLFAATKWGLQTSVRVVEDVAGGMGLLFQARKCSVLSLVPSGREKKIKILTTPEFRLRDGSWLTQLDTSAEWRYLGVDFRPAGPGKVGSDVSVYLNRLSSAPLKPQQRLKIIRCFLLPRLYHSLVLGRVTLGKLRALDVSTRAAVRRWLRLPRDVATAFFHSPVARGGLGIPAMATTIPGLLLERLRGLESSSAPQVRAIVGSSWVTRRREWARRALTRDGVCLASKRLRDGWWSHRLYQSVDGFELRECSGSGLSSWWVDNGSHAVPGRDFVQYVHVRANSLPTRIRTSRGVRRELYATRCRAGCNSTETAAHVIQGCFRTHGGRVLRHNAVCKVLAAGLRNAGWTVREEPVYVTAEGKRKPDLLCLRDPRAVVLDTQVVSGATPLGDSHERKVRYYADNASLGEAVSRETGVQRPNIEFSSCTISWRGIWCCASADWLLGMGLTKGLLRGITTRVLQGSHTNWTRWNHMTPVVHVGATQWNREGVG

SEQ ID NO: 26622 - protein, 1079 aa, Solenopsis invicta
MKNGKNYNLRRQPRAAGPAARSSPSPEPVPGPSRRPAAARRQPPPAAHAPAPVPVSPQAPADYRCPDCDRAFTTKTGLGVHRRRAHEAIVNEEINVERVKRQWSAEEQRMMAREEALATHRGIRFINQHLLEVVPNRTLEAIKGMRRNPQYRRLVAAALEDLSATSGEGSFLSAGSSPPASPLNAIPQLGSPGSPPLTPSSPGWGEAYGSFAGAIRALIPVVEAIRGWDSRVLTQISAGVLDGQRSVDDIDPWLAGAFPPTIPATRPSRRYAVANPGSKARRRAEYARIQRLFRSNMSRAAGEILDGAEGVQRVPDVQQMAAHWGPFFAQESAPVAPAPRRPPKHELLGTWSPISCEEVAATNLPLNSAPGLDGISVRLWRAVPASIKALLFNTVLHCGSLPAAMLVGRTVFIPKRGESSLPGDFRPISITSVVVRHLHKILAHRLLESKLVDLRQRCFDDGCGDNVAVLASLLMDARSRRHEFHVASLDFAKAFDSVSHGAIANVMTELGLPRGLTDYITRTYARSSTVFEVRGVRSELSSIGRGVRQGDPLSPVLFCLVVDAIMASIPADVGYQLGEHHISGIAYADDVLLFAATKWGLQASIEAVEDTARGTGLLFQAKKCSVLSFVPSGRDKKIKMLTTPQFQLRDGAWLPQLDTAAEWRYLGVDFRPAGPKKVGSDISTYLSRLSRAPLKPQQRLKIVRCFLLPRLYHSLVLGRATLGKLRALDISTRAAVRRWLRLPKDVPTALFHSPVAGGGLGIPAMATTVPGLLHQRLRNLETSTAPQVRAVANETWATRRLEWARRALTRDGVCMASKRLRDGWWAHRLHESTDGYELRECARSNLSSWWVDHGSHAIPGRDYVQYVHVRANTLPTRIRTSRGQRRGLYATKCRAGCNSTETAAHVIQGCFRTHGGRVLRHNAVCKVLAAGLRNAGWTVREEPVYVTAEGKRKPDLLCLRGAEAVVVDAQIVSGAYPLGDAHERKVRYYADNATLGEAISRETGVNRPEIRFSSCTISWRGIWCLASADWLISMGLTKGLLRGITTRVLQGSHTNWTRWNQMTTMVHTGPQQRDREGVG

SEQ ID NO: 26623 - protein, 973 aa, Nylanderia fulva
MMAREEALAANRGVRFMNQHLLAVVPNRTLDAIKGMRKNGGYQRLVAAALEDLAAASSSESSFLSAGGSSPPASPRSIAISPHGSPGSPPLSPSSPGWGDAYGSFAGAIRALIPVVEAIQGWKSHILIQIGSGILDGQRSVEDLGPWVSSVFPPTPPRVRPPVQNRVVNPGRKARRRAEYARVQRLFRSSMSRAAKEILDGATEADVVPGVRQMAAHWGPFVTQESAPVAPAPRLPPKAELSGTWSPVSCEEAAAINLPLNSAPGLDGIGVRIWRAVPASIKALLFNIVLQCGGFPASMLVSRTVFIPKRGECSLPGDFRPISITSVVVRHLHKILAQRLRESKLVDLRQRCFDDGCGDNVAVLASLLMDARSRRREMHVASLDFAKAFDSVSHGAITNALAGLGVPHGLIDYIARSYARSGTMFEVRGDRSELSGIGRGVRQGDPLSPVLFCLVVDVIIRSIPADVGYQLGEHRINSLAYADDVLLFAATKWGLQTSIRVVEDTARESGLLFQAKKCSVLSLVPSGREKKIKILTAPEFRLRDGTFLPQLDTTAEWRYLGVDFRPAGPKKVGSNISIYLSRLSRAPLKPQQRLKIVRCFLLPRLYHSLVLGRATLGKLRALDVTTRAAVRRWLRLPHDVPTAFFHSPVSSGGLGIPALATTVPGLLLSRLRSLESSTAPQVGAIAHYTWAERRREWAQRALTRDGVCLASKHRRDVWWSRRLHQSVDGYELRECPGSNLSSWWVDHGSHAIPGRDYVQYVHVLANTLPTRIRTSRGVRREQYATGCRAGCNSTETAAHVIQGCFRTHGGRVLRHNAVCRVLASGLRNAGWTVREEPSYVTTEGKRKPDLLCLRGPKAVVVDAQVVSGATPLSDAHERKVRYYADNVSLGEAISRETGVQQPDIEFSSCTISWRGIWCVKSADWLLGMGLTKGLLRGITTRVLQGSHTNWTRWNQMTALVPTGSVQRDREGIG

SEQ ID NO: 26624 - protein, 971 aa, unidentified
MMAREEALAVHRGVRFINQHLLTVVPNRTLDAIKGMRKNDGYRRLVAAALEDLSATSDESSFLSGGGSSPSASPQASAISTRGSPGSPPNSPPSPGWGDLYGSFAGAIRALIPVVEAIQGWNSHLLVQIGSEVLDGQRSAASVGPWLAGVFPPTTPRLRPPRRAIVNPGRKARRRAEYARVQRLFRSHMSRAAREILDGAPETDGVPDVRQMAEHWGPFVAQASVPVAAIPRLPPKRELLGTWSSISCEEVAAINLPLNSAPGLDGISVRLWRAIPASIKALLFNIVLHCGGFPADLLVSRTVFIPKKGECSRPGDFRPISITSVAVRHLHKILAQRLRESRIVDLRQRCFDDGCGDNVAVLASLLLDARSRRREMHAASLDFAKAFDSVSHDAIINALALKGLPHGLIDYIGQIYAHSSTMFEVRGVRSELSRIGRGVRQGDPLSPVLFCLVVDEIMRSIPADVGYQLGEHRINSIAYADDVLLFAATRWGLQTCLRVVEDKAREMGLLFQGKKCSVLSLVPSGREKKIKILTTPQFQLRDGSWLTQLDTAAEWRYLGVDFRPAGPRKVGSDISVYLDRLSRAPLKPQQRLKIVRCFLLPRLYHSLVLGRATLGKLRALDVQTRAAVRRWLRVPNDVPTAFFHSPVSSGGLGIPALATTVPGLLFQRLRSLETSTAPQVQAIAHYTWVTRRREWARHALTRDGVCLATKHLRDGWWSRRLFQSVDGFELRECRDSNLSSWWVDHGSRAIPGRDYVQYVHVRANTLPTRIRTSRGVRRELYATKCRAGCNSTETAAHIIQGCFRTHGGRVLRHNAVCRVLAGGLRNAGWTVREEPAYVTAEGKRKPDLLCLRGSKAVVLDAQVVGGATPLGDAHERKLRYYGDNASLCEAISRETGIQRPDIEFSSCTISWRGVWCIASADWLIGMGLTKGLLRGITTRVLQGSHTNWSRWNQMTAVVHTGPTQRDREGIG

SEQ ID NO: 26625 - protein, 1277 aa, Coccinella septempunctata
MGRSFWILSYEEDVLQFQLLSAYSLHKYIIITLIRANREFFLRFLSLFFSCIIRRYVWYPVDIFPLLTLRSGTRNRFLGSVSCSISLHPLHCYFQIVKVCNTLFQKNIYIYILYILYIYIIYIAEVGEASGTPLRTGTTRPSYSLRNTQGDSLDTSRTDVPARSHRRMRLHWTREMNLCLMNAYYMSTEGETKMRKYAESMTARWLEAYPNNPLTKEHLRAQIKNTKTRKLLSPDELESMKANALRKSPSETLNSIRSSIHRRSLQLQSCPTDVDSNIISPLPTPEPDVLDSEIMRLLGEENLKWEGIDFTNRPRIERLRTNKDSKTTLSVVNEALERVLDDSISFEDLCHRVFCAAMVTNTILQTPSPKANATSHQQQKPPWKARIEKKINFLRKDIGVLHTYLQHQKMSRKVEKKINVHLRKLMIKKDAHHRQHLRTHMETLKQKIAALGNRLRRYNKRAKRYQENNLFRNNQRQFFRHLAGGDGDHQTSTPSLNEMEQHWSSVWTQKIDHNTEAAWIEKEREAHQELPEMTEISITEDDIKATVIRMKNWTAAGVDGIQNFWWKSLTATHKHLARLIKRATKEPFNIPDFFTLGKTTMIPKKGDPALPKNYRPITCLPAVYKIVTSTIGHKINSHIKTNGIMSWEQNGCKKRARGSKELLVIDNAVTKQAKKKLKKISVAWIDYQKAFDSVPHSWLLEILNIYKVHPEVINLVRSLMSTWRTSLIWHNKNISYRTTEIQIKRGIFQGDGLSPQWFCLALNPLSKMLNRTAYSYALDATSKLSHLFYLDDLKLYARGRKQLEGQLELVRMFSGDIGMVFGLEKCRVVNVKRGKMAEQENIILSDGRTIQALHEEERYKYLGIQQTFEIRQQENKQQSENELMNRIRSIMKTQLSAKNKIEAINIWALPVFVYTSVILTCSKTDLERLDRKIRTTLTRNGMLHPNSAIERLYLPRKEGGRGLNSLENIYRKEDQNIRNYFVRGRLPVQQWVATQHLVSSQPEETPATEELPERWREKWQSKPLHGRFYASLHQPEVDRLSSSIYLTQGYLYPQTEGTLLAIQDQVVPTRAYTKHIMKQQVELTKCRLCDNAEETVQHISSGCSAIANTRYLVRHDNMGKVVHQLLCLREGLLRQFTPHHVYSPIAVMENESIKVYWDLTINTDLGVEHNRPDMVIWSKKNNTAIIVDFAVPLDQNLSKMYSEKISKYGPLSRQMKYMWDLQKVEIKPLIISCNGLVHRKTTQHLRELMLPNNTTLWMQKAVILGTVGIIRQILYPH

SEQ ID NO: 26626 - protein, 1124 aa, Propylea japonica
MDVPALTLRRRRLHWTREMNLCLINAYYNVTEGERKTKKYAENLVEKWSETYPDIVLTGKHLIAQIKNIKTRKLLAPDELEALKADAIRKSPKKKLDGIRRSIHRRSMQPQSRLASDGEPEVLQPQEPVTETPTHEILQLLDEEGRKWEGVEFMNRPRIRKLQQNKHTKATITTIDEALETVITNTTTFEELCHRVYCAAIIANTIQQTPPPPPTKDKSEQRTPPWKVRIERKISAFRKEIGVLHTYLVNRKLSKKVEKKVHLCAQKLKIKKDCQYQQRLRTHMETLKQKIAALGNRLRRYNKRTQRYQENNLYKSNQREFFRRLAEGRSEQQTILPDKGEMEEYWSKIWTQETQHNTEATWIEAERRAYDSLEEMPEITIAEEDVKATLKRSKNWTAAGVDGIHNFWWKSLTSTHKVLARLIQEAIKDPTTIPDYFTLGMTLMIPKKGNLSEPKNYRPITCLPAVYKILTSTIGHKINAHIKANRIMSWEQNGCKKKASGSKELLVIDNAITKQAKKKLKNITVAWIDYQKAFDSVPHSWLLEILEIYRVNPEVVHLLRCLMSTWRTSLTCSNKSTSYRTSEIKIKRGIFQGDGFSPPWFCLALNPLSSMLNRAAYSYAMDARNRISHLFYMDDLKLFSRGRKQLEGQLELVRKFSEDIGMTFGLEKCGVVDVKRGKLAEEENVTLSDGRTIPTLREEDRYKYLGVQQTFEIRQTENKKETETELTTRVTRIMNTQLSAKNKIEAINIWAIPVFAYTAGILTWSKTDLERLDRKIRAILTRNGMLHPNSAIERLYLPRKEGGRGLSSLEDIYLKEERKMRDYFRNGYSPIQQWVAAQRYPSTPSEEAVTQRPATEEPSERRKQSWQAKPLHGRFYASLHQSEVDRLNSNTYLSQGYLFPQTEGTFLAIQDQVVPTRVYTKLIMKLPVESTKCRLCNKAEETVQHLSSGCSTIAGTKYLSRHDNMGKVVHQLMCLEEGLLHHFVPHHIYVPQTVLENNTTKIYWDMTIITDQGAEHNRPDMVIWSKKNRTAIIIDFSVPLDQNLSKTYGEKITKYEPLARQIKNMWRLGKVEIKPLVISCNGLVHRKTAEHLREMKLPPNTILWMQKAVILGTVGIIRQAIYPH

SEQ ID NO: 26627 - protein, 1118 aa, Propylea japonica
MDVPALTLRRRRLHWTREMNLCLINAYYNVTEGETKTKKYAENLVEKWSETYPDIVLTGKHLIAQIKNIKTRKLLAPDELEALKADAIRKSPKKKLDGIRRSIHRRSMQPQSRLASEGEPEVLQPQEPETETPTHEILQLLDEEGRKWEGVEFMNRPRIRKLQQNKHTKTTITTIDEALETVITNTTTFEELCHRVYCAAIIANTIQQTPPPPPTKDKSEQRTPPWKVRIERKISAFRKEIGVLHTYLVNRKLSKKVEKKVHLCAQKLKIKKDSQYQQHLRTHMETLKQKIAALGNRLRRYNKRTQRYQENNLYKSNQREFFRRLAEGRSEQQTILPDKGEMEEYWSKIWTQETKHNTEATWIEAERRAYENLVEMPEITIAEEDVKATLKRSKNWTAAGVDGIHNFWWKSLTSTHKVLARLIQEAIKDPTTIPDYFTLGMTLMIPKKGNLSEPKNYRPITCLPAVYKVLTSTIGHKINAHIKANKIMSWEQNGCKKKARGSKELLVIDNAITKQAKKKLKNITVAWIDYQKAFDSVPHSWLLEILEIYRVNPGVVHLLRCLMSTWRTSLTCSNKSTSYRTSEIKIKRGIFQGDGFSPPWFCLALNPLSSMLNRAAYSYAMDARNRISHLFYMDDLKLFSRGRKQLEGQLELVRKFSEDIGMTFGLEKCGVVDVKRGKLAEEENVTLSDGRTIPTLREEDRYKYLGVQQTFEIRQTENKKETETELTTRVTRIMNTQLSAKNKIEAINIWAIPVFAYTAGILTWSKTDLERLDRKIRAILTRNGMLHPNSAIERLYLPRKEGGRGLSSLEDIYLKEERKMRDYFRNGYSPIQQWVAAQRYPSTPSEEAVTQRPATEEPSERRKQSWQAKPLHGRFYASLHQSEVDMLNSNTYLSQGYLFPQTEGTFLAIQDQVVPTRVYTKLIMKLPVESTKCRLCNKAEETVQHLSSGCSTIAGTKYLSRHDNMGKVVHQLMCLEEGLLHHFVPHHIYVPQTVLENNTTKIYWDMTIITDQGAEHNRPDMVIWSKKNRTAIIIDFSVPLDQNLSKTYGEKITKYEPLARQIKNMWRLGKVEIKPLVISCNGLVHRKTAEHLREMKLPPNTILWMQKVGIIRQAIYPH

SEQ ID NO: 26628 - protein, 806 aa, Propylea japonica
METLKQKIAALGNRLRRYNKRTQRYQENNLYKSNQREFFRRLAEGRSEQQTILPDKGEMEEYWSKIWTQETQHNTEATWIEAERRAYDSLVEMPEITIAEEDVKAILKRSKNWTVAGVDGIHNFWWKSLTSTHKVRARLIQEAIKDPTTIPDYFTLGMTLMIPKKGNLSEPKNYRPITCLPAVYKILTSTIGPKINAHIKANKIMSWEQNGCKKKARGSKELLVVDNAIIKQAKKKLKNITVAWIDYQKAFDSVPHSWLLEILEIYKVNPEVVHLLRCLMSTWRTSLTCSNKSTSYRTSEIKIKRGIFQGDGFSPPWFCLALNPLSSMLNRAAYSYVMDARSRISHLFYMDDLKLFSRGRKQLEGQLELVRKFSEDIGMTFGLEKCGVVDVKRGKLAEEENVTLSDRRTIPTLREEDRYKYLGVQQTFEIRQTENKKETETELTTRVTRIMNTQLSAKNKIEAINIWAIPVFAYTAGILTWSKTDLERLDRKIRAILTRNGMLHPNSAIERLYLPRKEGGWGLISLEDIYLKEEKKMRDYFRNGYSPIQQWVAAQRYPSTPSEEAVTQRPATEEPSERRKQSWQAKPLHGRFYASLHQSEVDMLNSNTYLSQGHLFPQTEGTFLAIQDQVVPTRVYTKLIMKLPVESTKGCASVDVLGGRPLTPLCATPYIRPSNGFREQHHINILGHDHNHGSSAEHNRPDMVIWSKKNRTAIIIDFSVPLDQNLSKTYGEKITKYEPLARQIKNMWRLGKVEIKPLVISCNGLVHRKTAEHLREMKLPPNTILWMQKAVILGTVGIIRQAIYPH

SEQ ID NO: 26629 - protein, 1062 aa, Coccinella septempunctata
MAQIKNIKTRKLLAPDELEALKADAIRKSPKKTLDGIRRTIHRRSMQPQTRHVSDEDLGALRPQEPETESPTREIMQLLDEEGRKWEGVEFMNRPRIRKLQQNKHTKTTITTINEALETVITNVSTFEELCHKVYCAAIIANTIEQTPSPPPTQGKSEQRTPPWKVRIERKITAFRKEIGVLHTYLVNRKLSKRVERKVHLYARKRKIKKDAQYQQHLRTHMETLKQKIAALGNRLRRYNKRTQKYQENNLYKSNQREFFRRLAEGRSEQQTTLPDKREMEEYWSKIWTQETQHNTEATWIEAERKAYHTLAEMPEITIAEEDVKATLKRCKNWAAAGVDGIHSFWWKSLTSTHKVLARLIQEAIKDPTTVPDYFTLGTTLMIPKKGNLSEPKNYRPITCLPAVYKILTSTIGHKINTHIKTNKIMSWEQNGCKRKARGSKELLVIDNTITKQAKKKLKNITIAWIDYHKAFDSVPHSWLLEILKIYKVNPKVIHLLKCLMSTWRTSLTWSNKSVSYRTSEINIKRGIFQGDGLSPPWFCLALNPLSSMLNRSAYSYSMDARNRISHLFYMDDLKLFTRGRKQLEGQLELVRKFSEDIGMTLGLEKCGVVDVKRGKLAEEENVTLSDGRTISTLGKEDRYKYLGVQQTFEIRQPENKKETETELTNRVFRIMNTQLSAKNKIEAINIWAIPVFTYTAGVITWSKTDLERLDRKIRAILTRNGMLHPNSAIERLYLPRKEGGRGLGSLEDIYLKEEKKMREYFRNGYSPIQQWVAAQRFPSTPLEEAGTQEPATEEPSERRKQSWQAKPLHGRFYASLHQSEVDTLNSNTYLSQGYLFPQTEGTLLAIQDQVVPTRVYTKLIMKQPVESTKCRLCDKAEETVQHLSSGCSTIAGTKYLSRHDNMGKVVHQLMCLEEGLLHHFVPHHIYAPQTVLENDTTKIYWDMTIITDQGAEHNRPDMVVWSKKNRTAIIIDFSVPLDQNLSKTYREKITKYEPLARQMKSMWHLDKVEIKPLVISSNGLVHRKTTEHLLEMKLPSNTILWMQKAVILGTVGIIRQAIFPH

SEQ ID NO: 26630 - protein, 1124 aa, Coccinella septempunctata
MDVPALTQTRRRLHWTREMNLCLINAYYNVTEGETKTKKYSENLVEKWLETYPDIVLTGKHLMAQIKNIKTRKLLAPDELEALKADAIRKSPKKTLDGIRRSIHRRSMQPQTRHVSDEDLGALRPQEPETESPTREIMQLLDEEGRKWEGVEFMNRPRIRKLQQNKHTKTTITTINEALETVITNVATFEELCHKVYCAAIIANTIEQTPSPPPTQGKSEQRTPPWKVRIERKITAFRKEIGVLHTYLVNRKLSKRVERKVHLYARKRKIKKDAQYQQHLRTHMETLKQKIAALGNRLRRYNKRTQKYQENNLYKSNQREFFRRLAEGRSEQQTTLPDKREMEEYWSKIWTQETQHNSEATWIEAERKAYHTLAEMPEITIAEEDVKATLKRCKNWAAAGVDGIHSFWWKSLTSTHKVLARLIQEAIKDPTTVPDYFTLGMTLMIPKKGNLSEPKNYRPITCLPAVYKILTSTIGHKINTHIKTNKIMSWEQNGCKRKARGSKELLVIDNTITKQAKKKLKNITIAWIDYHKAFDSVPHSWLLEILKIYKVNPKVIHLLKCLMSTWRTSLTWSNKSVPYRTSEINIKRGIFQGDGLSPPWFCLALNPLSSMLNRSAYSYSMDARNRISHLFYMDDLKLFTRGRKQLEGQLELVRKFSEDIGMTLGLEKCGVVDVKRGKLAEEENVTLSDGRTISSLGKEDRYKYLGVQQTFEIRQPENKKETETELTNRVTRIMNTQLSAKNKIEAINIWAIPVFTYTAGVITWSKTDLERLDRKIRAILTRNGMLHPNSAIERLYLPRKEGGRGLGSLEDIYLKEEKKMREHFRNGYSPIQQWVAAQRFPSTPLEEAGTQEPATEEPSERRKQSWQAKPLHGRFYASLHQSEVDTLNSNTYLSQGYLFPQTEGTLLAIQDQVVPTRVYTKLIMKQPVESTKCRLCDKAEETVQHLSSGCSTIAGTKYLSRHDNMGKVVHQLMCLEEGLLHHFVPHHIYAPHTVLENDTTKIYWDMTIITDQGAEHNRPDMVVWSKKNRTAIIIDFSVPLDQNLSKTYREKITKYEPLARQMKSMWHLDKVEIKPLVISSNGLVHRKTTEHLLEMKLPSNTILWMQKAVILGTVGIIRQAIFPH

SEQ ID NO: 26631 - protein, 1054 aa, Coccinella septempunctata
MIKNIKTRKLLAPDELEALKADAIRKSPKKKLDGIRRSIHRRSMQPQTRHVSDEDPGALRPQEPETETPTREVMQLLDEEGRKWEGVEFMNRPRIRKLQQNKHTKTTITTINEALETVITNSKTFEELCHKVYCAAIIANTIEQTPSPPPTLGKSEQRTPPWKVRIERKITAFRREIGVLHTYLVNRKLSKRVERKVHLYARKRKIKKDAQYQQHLRTHMETLKQKIAALGNRLRRYNKRTQKYQENNLYKSNQREFFRRLAEGGSEQQTTLPDKREMEEYWPNIWTQETQHNTEATWIEAERKAYHTLAEMPEITIAEEDVKATLKRCKNWAAAGVDGIHGFWWKSLTSTHKVLARLIQEAIKDPTTVPDYFTLGTTLMMPKKGNLSEPKNYRPITCLPAVYKILTSTIGHKINTHIKTNKIMSWEQNGCKRKARGSKELLVIDNTITKQAKKKLKNITVAWIDYQKAFDSVPHSWLLEILKIYKVNPKVIHLLKCLMSTWRTSLTWSNKSVSYRTSEINIKRGIFQGDGLSPPWFCLALNLLSSMLNRSAYSYSMDARNRISHLFYMDDLKLFTRGRKQLEGQLELVRKFSEDIGMTFGLEKCGVVDVEEENVTLSDGRTISTLGKEDRYKYLGVQQTFEIRQPENKKETETEVTNRVTRKMNTQLSAKNKIEAINIWAIPVFAYTAGVITWSKTDLERLDRKIRAILTRNGMLHPNSAIERLYLPRKEGGRGLGSLEDIYLKEEKKMREYFRNGYSPIQQWVAAQRFPSTPPEEGGTQEPATEEPSERRKQSWQAKPLHGRFYASLHQSEVDTLNSNTYLSQGYLFPQTEGTFLAIQDQVVPTRVYTKLIMKQPVESTKCRLCDKAEETVQHLSSGCSTIAGTKYLSRHDNMGKVVHQLMCLEEGLLHHFVPHHIYAPQTVLENDTTKIYWDMTIITDQGAEHNRPDMVVWSKKNRTAIIIDFSVPLDQNLSKTYREKITKYEPLARQMKSMWHLDKVEIKPLVISSNGLVHRKTTEHLLEMKLPSNTILWMQKAVILGTVGIIRQAIFPH

SEQ ID NO: 26632 - protein, 1054 aa, Coccinella septempunctata
MIKNIKTRKLLAPDELEALKADAIRKSPKKKLDGIRRSIHRRSMQPQTRHVSDEDPGALRPQEPETETPTREVMQLLDEEGRKWEGVEFMNRPRIRKLQQNKHTKTTITTINEALETVITNSKTFEELCHKVYCAAIIANTIEQTPSPPPTLGKSEQRTPPWKVRIERKITAFRREIGVLHTYLVNRKLSKRVERKVHLYARKRKIKKDAQYQQHLRTHMETLKQKIAALGNRLRRYNKRTQKYQENNLYKSNQREFFRRLAEGGSEQQTTLPDKREMEEYWPNIWTQETQHNTEATWIEAERKAYHTLAEMPEITIAEEDVKATLKRCKNWAAAGVDGIHGFWWKSLTSTHKVLARLIQEAIKDPTTVPDYFTLGTTLMMPKKGNLSEPKNYRPITCLPAVYKILTSTIGHKINTHIKTNKIMSWEQNGCKRKARGSKELLVIDNTITKQAKKKLKNITVAWIDYQKAFDSVPHSWLLEILKIYKVNPKVIHLLKCLMSTWRTSLTWSNKSVSYRTSEINIKRGIFQGDGLSPPWFCLALNLLSSMLNRSAYSYSMDARNRISHLFYMDDLKLFTRGRKQLEGQLELVRKFSEDIGMTFGLEKCGVVDVEEENVTLSDGRTISTLGKEDRYKYLGVQQTFEIRQPENKKETETEVTNRVTRKMNTQLSAKNKIEAINIWAIPVFAYTAGVITWSKTDLERLDRKIRAILTRNGMLHPNSAIERLYLPRKEGGRGLGSLEDIYLKEEKKMREYFRNGYSPIQQWVAAQRFPSTPPEEAGTQEPATEEPSERRKQSWQAKPLHGRFYASLHQSEVDTLNSNTYLSQGYLFPQTEGTFLAIQDQVVPTRVYTKLIMKQPVESTKCRLCDKAEETVQHLSSGCSTIAGTKYLSRHDNMGKVVHQLMCLEEGLLHHFVPHHIYAPQTVLENDTTKIYWDMTIITDQGAEHNRPDMVVWSKKNRTAIIIDFSVPLDQNLSKTYREKITKYEPLARQMKSMWHLDKVEIKPLVISSNGLVHRKTTEHLLEMKLPSNTILWMQKAVILGTVGIIRQAIFPH

SEQ ID NO: 26633 - protein, 1054 aa, Coccinella septempunctata
MIKNIKTRKLLAPDELEALKADAIRKSPKKKLDGIRRSIHRRSMQPQTRHVSDEDPGALRPQEPETETPTREVMQLLDEEGRKWEGVEFMNRPRIRKLQQNKHTKTTITTINEALETVITNSKTFEELCHKVYCAAIIANTIEQTPSPPPTLGKSEQRTPPWKVRIERKITAFRREIGVLHTYLVNRKLSKRVERKVHLYARKRKIKKDAQYQQHLRTHMETLKQKIAALGNRLRRYNKRTQKYQENNLYKSNQREFFRRLAEGGSEQQTTLPDKREMEEYWPNIWTQETQHNTEATWIEAERKAYHTLAEMPEITIAEEDVKATLKRCKNWAAAGVDGIHGFWWKSLTSTHKVLARLIQEAIKDPTTVPDYFTLGTTLMMPKKGNLSEPKNYRPITCLPAVYKILTSTIGHKINTHIKTNKIMSWEQNGCKRKARGSKELLVIDNTITKQAKKKLKNITVAWIDYQKAFDSVPHSWLLEILKIYKVNPKVIHLLKCLMSTWRTSLTWSNKSVSYRTSEINIKRGIFQGDGLSPPWFCLALNLLSSMLNRSAYSYSMDARNRISHLFYMDDLKLFTRGRKQLEGQLELVRKFSEDIGMTFGLEKCGVVDVEEENVTLSDGRTISTLGKEDRYKYLGVQQTFEIRQPENKKETETEVTNRVTRKMNTQLSAKNKIEAINIWAIPVFAYTAGVITWSKTDLERLDRKIRAILTRNGMLHPNSALERLYLPRKEGGRGLGSLEDIYLKEEKKMREYFRNGYSPIQQWVAAQRFPSTPPEEAGTQEPATEEPSERRKQSWQAKPLHGRFYASLHQSEVDTLNSNTYLSQGYLFPQTEGTFLAIQDQVVPTRVYTKLIMKQPVESTKCRLCDKAEETVQHLSSGCSTIAGTKYLSRHDNMGKVVHQLMCLEEGLLHHFVPHHIYAPQTVLENDTTKIYWDMTIITDQGAEHNRPDMVVWSKKNRTAIIIDFSVPLDQNLSKTYREKITKYEPLARQMKSMWHLDKVEIKPLVISSNGLVHRKTTEHLLEMKLPSNTILWMQKAVILGTVGIIRQAIFPH

SEQ ID NO: 26634 - protein, 836 aa, Coccinella septempunctata
MEKLKQKIAALGNRLRRYNKRTQRYRENNLFTNNQREFFRSLTERDNDQQSITPNPQDMNEYWSKIWSREDTHNREATWIAAERRAHEDLSEMPKVRVTEADVRATVRRFGNWKTAGVDGIHNFWWKSFTSTHRVLARLIQEAIKDPTIIPEYFTLGMTLMIPKKGDPTQPKNYRPITCLPAIYKILTSTISHKINNHIDNNNIMSPEQNGCRQKARGSKELLIIDNTITKQAKKRLKNISVAWIDYQKAFDSVPHSWLLEILRIYKVDHEVVELLKSLMSTWRTCLTWNKKSSFTPIKIKRGIFQGDGLSPSWFCLALNPLSNILNRAAYSYSMDSQNKVSHLFYLDDLKLFSRGQKQLEGQLELVRKFSEDIGMIFGLEKCAVVNVRRGRLAEGENVELSDGRTVPILGQEERYKYLGIQQTFEIRQQENKMETERELIRRVRRIMNTQLSAKNKMEAINIWAVPVFAYTAGILIWSKSDLEKLDRKIRSILTQYGTLHPNSAIERLYLPRKEGGRGLSNLQDIYLKEEKKIKNYFQTGITPIQKWVASQRYPSSGETSTHEPEIEDFKEILKQNWQTKPLHGRFFASLNQSDVDKLSSSTYLTQGYLFPQTEGTFLAIQDQVVPTRVYTKHIMKQQVQTTKCRLCDKAEETVQHLSSGCSTIAGTKYLGRHDNMGKVVHQSLCLREQLLPHFVPHHIYAPQTVLENETTKVYWDLTIITDRGVEHNRPDMVVWSKKDKKAYIIDFAVPLDQNLSKAYGEKIAKYEPLAKEIKNMWRLEKVEIKPLIISCNGLVHRKTTEHVKEIQLPANTILWMQKAVILGTVGIIRQAIYPH

SEQ ID NO: 26635 - protein, 1100 aa, Coccinella septempunctata
MNLCLINAYFIVTEGETRTRKYADKLAEKWSENNPNQPLTGKHLIAQVKNIKNRKLLAPDELETIKASVVARSPRRALDNIRRSIHRRSIQLNITSSDEDQRLERTPSPETEMPNPELQQLMEEEERKWEGIEMNNRPKIKKLQHRKDTRTAIATINEVLEARFSDSTSFEELCHKVYCAAIVANAILETPSPPSEPDRRSNQKPPWQERIGRKIIALRKEIGVLHNYLGNQNVSRKVEKKVQICAKKIKIKKGPQYHQHLRTHMEKLKQKIAALGNRLRRYNKRTQRYRENNLFTNNQREFFRSLTERDNDQQSITPNPQDMNEYWSKIWSQEDIHNREATWIAAERRAHEDLSEMPKVIVTEADVRATVRRFGNWKTAGVDGIHNFWWKSFTSTHRVLARLIQEAIKDPTIIPEYFTLGKTLMIPKKGDPTQPKNYRPITCLPAVYKILTSTISHKINNHIDNNNIMSPEQNGCRQKARGSKELLIIDNTITKQAKKRLKNISVAWIDYQKAFDSVPHSWLLEILRIYKVDHEVVELLKSLMSTWRTCLTWNKKSSSTPIKIKRGIFQGDGLSPSWFCLALNPLSNILNRAAYSYSMDSQNKVSHLFYLDDLKLFSRGQKQLEGQLELVRKFSEDIGMIFGLEKCAVVNVRRGRLAEGENVELSDGRTVPILGQEERYKYLGIQQTFEIRQQENKMETERELIRRVRRIMNTQLSAKNKMEAINIWAVPVFAYTAGILIWSKSDLEKLDRKIRSILTQYGTLHPNSAIERLYLPRKEGGRGLSNLQDIYLKEEKKIKNYFQTGITPIQKWVASQSYPSSGETSTHEPEIEDLKEILKQNWQTKPLHGRFFASLNQSDVDKLSSSTYLTQGYLFPQTEGTFLAIQDQVVPTRVYTKHIMKQQVQTTKCRLCDKAEETVQHLSSGCSTIAGTKYLGRHDNMGKVVHQSLCLREQLLPHFVPHHIYAPQTVLENETTKVYWDLSIITDRGVEHNRPDMVVWSKKDKKAYIIDFAVPLDQNLSKAYGEKIAKYEPLAKEIKNMWRLEKVEIKPLIISCNGLVHRKTTEHVKEIQLPANTILWMQKAVILGTVGIIRQAIYPH

SEQ ID NO: 26636 - protein, 935 aa, Ooceraea biroi
MESRRLEGERNINIKLMEFFPGKTNKQISDTRRRLKPDNPRLDEQPPANPVSRIVINESVAQHTANLVDSDCTLAMEKWRGALHDETCKVYEVLDEWAELSADIMDLAVRDFDQSELDKLYGRVEQRIGTGEAKKQKVAYIRRRRGKKGPPNRTERRCFAYAKCRDAFTNCPRKLADAVIANDLSMLQIRQALSLHDTRDLYEKLWETAGPPQQSYPQPTNAIGVEEIYLPITPAEVSAKITRTASTSASGADKISKSDLCKSGVSVTLSKLYNVLLLRGLYLNAWRLNRTTLIPKAGKDASQIKNWRPITISSLLDRRLRQVITQNERQKGFTRENGCHANIQLLNQGMDAAKSSGGVVTVLDISKAFDTVPHEVIKMGLERKGIPLVVANYIMLTYKGCRTTIKTRDGVLSVSLRRGIKQGDPLAPLLFNLAIEPILDEIQANTIGLEVEGHNLAIMAFADDIVFLAKNRDVAVSQMEFVHESLSRKGMSLFVEKSSSFQYVSRSRSWYMKDPNIEVAGKRLPYQSPDEAFRYLGAKITPWKGLIGGVETNVFRELVKKVQQLPLKPMQKVELLRIHLLPRYTYGLIAQPPSGVVLKAIDVEIREGVKRILHLHHTTGTPFFYTPRHEGGLGLIEMEKMVQIVALRNALKGMESTDRILRDSLSSEKCVKRLKEYAADLKLPWPTNLDELDAQKRAIKQDYQKSWVKQPVQGQGANAFAEIPLSNAWISNGKLLKSFRIIDAFKLRTNTYSTRATLKRARPDMDAKCRSCREANETLGHILGQCPGTKSKRIHRHNEIVELIKTRLERRWKTLVEPCIAVENERFKPDLVIHMNEGGVIVLDVTVRYENKNFLEKAASEKIQKYTAILPAVKYMFRSTHAEVVPIVIGSRGTLPRKTIKDLDRIGISVKKNWLTMSMIALRSSIEMINAFMDA

SEQ ID NO: 26637 - protein, 1156 aa, Euschistus heros
MLEAAVKKPGRRYKMHFPLTMVRTRKQASDESRVRAALEGLDSQPSTSAGSASGAPLSYGTVRQAVIGMPNLNSDSSLDAHEHPARRRVANRQRNVQIRMKWTRDMNIAAIRAYFLATNLERDRTGYRSRIIGYWNERFPEKQVTAQRLGDQVRQIIERKFLSEAEINDIKIDIGKIMNDVVDNSQESGCEVEVTVDVSEQILQMQDDPQAQLIAEMKMRIQEEHMKYEGVPLCHRPNIVRVPYSKQTMNMVKVVDQVLADIVKDDMTLQEISHWIYVAARTVGLQLGLYRLKREEFKSLKRDKDKDTPPWKRRLITKVEAFRRKIGVISNYLRGPEKASLKLKTKIDEIIVFHIGDVQKSKLNQELATLMETMKQKLAIYANRIRRYTEAAERRKQNASFNTMEKMFYKKLTNERKNKNAIHPSKDSLVDFWRGVWGKAEYFKKDAYWLKQVDDSVVHVPLMEAASISTNDVIQSLRKMRNWKATGPDKLHNYWLKNFKSVHRSLASCYQKFLENNIDLPNEFCTGITYLIPKGDKEQLESKDYRPIVCLNGVYKLLTSVINQKLKEHINLHKLIADEQLGTRENSRGCKELLLIDSFIASQVKKRHRDISISWIDYQKAFDSVPHDWLLQVMKIYKVDQNIINLLERLMKLWKVFLTMPDDKRERSEEAISIKRGIFQGDSLSPLWFCMAINPLSTMLNSSGKGYHLNTETVLSHSMYMDDIKLYARNEQDLRSLLELVRAFSSDIHMSLGIDKCAVLHLKRGTVIEVRNMELSNSIVLNHLDERDSYKYLGIYQLLEFKKDVKRQFEDVFKKRSKLILKTLLSGKNLIKSLNTWVIPSLAYSFGIVNWSTTELESMDRYLRVQMVNARKRHPKSSVARLYLPRKIGGRGLTSIFKACREQEENLRGYFKSKVSRVASTIVELDKKFTALNLASTENPLVPTQENLLDSWKTKELHGRFYHSITTTGTDVDASLMWLRKGTLFPETEGFLLAIQDQVIATNVYRRRICGEQINELCRLCKAAAESIQHISSGCQALAGKEYLLRHNCFAKIVHQAVANKYGILEKAEVPYYRYNPKPIIETKHIKLYWDQAILTDHTIPHNRPDILLVNKDNKSAAIIEIGVPTDDNVHRTAAEKMRKYLDLGEELKHCTVLKM

SEQ ID NO: 26638 - protein, 938 aa, Blattella germanica
MITSASLRCFLCKHVSTSENSDFILCTECQQWFHGSCVNLCNDAVKTVSESNSSWTCLSCKCNDNSIPNSDISQSDLIPCPQCADSSKLYKGVRGLRIHWAKAHSNENFIGNLSSSVTQTNILDAPAFSSRLASCKTNIQVLRRIPKGARSFSADKLSHLLDLCISTNTAENWQNLFLFAYIALRIPDQTSNKQGRSLVSKIKDNVSTFTLQSPQHHDRSPTFSKSRLVQAKVADGDVRGAIRALSSESGIIYPSSTTYDALVDKHPSPSRPLHFPDPPAPDSPCLSVSDSMVLKAISHFPNGSASGIDGIRPQHLKDLTSKSAGDSGIRLLHSITRLCNFILAGKIIPEIWPHFFGASLIAINKKDGGIRPIAIGNTFRRLIAKLACSAFKEEMGLYLRPQQLGFGTANGCEAIIHTVRTFLHQNRASNNILLKIDFRNAFNVIERDSMLDIAQNKVPLLYAFLWQAYSQPTNLYHNSELILSQSGVQQGDPLGPLLFSLVLQPIISKLTSPLNLFYLDDGTLGGDPEIVLSDFIKLVDACKSVGLTINPDKCELYFCSSIDANTVSAFNTVAPGIRLMSQSDLSLLGSPIFLPAVDKITKVKISEIQRLFDGLSLLPTLTAYFLLKNCLFIPKLTYILRTSPLWLFPALIDEIDSLIRRCLESILNLHLEDNNWILATLSISFGGLGVRRITDVCVPAFLASSYGVRDFIKSNISPYGDEIEVLHLNAALEEWSIITCNSNFPASRNKQKDWDTIYSKIIYESLLESLPSPADQARLLAIRTKESGLWLSTVPSANIGTLMDNMTFKIAVALRVGAKFCFPHKCICGVNVDPHGYHGLSCPKNTGRFSRHFQLNDVIQRALVSAGFPSIREPVGISRTDGKRPDGLTLLPWSRGKSLLWDATCADTMALSHLSQTSKVAGSAAMSAARNKHKNIKI

SEQ ID NO: 26639 - protein, 971 aa, Dermanyssus gallinae
MSTQPPPASPDHPPMLSQQLFICDICRKAVKSLRGLRMHKTRVHRAHTPPSRLPFDSARSTEPQDHADPISTIPNHDPKILIRTLSNARKTIRLVRIIPRGVREICSAAYAEALANFNLRQDYPSWHSLITLPLLMLKVPERKGKDITLCQIIRKNLAESQWRVLDNVVEEHHSDNIRNSKKHHLDRHRATMAERKLAEGDIRSAAHTLLSVDTFAPPDDHTYQELINKHPAPPTSASIDNLPAPNPQETCVAQEKLIADAVRSFALASGPGLDGLRPRHLRDMLDCMVPSSERLLTELCSLVNLALNGKLPSFCLPIFYGAELTALKKKDGTIRPIACGLTLRRLAAKVAIVVNRRAISSAVTPKQVGVSVKGGAEAAAHAVRGFIEADGPPRVVVKLDFRNAFNTIRRDVILNEVKSKVPQLFPFTLQSYSKPSLLSWADKEPLLSSNGVQQGDPLGPALFSIGISEIVARMESPLNVWYLDDATLGGPVNSVVGDILKVLRSADEGGLELNPSKCEIIAVGGDSHEQGEMSRTIENILPGSKRVDQADLEILGAPIGARRILETITVKRNALLRIKPRLIAMHPQAALCLWRYSLGSPRLNYILRTSPASNELAGLQDFDDTAREILGEVLNVTLTDHTWQRATLPLREGGLGIRSVTELAPVCYAASLLEFAQLAGTLVEPNIRHVIQVTKDKAELAARNVIGPGPWEERPTQHTLDGYRCNIVGQNLLDSMQSPTERAVFIAARDTFSSGYLRALPSPQLGTMLDNTSFRMVTALRIGAPICEPYTCSACGTPVESNGLHPLSCIKSQGRAARHAELNSIIRRALRRAGIPSTLEPRLDTSSDRRPDGVTIPLWSCGKCLAWDTTVSCTVAPSYLRHSALEAGWVAEHADREKRRKYRDLEPRYHVVPIAMETLGPASKGTRRFIKELGERIQENTGDRRESEFLRQLLSLAVCRGNAACITGSMF

SEQ ID NO: 26640 - protein, 977 aa, Dermanyssus gallinae
MSTQPPPASPDHPPMLSQQLFICDICRKAVKSLRGLRMHKTRVHRAHTPPSRLPFDSARSTEPQDHADPISTIPNHDPKILIRTLSNARKTIRLVRIIPRRVREICSAAYAEALANFNLRQDYPSWHSLITLPLLMLKVPERKGKDITLCQSIRKNLAESQWRVLDNVVEEHHSDNIRNSKKHHLDRHRATMAERKLAEGDIRSAAHTLLSVDTFAPPDDHTYQELINKHPAPPTSASIDNLPAPNPQETCVAQDKLIADAVRSFALASGPGLDGLRPRHLRDMLDCMVPSSERLLTELCSLVNLALNGKLPSFCLPIFYGAELTALKKKDGTIRPIACGLTLRRLAAKVAIVVNRRAISSAVTPKQVGVSVKGGAEAAAHAVRGFIEADGPPRVVVKLDFRNAFNTIRRDVILNEVKSKVPQLFPFTLQSYSKPSLLSWADKEPLLSSNGVQQGDPLGPALFSIGISEIVARMESPLNVWYLDDATLGGPVNSVVGDILKVLRSADEGGLELNPSKCEIIAVGGDSHEQGEMFRTIENILPGSKRVDQADLEILGAPIGARRILETITVKRNALLRIKPRLIAMHPQAALCLWRYSLGSPRLNYILRTSPASNELTGLQDFDDTAREILGEVLNVTLTDHTWQRATLPLREGGLGIRSVTELAPVCYAASLLEFAQLAGTLVEPNIRHVIQVTKDKAELAARNVIGPGPWEERPTQHTLDGYRCNIVGQNLLDSMQSPMERAVFIAARDTFSSGYLRALPSPQLGTMLDNTSFRMVTALRIGAPICEPYTCSACGTPVESNGLHPLSCIKSQGRAARHAELNSIIRRALRRAGIPSTLEPRLDTSSDRRPDGVTIPLWSCGKCLAWDTTVSCTVAPSYLRHSALEAGWVAEHADREKRRKYRDLEPRYHVVPIAMETLGPASKGTRRFIKELGERIQENTGDRRESEFLRQLLSLAVCRCNAACITGSMLRGRDCY

SEQ ID NO: 26641 - protein, 976 aa, Dermanyssus gallinae
MNSKLPKPNPDHLQTRPQLTFICDVCRKSVKSLRGLHIHKTRVHGGQTHTHSFDRPPDGSAPHTSTQDQRDPADITSDNDPKMFTRILARARKSTKLVRIIPRGVREICCAAYAEALSHFNSRLDAESWHRLMTLPTLMLHIPELKSNDITLCQVIRKNITDSQWKTLDNLSDRPHHSLAQSRKEHLTDRQIAARAERKLAEGDIRSAARTLLSTESFALPDDRTTQELRSKHPSPPAHVRDRLINFEQPPTDEPFIVPAQLVVNAVRSFSLASGPGLDGLRPRHLRDMLDSTIPSSERLLAELRCLTNLTLSGRLPSFCHPIFYGADLTALKKKDGSIRPIACGLTLRRLVAKVAIAINRTAIVKAVAPLQVGVSVKGGAEAAAHATRAFTEAEGPPRVLVKLDFRNAFNTIRRDVILNEVKAKVPQMFRLAWQSYGTPSLLSWGESEPLLSANGVQQGDPIGPALFSLGISGLVSRMKSPLNVWYLDDGILGGPANIVASDIREVLQFAEEGGLTLNASKCEVIAVGGTSHQQDEACKLIADALPGTKIIELPDLEVLGAPIGSRKISKTILDKRDALRCIKTRLLAMHAQATLCLWRYSLGSPRLNYILRTSPTGHHCDNLQAFDEVAKEILSEVLNVALTDRSWERATLPLSEGGLGLRSVADLASLCYAASIIEFSGLAETLLEPDVHSVLRGRRDEAELAARQAIGPGPWEQHPIQHMLDSYKCQTTARKILDDIQSPTERAVFIAARDTFSSGFLRALPSSQLGTMLDNTSFRMVAALRIGAPICEPYECKACGKTVDEDGLHPLSCTKSPGRASRHAEINAILKKALRRAGIPSTLEPRLGFEDDKRPDGVTIPPWSNGKCLVWDATVSCTVAPSYLMHSAIRSGWVAEHAEIAKKRKYSDLGRRYHFVPVAMETMGPISKSTSILLKDLGVKISANTGDQREGEFLRQQLSLAVCRGNAAAIIGSMD

SEQ ID NO: 26642 - protein, 844 aa, Dermanyssus gallinae
MTLPTLMLHIPELKSNDITLCQVIRKNITDSQWKTLDNLSDRPHHSLTQSRKEHLTDRQIVARAERKLAEGDIRSAARTLLSTESFALPDDRTTQELRSKHPSPPAHVRDRLINFEQPPTDEPFIVPAQLVVNAVRSFSLASGPGLDGLRPRHLRDMLDSTIPSSERLLAELRCLTNLTLSGRLPSFCHPIFYGADLTALKKKDGSIRPIACGLTLRRLVAKVAIAINRTAIVKAVAPHQVGVSVKGGAEAAAHATWAFTEAEGPPRVLVKLDFRNAFNTIRRDVILNEVKAKVPQMFRLAWQSYGTPSLLSWGDNEPLLSANGVQQGDPIGPALFSLGISGLVSRMKSSLNVWYLDDGILGGPANIVAADIREVLQFAEEGGLTLNASKCEVIAVGGTSHQQDEACKLIADALPGTKIIELPDLEVLGAPIGSRKISKTILDKRDALRCIKPRLLAMHAQATLCLWRYSLGSPRLYYILRTSPTGHHCDNLQAFDEVAKEILSEVLNVGLTDRSWKRATLPLSEGGLGLRSVAELASLCYAASIIEFSGLAETLLEPDVHSVLRGRRDEAELAARQAIGPGPWEQHPTQHMLDSYKCQTTARMILDDIQSPTERAVFIAARDTFSSGFLRALPSSQLGTILDNTSFRMVAALRIGAPICEPYECKACGKTVDEDGLHPLSCTKSPGRAPRHAEINAILKKALRRAGIPSTLEPRLGLEDDKRPDGVTIPPWSNGKCLVWDATVSCTVAPSYLMHSAIRSGWVAEHAEIAKKRKYSDLGRRYHFVPVAMETLGPISKSTSILLKDLGVKISANTGDQREGEFLRQQLSLAVCRGNAAAIIGSMD
